United States Patent Application Publication US 2007/0054278 A1 - sequence listing, part 47

SEQ ID NO: 94753 - DNA, 1391915 bp, Homo sapiens
  misc_feature (1)...(1391915): n = A,T,C or G
gagatgaggacacacagggtaaaatgcatttcaggcagaggaaacaggaagggcaaaggcgtggcactaactgagttccggaggcagggccagcagagttgcataaagcagcaagggtgggcagatcacacagggccttcccaatagaggaagcttagcttttactctgagtgaggcagggagccacctgaggggttgaggtgacgaatgccatgattcggccttctcaagttttaaagggagcttctgggctccacaattagagaggatggcttaaaaaaattcaaaatagagacaaataacaattataataagaaagtaggagaatatgagataagaagaaagggtagaattgctttccttcattcatcaaatatttattgaatacactgttaggttctggttaagattaaaaagtgacttagatgtggatactgccctcacggagaatttacataaggagataaaacatgagcagaaatgaccataatacaaagtagaacacaatgaataaaggataactttctatgtgggtgacaggaagggagaattaaagaagtcttcttaaagcagttggcattttgctggccacaaaaatataagcttcttgacagcatgtgttctgtcttttgctgactgctaaattcctagcatttaaaacagtgctttgcacatagtctgtgatcaatagatatgtgttacctgatgatagaatgaatttgtatatgcagatatgtagggagaagggtgttcgagcaaagggaacaacataaacagaaacacaaaaataaagaatatgagtttatttccttggttcagattgactgaagcaaatgagaacagtgggagatgaaattttagaacacagaatgggattagatcacacaagaccttgctggccctggggaagtatcttgactttttttctataagaattgggaagctccaaaagctctgaatagtgataggagcagaacattgtaccagaaagattagtgtaattgtactgataattgattgagggagtcaaccaattgataggtggatgatattgtacaagcctagacaaaaggtgatgagggcacccattagttcatcgccacttggtcccttcatcattagtacttctctgccagagacatctgtttatttgtattgtaattattttacttgtctctctccttttcttcactaataatgtagcacatttagcactggagctagacacttctaattatcccccaatattccttggctacagtaataaaacattgtgagtttgagccggacacagagctaccagttaaagactacatgtcccagcctctcttgcaactagctgtggccataagactaggttttggcaatggatttgagcaggagtgaggattgctgtttctgggacatgccctcatagtgaagctgtttgctcttcatttcttcctgcctcattcttgcagattgctccatacccatttttctctcctccacctgaagtaggtgttggagatgatgcccttttggaactacatagcttccttcatccttttcctgaggagacaggtacgtgggcttgggagttgcttcatgggtcaagctttcataggcttttgcaaaaagggaaaatgtaggtgtatttattactaggttctggccagttggatgagaatgaaagtggggtgctgtgtctgggtcatgcacataatgggaagctctctgcttccactttcctccttcttgagggcaggtatttgaccctggtggtctcgagccccccttgtctcaggtgtcattttacaggatgcaaagaacaaacatgctcctatgcccctgcacctgcctcatggggaatgctgcccaacctcctgggattgcctacaaaattgaacttctattatgagagaaacaacttccatcttaattaagctattgttatttggtcagtgttacagaagccaaattaatattttaatatataatttataaatattgatgattaccactacgtgttaaatgagcacatgattggtaaatataaaacacactatacatgtaaagtataggttgaactatcccttatctgaaatgcttgggaccagaagtgttttggatttgtttttgttttttgttcaaatttggaatacagtcatccctcagtctccatgaggaattgtttccaggacctcctgcagataccaaaatctgcagatgctcaagtccctgatataacatggcgtagtatttgtatgtaacctacacatttctacctatatactttaaatcatgtctatattacttataatatctaaaacaatataaatgctccataaatagttgctatgctctattgtttagggaataatgactcaaaaaaaaaagtctgtacatgttcaatacagataaaatttttatcccaaacatttcaatccaaggttagttgaatccatggaggcagaatctgtacaaagagctgactatatctgtattatatactgatggtcacgccagttctgaaaatctgaaatccaaaatgctcaaaagagttttctttgagtgtaatgtcaacactcaaaaagttttgtattttggaccacttcaggtttcagacttttggaataggaatactcaacctttaatattaaaaaaattatttattccattcccctaaactttgagcataaagcatctatagtcttttgagaaggaaagctgtaatagaaagcttaggctgaactcaacttctctgtcaccataaccctgggtcgattttctaacttgcttcgtgataagcttgttcagcacagaaagtatctgacaagataaagacaacaaaatactgggttactagtttctggtcatgggctctatcacaccccaaacaagacttttaaaggaaaatgaactatgaaatcttcaagttgtgtatctcatatctctttataggcaagcactataaaaatgtgaatttgaatattatttcattgcagggcttttgtgatgcttgttttcttatagaatgcaacaaaaatttcatggaaagaaagtctagtttctattgaagaaaaatatttgacattgagattttaaaaattttgccatttacatttatcattattttttcaataatcttgcactctcatatccagattgtttaaataagcatttctgcttgcacagcccatttgatgaaacatatttattatcaagtttatgtacttgtatcactatcgcactcagagaaatatcaggagtctctgtataactccttatgatatatacagttcttcatgttttaggtggaagagcattggaatgttgacttatctaactggaaaagtggtttggagggtgttggctcttggagcatgaggttgcaattaagaaaagctggaaattggcatacacatcctgaatcaaaatacaccttcagaaagagatgaggacattttcaccttataatgctgagaagtctatactgctaaagataaaaatggtgaaatgtaaatattggttatgaaattgaaaatttttatttcctgtaccactgaagttattttgtataaacggtattgtccagccttcttttatcaagatttgaatgttgttattttggttttcctcggagtactaagggcagggactttgctttgctgatcccaaatccccagaactgtgcttagcaaacactgggtattaaaaaaaaaaaaagagagagacagttgttgactgaataaatagatgaatggataaataatgtttgcatttaagaattacgatttccaatggcaagagaggtattgctagtacaagattttcctttagaacataaaaagagaagataatggatctcaattaagttgtttataaagaagcctgcttcataatcaatgttttttttaagtcatgtaggcatacttattacatttggcaatacagaaacatcagattttgcagaactatctctttaggtgtaagattatattaaagaattaatatgatacaagaattatgaatacaggtttaggaaaaaacagaaaagaaccccaaccagtaaaaaaaaaattaaagtataacattaaaaaacatcaaaattgtaaatattgtgtagaagaaaaactaaatgattaacctgaatggttatggtattgctgataaatgcatcatcttgactcctaggagaaccaatttatgtgaaattccatgaaaaagaattagttacaacaagcagaattttagtccatttccaagaattttaactactgtaaatcacctgacacacttcccaataattaggatatcgttttgcatagccacatgggaacctggcctagaggtctataggtaatctgtttcattcatgtattttaagtatgtcgtttaggaataagttatcaggtttgcaacctataagcaaaggaaataatgtgacactggaaaacaacactattcatttaacataatgaattgccatgtaataactcagatcttcccagggkgtaaattacacaaatttgaaagatgcatttattatttaatgcctcattcccagacagttgcttactcagtagcaaaatctgtcttagcataccaagtgtaaagctatttaacaaataggaaggtttaaaaaatatatactatcatgcagacagctaaaatatttgtatatatttttaatcttttttctctaatgatacttagaatattttatttttattactacaaataatagagatgaaatatgaattgtattagtagcagagatatatgagctaaagcttgtattgtttaaagcacatcatcttaaaaggcctgtcaggaaacagtgttcatattaagttggctttcagtactctaagaagatgacatcattttgtaagagacaagtgttgttagagcaaatgctaggatattctaaaatttcctaggttgaagtgaagaaatttctcattatagattatttcatgagtttatgttcccggttgtatatcagctcatgttaaattttgcaagagtttatgatttctaagaactcaccttctataaggccctttgctgagtggggctagttaggaattagtaagtaaaggggatcttttttcctcgtgtaaatagcttaagagtaattttgggcggtccagaaaccataagttatcaggaaggtgcttataaatgggcagagtacatcacttgcccaagattctaacaacctagcctgccccccacacactgtggggcaccgtttgctacttgccaagtaactgccttttttggcaaagaccacccaggacatggctcagagtccatcctaaggctggccaacctctgtaaatctcgtgtcccctgattcagagcgagtgcatttaattcaggaagatcacttacgactgagtttttcatcatggctttgactgtgaaaccctcagaaaccagagagtgaggctggtgcaccgggagcggctgttgtgccagcagcttggtcctcttcggcatcttgtctgggcatttgtttaagctcagggtctctttttctgccaccatcttcctagaaaatgtcttgttctcataaaaagtgtagtaaaagaatcagtgggctttacggatgtgagcaggaggtctggaaaaaaatatcaaaaggcgcgataatggtagaaattcaacccctcgtagtgcccaggttgatccagatgtttggcagctcctaggtgaagggagctggaccctaggggcggggcgggaagagggcaggacctkggctagagctgcaacaagcttccaaaggtarrcctcccggttgctaagcgactggtcaacacggcgggcgcatagccccgccccccggtgacgtaagattgctgggcctgaagccggaaagggcggcggtggggggctgggggcaggaggcgtgaggagaaactacgcgttagaactacgactcccagcaggccctgggccgcgccctccgcgcgtgcgcattcctagggccgggcgcgggggcggggaggcctggaggatttaacccaggagagccgctggtgggaggcgcggctggcgccgctgcgcgcatgggcctgttcctggcccgcagccgccacctacccagtgaccatgataggtacgtgggtacctgccaggtacagcctctctgcgccgccccacgccccggtatggcgccacgccccgcctcggccgaccaggacccccggtgccaactgtcaatgacggggccaaagtgcccgtgccgtccccggcccgcgccgccgggctccccagctcagcgacgcgggtccggggccccagtgtgtgcgttcgaagccctcgcctgcccgcccctgctctgagcgttctcatgaagaccgcctcgacggggacgccaggcggccccgcacccccgctcctcgttcgcggtcccccggaccgtgtggggtcccgaagccttctccccgccgccgcccctcaccttcgccccgccgccgcccctcaccttcgcccctcacctcactggccggttgtggtgcggttcaggacccatcgagacccactctctgtggggctctttcaggaaaccgcagcaaagcattaaactctaatggaaggcacctggtgagggtggctggctccacagaaactcctccagatagatctaaacttgctccctcggatgtttccttttaaacttctcattggagggctgagatgaaagaaacattaagagtaaatagtagccaagattaaatctattgccttttgcaaaataacctttcttttttttttttgtaaaagaacgaccgaggtgcaagtttgtgaacgaaacttagtggcatcagagttgttcatgaacacttgatgtgtaagatgagcaaaggtcctctcttccagggttgttgagccaaaagttactttaggggctatccctgaaaattaatggaaatgcaccatatgtttgaaaaacagtgctagatggggtttcattattgtggaggtttctccaggttatgtatggagggtttagtgagcttgtttattcctgaggagggtcctttacaaaacacttttgattgcagtaagtacgttcgaagtcagatgtggtctgtccagaagaaagatgagaggtggatttataaagtatatgatctttatgcactgaaaacacttcttacatctgtttatttgtgaagttattgttaaaatgtaaacattctccccatcagtgggagaatcaagccagctaactggcatggtctttgtggtaaaacaagaatgttgtccaacttttcttccctttctagcatggtctgacttttggtgaatgacttgaaagttaatcaaattacgaaaaaaatattttttatgagtcttcttgagctctttttaggtgacatttacgtaagattcacttgcaagcacaagtttgaactgaatcagaaaaccaagtagaagagattttccaatatctgtgctgtcagtctacaggaagaaaatagcctataccttattttgaagacagttaaatacattttattttaatttaacttaatctagtgcacagataattttaagagaaacaaatttattgtaaagctatataaagacaagcacttaagatctaaagaacattactcagttataagttatgacctaataagtgattatataaataactttattaggatgaaatgtgtttggacagttctgtttagttttatctggaattcttccaataaggaagaaatatctttggagttgatgattaaacagttatcaattactggtaatgacatggagaatataaggttggtttttaaaagtgttatttctctcactccagccatggttttacatagtgcaaataagtgtgcagtacaacataaatgattaaatccatgcctgctttccctaggaaatgtgccttacatataagatcatggacaatgtgcaataaaatattcaactagttgcattgcctaattctgaaattagacacacgtcttttttttttttttttcctctttttgagacaggttctgtctctgtcacccaggccggagtgcagtggcaccatcacagctcactgcagcctccaactcctgggctcaagtgatcctcccatctcagcctcctgagtagctgtgactacaggtgtgtgccaccatgcctgccaattttttgttatagtttttgtagagatggagtttcataatgttgcccaggctggtctcaaactcctgggctcaagcaatcctcccgcattcgcctctgaaagtgctgggattacaggcatgaaccaccacgcccagcctcattagccacatttcagtaaacatctgaatggtcagtttgggatttgggtgtcgtgaacagtgctaaaggtaggtgaaagtgaaaaccattaaaaggaagccttggagtgatgggttttgtgtttttgtgacaaaaattcagagccaggaaagacattatagactttatccagtgatcactaaaatgtaaatagtatgtatctgggattttctgttaaaggtaagagtgcttctcaaagcttgctcctttcaggcctatgctttctctaactattacactcaccttgttgcgggattcgggagtatgagggagacctcaggttgaagcaggagaatctttattgagtgtactcaggcccagctgactcacatccraaagactgggcccagaataaagacagtacttgacttttatacacacttcacaaacggaggtgggctagcttgaagcaagcttacagtggcgtgaaagcagggatacagaggcaggacaaagacaggattgcagatgaccattgccaagcaacccagatgttcgttttctaggtttgcctgggcacaggcttatcctataaccttctctgtggtgcccaggcagctgtagttcaggcctactcaggctttttatgaccttcgttgtaytacttagataaaacagaatacttgaaatcactagttacagagaacaagagtctataaactcattctgtaaaacaaaggaaaatttgtttttcttctccctgtgttgagggagtgctgagagagtctccagagcatattagataatattatcaagacttttcctgggtctaggctgtgcctgttgctgcttctggaacaagttagcctaaaacaggaaaacttatttctctttctttttaattttattgttctttaatttcccgcctcaaccttactgcraataatattctgccactttatttaaatcctggcttagtttaaggagaaacgtaaagatgggtttcctggtagaataggagtaaacaggactgactgtgacctcactgctaatgacatgtaccttccttttactttctcaaaaccgaagattcccttattggcatgaggactgtttsaaaagtacttacatttcccacctgcattgtgattgatgtgttgaatgccctgacccaggcagctacagaaacataatttaattgaagtcggttaaaaattgtgcctttgtggaaagtgtggagaaggacttcaagatgatataaagcagaatagaaaagcttaaaagaattcaatttagaaaaatgtaatttttggtacctctattaaaaatatattttgacttttttaaaaatgagcaattctttgtgtttaaaatggaatgttagtggggatatttgtggtatgttctaaatgttctgtagaactggatttaggtatttgagtaacagcagatattagagtgcatggttatatatacaacaatgttgtcagtattgaaatacacattcagtgtcttagacttttaagaagatttttgattgacaaaaaccattcattggaacatagtctcttctataccttgtttcacttagcatctcttygagaatttacatatctgcatgtccagatccactccacagcgattcctgcctagtcttttataggatacactaattatgaaaatatttaccaataaataagcactcattaggtttacagacaactgttgtcagaagtgtttgtggccatatctttttacttgcacatgtaagcatagatgtaaaataaaaatcgtatgacaatttgagttaaagagtttgtagattttacattttcctaggtatttyaaaatttttccaaaatawgttgcccwattttacaagcctatctaaagcctccactaatacaacatggtagtaaagagctgccctgcccctctgggctgaaaattgccaaaagacgtccttcctgagactgactcagctttcactagcagaacgcctcctggatctccggtcccccacctctctctcaccctaggggtagtgcctttcagtgtacaagctgcacaactgtccttggtggccctgccctccctttcagtgtgtataagagtgcccatttcctcccatgtgccatcgaagattttttatttttgccgtcttgacagatgaaaaacagtatcttttaacttttcaaattaatttagaagaaaacttctcattctcatcttatagtgcgttagttttgcaaaagcagatccagtgattccagcacctgctatgtacccttaactgctctaggtgccagggaaacgagggaacacaacagaaaaagtcccttgccatcaggaatgtatattccgacttcaccatttggctacacatctgcatatttgttttcaagcttgtgtgcagtgaattttaaagtctcaatttatatttctagttgaatatactgtgtactgctctttgccctgccattttgataagttgatgaaaaccagctctatgcctaagtaccccaaagcttctgtttataatgaggtaaaattgtgtcaaaaataggctctactaaagttttgcatagaagattttatgtaattatataatagttcttccttgggtccaaaggctctaaaatgaccctttgccctttacaattttggccctatttctgaggatgtttttgaagtctgcattttttgaaacctcatagtttcattgcctgaaaatgatacaatgaaagtactttgtattaagatatgtaaatccattcctacctccaaagtttctttgaaaaatgcaaaaaaaagagttcttacttcraaatgcttcatattcatgaaagcagttttaatgcaaaatactttattctgttagctattagttctttgatcaatgaaaattgtttcttacctgctgtttctgcagcctttaattgtagcccagtgcttattcaatgtttctgttttaatttgcatttaatgagctcattttaaatgtttcttcgtagtaatctgaatggtttctctccctcaattttgtaatattaaagagactcatgtgacagtcggctgatttatgttgcagctcacctccctggcttatttacttcatcctgtagcatagaatcttggttaaaaggaattacagtaataggattcttttcccccagtaatttcctaattacctaggactcttaacagattaactcaaatgtctgtttttcaccaaatagaaaccttttttccttgaatgaataggtatttatgattattatttcagtgtcatttctttataccatatgtattagatggtgctgggtaggratgggtacacataggttgtatttgtctatatattgcctgtggggaaggtacatagaaatgaccatttcttcccaataagtttgtggcctagttgggctgattaggcttatattggtggtatagattgcaccttcaccaccacagaagaagagtaattagaaagatgtatgtacatatcagcacacacatacatgcctgcaacacgtgatttttcatgtttcttttgttcatttgattctcgttgatctgaatgccctttctttctgttgaacatctcaaaactactgttcatcactcaagatccagttccaatggcaccaactttatgtgaaattttccatgtcacctcttaccctctttttagtgtgaggcaattagcacctcctttagagtcagccaacattttagtaactacccttcatcaggtccttgttcatagtctagaaggggtacagaaaagtaaagatttacaaacctgaaaggtgggtatcataatataggtttatacaaggaagtactggaaaactcagcctatagagcttggaagatccagctgtttcccagtggagccattccagttktcctgcaggacaagtrggagttaactaggtgaaggcggccttctagacaggcatggaggggagagaagagaatagaatgaaaggtatctggtgaggctgcaggcacaccagataagctttgtcaaggaggtaggtttaaagttggcgatagggaggagtcactgaaccattatctacaaaagagcattatgaacaggttgtattttagaaagatgtctgtggcagtactagaaagttatgaaatagaacgttgtagaaaatagttacactagtgccagcaagtccagataaagtgttaatagaggacttctcatgaccttcattgtacttcttagataaaacagartacttgaaatcactagttacggagaacaagcgtttataaactcactccataaaacaaaggaaagaagtccagataatgtttaatagaggacagtcttcgactgagaatggcagggtaattgtgcagtaggagatggcttttctcagggtgttgacattgatttgatatgtcattacatcatctctgattaaaggccatatttctttttaaaaagttcttatttttgtagaatagattaatgtctcttattgacaggtgttttatttcatgttactaaagctttatttgtattccaaaaatagtttgtatctccttctttgatatgtggaacatgatgcttagggttctatttatagtttcttctctgtgtggagagaacaatgtcatcagagctgtggatatcgtgtcacccagaatagtgcagaatagtttcttcctcttagatatctgcatgactcatatacctaggcacatattaagaccatctatgggccgggcgcggtggctcacgcctgtaatcccagcacyttgggaggccgaggcgggtggatcatgaggtcaggagatcgagaccatcctggctaacaaggtgaaaccccgtctctactaaaaatacaaaaaattagccgggcgcggtggcgggcgcctgtagtcccagctactcgggaggctgaggcaggagaatggcgtgaacccgggaagyggagcttgcagtgagccgagattgcgccactgcagtccgcagtccggcctgggcgacagagcgagactccgtctcaaaaaaaaaaaaaaaaaaagaccatctatggacagatgtgtgtatttttaagagtattgatggcttcttgatgattctctccaatttacttttactgtaagacctgaacagaggcccccataaagtttcacatgagagcccttaactttggaggagagaatgttcaatagttagcagcctcacccattttgcacatctctactcctaccctcatcaaatgagggggaaaattggtgattagggagttaatattggtgtcctgattgagactttttattatttatttacataattgttgaatacgccagttactcctattgtgagatatttttggagtttcagtgcataaataagatcttgtgatgaagccctctgtaactgcgtagtcatttttaaagcttattgtacctgcagagtagatccattttccagatcatgaaatgataggaagtagacacctgaaacttgctcgtattaataaaatggagaaataggaaggaacatttgtaatatctgtgtttctgaggtcaacctttagttttttttttttgacatctacctgcactccctcttttctgtcccctcatttttttcttacccacattccttgattttctcagaagctggaatttaatatttcattcttcagctcaaaggagcagctgttgtctgaacaacaggtgaatttcttccttacttgttgccacagggcttgactgtgggttgtaatgtttctgagggttatcacaggagtggcctgaccggaacagaccaggcttcaccacagctcctactggagacattccctagattgggaattgtctgcaatggaaatctttgtagtctctggctctgcattttccttccaggcaaatccagtcctgattacaattttttttttccattgaaacaaaattgaggaatgatgaactctgggcagctagaggatgggggcaagttaggtttgctccttggagaattagacagatttaagaataatattccctgtgccctgggtcttctctccacccttgaaattcgacctcctttctcctgaaagtcctttatagctctctggtgagttcccagagtgtgagaggtacagatttaagcacaagtgaggtcatgttctctgaggtgctgcttctctgggctcctgaccacagacaaatgtagactgcatgatccagttgatattcaccaaatttgtataattacatgtgacaatatataaagacgtttttacatgaatatgtctgaattcataggatcagatgggaagtatatgtgttttattgggcagtcaatttagacataatcatatgatacagagagtgatatttcgtagagatctgttgtgggctttccactcttgttcatttaggaatctgtgagatgctcaacctatgattggaattggaatttcttccttttgtccctctctagagttttctccattattcattgtccctttctcgtgtgtgtgtgtgtgtatgtgtgtgtggcatctgccgtgtctcactacatgcagagcttctgacataggtattgacttttatatcatcttgatttcaaagaagtcaccaaataatcttattctcagtgtcttgagttttataccaagtctctgtgcttgttttttatgttctggcaatttctgggcattgttgcccattttagaactctattttgttttgtgggggacagttctggaataaatttttttttttttgagacggagtcttgctgtgttgcccaggctggagtgcagtggcgtgatcgcggctcactgtaagctccgcctcccaggttcacgccattctcctgcctcagcctcccgagtagctgggactacaggcgcctgccaccatgcccagctaattttttttgtatttttagtatagacggggtatcaccgtgttagtcaggatggtctygatctcctgacctcgtgatccacctgtctcggcctcccaaagtgctgagattacaggcatgagccaccgcgcctggcctctggaataatttttaatggagattcaacatctaagaaactttcatattggatcaagacatagttgtcacaattcttagtgtgtaaattcattaaaagtcccttctggcttttgcagccaatttaatcatcttatgcttaatagaatgcaagttatacaggtaaagtcagtcagagaggggatggggatgctatttgagatgaagttcctagaagtaataagattttttttgtcttaaaacagtgatgataggatgattaagtgatctaagatggacaaatmtgtgtgagttcttaataattgggaaagatcttttttaaaaagtgttaatgtgaccatttagttaccataactggaaactagatagcattaggggccatttgtatatgtaaaaatatcaggaagtataccsgcaaattatatctttgggttgtgggatgttttcttttattatgattgtgtttttcagatcttcagcgttaagcgtataatgttttggaaatactgaaaagcaatgtgttataaacacaatcttsaggacaaatgcattgtggtaatacatttaaaacggattctacttttgtgtcaaattatgtcagataaattttcaatggtagcatactatgctcatgttctggtcataaaagtagtgttttcaggaaaacaaacrttagaaccataatttcactttctttaatattatacactatcggggcatggccagattactgtattagtttttgtgtagttcctgttgttgctgtaacgaattaccacaagtttagtgacttttaaacacaaatttattttcttacagttctggaggcccaaagtccaaaatgactttttttttttttttttttttgagacaagatctccctctgtcactcagactggagtgcagtggcacaaacacagctcactgcaaccttgaattcctgggctcaacttcccgaatagctgggactataggtgcatgccaacctgcctggctaatttttttattttttattttttgtagagacaggatcttgctatgttgcccagactagtcttgaactcttgggctcaagtcatcttcccacctcagtctcccaaagttgtcagattacaggtgtgagccactgtgcccagccccaaagtgactaaaagggactaaaatcaaggtgttcgctgggctagccccttccattaatagaagctcctgtggagactcctctttcacttctggaggctgctggcattccttggctcctggccacatcactccagtctctgctgctgtggtcacattgccttctcctttactgccatcaaatcttgctctgccttcctcttaaaagaacacatggggttacattcaggagccaccaggatagcctcttcgtctccagatccttaatcacatctgcaaagtcccttttgtcatatcgggaaacagtcgtaggtttcagggacaaggaggcattattcagccaccacagttaccagtaatgcttcaccatttgaacgtatggttaggtacttccttatgaaggaagaatgacagagagctacaacttgatttttgcctattgtgaggtcacttaaaggtaatgcagtagtgttacacatgaggagtctgtgtgtgtgtgtgtgtgtgtgcgcgtgtgtgtgtgcgtgcgcgcgcrcgcaggcgggtagggtgtatggactagttgatgaagctagccaaggrcataactcacttttcaaggtagttttctcaggtggcaaaagaaggtgtgaatattctcctggactcccatagtgcattgcagctgggtaatttgatatgtaccaggttgctaatttgtatcctgtagagaaggggaagttttgttatgctttggacaggagataccacttcacataacagatgatcaggcaaagtggaagcaaataaccattatgtgtatattgctttctgatttgacagttccctatgagcgttagacacttcatgctccctggaatagtttaacattgtcctgtcctttgtaaataataactaatatgggttggttgaaaattatacagttagaattttaaattattaagttgagaaggacgaaagagcgaaatcttgtaatttctcacagatgtcagcatagaatttggtttcttgaggcagttttaacagaaacatttggaaaatattcccttatacattgttagtacagttaggagaaactctaatatggaataaattttttaaatagatgaatgcagaatttggtttttaaagaagaaaacatttattttttgctgaaaaaagaaaatgttaaattcggcaaatatttattgacaycttaaattataggatttatgataggcactaggcgtgcgtatctaaatgaggaagtcacagttagtgaagatgctgtgtacacatggaaagtaaccattgacaataatagatgttatcatggaggtacgcttcattgtgtgataaagcaggggaaccttcagcagaggtggaatttatttgagctggatcttaacaacagactggactcctgagcaggccaagaaagaaagcgcgtttgaaacagagaggctggccccagcaagatggcaggcttgttagcagaggctgtgttgggawggatgagtagttgacgggatggagtacagggagcatggagtgggaggtgatgatagattagggtgtcaggaccagctcagtgcagttttccatgccatactggagaattcaggttttgctctgagtaatgaggaaccgctcaatcttaatgctaggaactctaaggcagtaggaagtggctgtgtcttgtcgctgaaagtgagatgtgaattcaaatttgaaatataaaataaaattgccagtagccaaattaagcacttggagctattacacagcttcccacttaggatctttaaactattagggcaattagctgtactttaatataatcagaagaaacaaacccttcaaaaggtttgtgtacttcagactgtcttgacagagttattttcctctaaactttaaaaaccgaatttcattccatctttatagtgtatctttacttacctgccttattcttgagggaataagcgtgctcatacttaataaataattgttgcctaaatgaaagtgtgattcaaaggagagaagacctttgtccttgcctccggtttgtcttcttccatgtcccttgaggaatccagtctcttttgatattaacctttggggtggggccccacttcatttatctttggggctcctagcctagcagaatcccatcaggtgttgagatgggagaaaaaaattaacaaataggggaagtaactatatgccttgactttggtgaaaattaagtatctgaggagatggttcattaattttaagagagagagctttgtctgtcatcttttccatgcaaatacctagcacaaggacgatgactttttcctttcttctttttttcccttgtcctttactgttgtttcttcttactgcttccttaatgcttgcccttagagggaagtgcttaaattatttgaattttggaagaagtagagatttttaaaagtggttactctatgcagcaggtttagggtgtaaattacgtagatgctttgtctcttttccacctttagcttttaactttacaacaaatgcasttttgcttcattggggtctgtatttacttgtttccctaatgcagcttttctccatgaaatgctctcagtagaaacatatgctcaaagcttcagagtaattacaatatcactaaaaggttcgtaatcacattactgaaactaaatgttaaaacatttgatttttcttgatccaatcatttcaatttaattctaggctactccgtgattgatggaggaaacatggcaggccaaagtcagggggtatttataatgccaaaagccttggagggaaaacctcaaggcaatttaatttgggtgggagctcatttaaattattccgaagggttttttaaaaaatgggaagagcaggtttgtttcagtgcctgctctcagggcccctccctccctgtcaccagtgtccctgcatctcctcagcccctggttagacaaaggccccgtgacgcaaagcaaagaaggaagtctgatttttttcacaattgttctaaagatgttcttttgtgttaaagaytggcttaaacttgaacgtttttcttgtaaatcaggggtagttttgagatatttgcstctgtttrcggtaagcaagcacacctccagcagggccaccacataattaagtcacgggacatgccgacagcctcacttacccatgaggatgcagagtggtgtgaataaaaaatctacctttacctcattgctcacagcagggcggagaaatgatcaaacgtcacattcctgatggtggctgttctgaaaaaccatttattttatttttattgaattacggagacaagtgaatgtgaaatttctgaagcaatgtgaattttcttaatttttagcacagtttgttttaatcatatacattacaragcagtcattttagaatatttactgatttgcctttgatatctgctcagctagaggtctggatataatgctgagttattttaataattagcttctataattctgcttctgaatggttatttcatcctgtcttttaagttctttttttttgcttttacaaaacagtataagtatagctaacagacaaatattttgccaataatcatacataaagcacttggtgacatttgagtctttttattaaatttctgaaggtgaattttgaaccctaattgtaggatttttgataatgggatataacactatgatatttcttaacactttttattccctgaatctggcatactttttctgccttycctcccttgtagcaaaagagacctaattttttttttttttttttttttgaggtggagtctcactctgttgcccaggctggagtgcggtggcgcgatcttggctcattgcaagctccacctccygggttcacgccattctcctgcctcagcctcccgagtagctgggactacaggcgcccgccagcacgcgtggctaattttttgtatttttaatagagacggggtttcactgtgttagccaggatggtcttgatcttctgacctcgtgatccrcccgcctcggtctcccaaagtgctgggattacaggcgtgagcctggccaaagrgacctaattttataaataccagtttcttgccattcttccacctccttgaaggtaggttttttgtttatttgactgattgattctactttttgaaatcaagtttggaatttaaaaagtatattgcccatgtctagtagcacttcttattcactttctttcacatctcaaatcacccttccgttcaaactataatattacagcatctcatatayttagtatttctcctccacactctagtgtggtgaagtggtggtaatagtgccccttcagaggggttttactctggaggaaccggaactgaagtgagtaaccctagttttatgtggaggtttcataagtttgttaggcctggaaaatggggaagtgaccctggtttttacattcatatgttaatagttttctcttgcttccatgaaataatctcagaagacaggttcaactttaggacagctatgtaacttcatgtttggacattaagtatggggatgattgtcttaactaggtttctatcatatgccctatgtggtgcaagccagagataaacatgttggatctgggctttgctttttaccctacttacaaactaatgagttagcctgtttatatcatggagactggcaaaagatatgagacatgggtcagagattaaggggctttattactcatagtatggcaagttgtataagcgtcatgatatttactctagttcctttgcccctgaatctcacggggtgatgtgatacagcccagatggatgctgtgcatgcagtaggtttgcattgcagatgatgactgctgagcttagggaatcttccatttttatagcaagcagtacctatgctctttgtctggggttagacattacttcattatttaaggttatcagatgtataaacagtcctgagaagtggcccaggtaaaagagcagtcaggacaatgcagtcttgagaaatggcccaggtaaaagagcagtcaggacaatgcagtcttggtatcccaacaagacatgcagggagtataagaagaccaaggaaaactgtctctatccatccccatcttggcttttggtaaatttttacatgaataggccacctgtagtcactctgattaatcggaccaacagaggttggaaccaaactagtcaacttgtctcataccagcatttaattagggcaacaatcaataaaatcctaagcagcaggatgaagccaacctgcagtattgacttcatccagtctctctgccttccccgaccagaatctctgattcagcctactatgaataaatcccagagggagaccagtaggtcttaattcagacggtgcaagacaagtctgctacctaatatgatctgcgcaagaaagtttgcaatgacttgcccctcttgggtctcattgtcaatgataatagctgtttcagaaagcarccctcatgcctaatggagagacattctgtggcctactttcccccatatagagagcacaggccactctagtttggaatttgttgctacacttgattggaatcagcattacactggtttgattaagccacatagtgtcactgagttgctgcaatctagattgctaaacatggcattagctacggctgcttgggaggcaggagaagcctatgaatttgtatgtcaggttggaacagtgttgaagcaatctgtgtttgcacaggtctgaggggaagggccacgtttgggagatgctgttggtggcatcggcacagcggaatagttcagggccagccatgtccacatgacttttcctggtttttttttttttttttaaatagcagttttgaccaacagcttgattccagttggtctcatcagagaataagcacttactgcaggcatctgtatcagtracactcagaccaatcagcagccaagatttgttttcaaaatgtgtagtcctacagaggggctctttaatctgccagtctgtagtcttccaaatggcaaagcagacaagtcatttacagcagtccaagagtctgtaaaatatgaaatgcctggtctttaggagcattgtctgacaagggtcagagctctcatacagagaaatgtgctgactggtccttttggctgctgctggtcagagaccaccatcggcttttagcttcatcaaactgtcagtgaaccaggccatccgtgatgggaacctctgagagccttcttgaaccagcagctctgtttccrgtagtggagtgggggatatggttcctccaaagaagtagctgccattattttcatttaatactgggtgatgctagggctggatgcactgtgcccttgaatataccatttccatttgaccaggaaggcctcttaggcccttcccacctctttagggagattcacctgaaaatgggatttcagctgttcatttttctccacaagagcttagttgcaggataacagctgcttttttgtttttttttaaagtactttgtagctccatcaaacaggtgatgctattatagtgggcaggggcctctgcagcagttctggaacatgaaaagcccttctgacacttcagggattaggccgtgcaaatgtgtaatacatcagttcttattatagaattgaatatgggagctgctaccacaacaccacattgaataagcccagagggcacctttacaaggctagttcacctcccctttcccactgggaagcactaaaccccattagtagagttcagtgtgcctttcttccatgggccaggaagaatgggaacttggactcataacagttgagttcctttcttcctcatcataccaaacagttgkgtgtgtgtgtgtgtgtgtgtgtgtgtgtgtgtgtgtgtgtttgtagggggtgccaggggctttctgtcccctggggatagggagatcttaaacccagcccagtcatccttctccttaaagcagctgagttcagaatagagggaagggagggatcaggtagtatgagagggacagcagctccgtgttaatcaacaaggcacatttactgtggctttcaagcagcagcctatgtgaggcttaaccagacttctaaagttgatggtccgcacaaagacctatatcaggtaaaaaggtcattattattgagacactgtgtcagctttgaggacccctggctcagcagccacacccacattgtctttcttgctgcccccttgtcatgataacaccccaacccgtggaggagaatgagtgagcaatatccacggttccgtttacatactcatttcaatcttgcctctcttagcctcattagcacacaggacagtagggacccttattcccacccaccacaccccactgtccacctcctaggcaagagcattcgctctcagattccagggagatttttttatattcctggacccaatctctggacacttttccttccttctccagatagctatgttccttcaccaaaactgtcaggtctgagatatcatcttaccctatttggaagctaatggtatgtgtatcgtttctcatacattttagccagttactgtttcatggttactggcagaagacatgagacttccgggtcagaaagaaaacgttttattacccttggcacaataagcagcatgagcaccagcatattggcatcaattgcccttgctttcaattcctatggtccggatggatgctatgaatgagtgagtttgcattgcaactaaggaactctgagtttggggaattcactgcttttataacaagcagtaagtcagtctgctgtttgtccaaggggagaggttgcctcatctctcacctgcgaaagcaacctgagaagtagcccaggttattaaaaaaaaaaaaaaagtgttcagacccttgatgtcttggcatacccagtaagacagtagtctccaacctttttggcaccagggatcggtttcataagacaatttttccatggatcagggcgaggagggtggtttcaagtgtaattcaagtgcgttacctttattgtgccctttattacattgtaatatataatgaaataattatatattacaatgaaataacaattcgccatagtgtagaatcagtggggcccctgagtttattttgctgtaactggacagtcccatctggaggtgatgggagacagtgacagatcatcaggcattagattctcataaggagcctgcagcctagatccctcacatgcagagttcacaatagggttcacgctccggtgagaatctaatacctctgctgatcagacaggaggtggagctcaggtggtaaggcaagtgatagggagcacctgtaaatacagaggaaggtttactggctccgcttgcccaccactcacctcctgctgtgtggcccagttcctaacaggccacggacccctatggcctgcggcttgggggcccctgcagtaagatatgtaggcccagggaagactgctctcccaacaaggctctttaggtctctgactctatgtcagggcagaaaggcagtgttatttctgaaggtgcctggaatggggttaggccagtggtcgaaaatgagtaacaaacgctattagatttttggcctttgagttagtgaaataatagatattttcaaagtgggagaaaatttggagtatagaagagaaagaggctaatcaatttcatgtttcatttaatgtttcatcactgttaagaatcagtgtcatgaaagccgtgttaggttgtttcaaaggaagcagctttcctgcccatttccagtttattgacaatgtaaaattgtcttgctatgtttgcttttctgcaatacttagggaaattttattttatattaactttataaatggtaattaagacaaagatatgatttctacttctattatcttgaatactcatctccgtttattcacaggccttaattgggacataaaatctgtaagttcctagcatatatgtctatgtggtttctcatacagttttcagatatttttatcatcaacattcattcagttttcttggggcacagctggattgagtcactagccatatgaaaaatcaaacatagtaaccattctttttatattttcaaaatagctttaaaatatgctgttggcttttatgtttatcagagccataaataaattttgaaaattaaattaatgaattatttgtttattttccccttacagaaagaaaatgtgttacacaaaaaagtgaaaatccagtggtggcagattcatgcctgtaatcccagcactttgggaggccaaggtgggcagatcacttgaggccaggagtgtgagaccaacttggccaacatggtgaagccctgtctstactaaaaatacaaatattagccaggtatsgtggcttatgcctataatcccagcactttgggaagccaaggcaaggtggatcacttgaggccaggagtttgatcgagaccagcttggccaacatggtgaaaccccatctctactaaaaatataaaaattagccaggcgtggtggcttgcacctgtagtcccagctactcaggaggctgaggcgtgagaatcacttgaacccgggagttggaggttgcagtgaactgagmtcgtgccactgcactgcagcctgggtgacagccagactgtgtctcggaaaaaaaaaaaaaaaatagtgatgctgtttctctaatgtgacaatgaaatagaatatttgtgaaatttttaaaatcaatacaaagataaccaggcaactattttttattttagtccttcatgctgaataatccttctaacaatgtgtgtcctttttcctgccatggtaaatacagtagactgaacatattttgtattactctgttctgagagtattgtttattctcttggaatcatcagttattatttagcaatagtacaagtgtaaaataaaagtaggttaagttggatgcctaatggtcacataacttaatttgaatactttcagtttttgcttaataactaatatttagatattgtacatcctaaaaatgaggttgctagataccttttccacagtatattcatataagaattatcttgattttggtccaagttatttacaatttgctggggaaactctgcttttttctcattagaaagcatcctttatatgtattagaaatttaacttagaatttaattaacttttctatattcactctacagctacttttcttaaaagctatctttcttaattttgaggtaagaaaatctctttgaaatttttgatccaagaataaaattatctggattattttactttttgtggtagccaaacaaaagagaagttgttttcaaacaaattccatcagtggtatatggtcaatataatcagtagaccaatataacatttagctgttagtgtcttcttaagaattgtttagtcattgatctatatctatgatacattccctttatgttttgcaaatagaagagaaaatgaaatagataaaaacaatgcctgatggttattgagtgctcatgtgtgtgttgtattttaagtactgatatttataccacttaatctttacaacctctagtgacactattgtggtccccatgttacccaggaggaaactgaagcaccaagaggtcagatcrcttgtccaaggttagagtgaggatatgagtccaggaagcttatgcacttggacgacatggccgcccagccttttgcactgcgcttgcttttatttccccaattctcttatttctttcctaacagaaccctcccctctgcttcctgaatcagtttagaggctaaaatagcagatgaagctaaaaagtttctttgacatataacaatttcctccagaattatcttgttgaaagtaaatagcccatctggtttcctcttttcacagaccagaactcctaagtgagctttgtgactgaagctggctgagttccatgcagtgcgcctgttggccctaagcaagacragcacaatctgtttcttctatttctaatagaggaaaagagttccttcatttgcctctttaattcattgcttgaattttatgtccttctttctcacaatggcagctttcctgctgtggtcttttttttttttttttttaaccttcaggtaaatttgaaactacataataaatgcttttcagtacaaggacaccacaatgaaataacattaaaagttgcattttaaaaccatarcaagagattgtgagctgtgtgactcccgttgattagcaggggctggcggaggtgtctgagaaagccgtgtttctgctgccctattctctacctgctctctgaataaatagaagtgtttagtgctttgctccagaatccacgggagtcaaacagccaagctctgcacaccctgagagtttacctctaagtaccttaatttagctcctgagtttacttataggaaacagcaggaactatccctctagccctgataattaccttcctacagggctgactgagggttacagaataggggcttaaaaattgaacctgaattctccctggccaagaaaatcatttgattctttctgtcttgcagagcagataagaatcttgtaaactttatgagctattaaatgcattattttaatttctagtkttcttgtggaaccaggtttcaagaggtcttcatgcagtgtttgatgtcttyccatgactgatggctgtcctccaaatctcattatttttaggaagagctcaaaaaagccagttccttgactggtatcgtttgcttaatgggacatctagattttacacttaagaacttgtattctcacagaagctctaccagattcctcttgattaagggcatattgatggaaagagtaggatttcaggcccggagtatttggcctggccctgaggtctcacatttacatctatggcattgtgagtgtaaatgatgtggtggtatagctgcttctaaaacagtgttcttctgaaacagtaaaggggattttcaagggtatcactttaaggggtgaggaggggagaggcagtctaagaaagggtctgacccctcaaacaaccaatttgtgtctgtctgacacatcaggcaggtgtgaagggtttccatcatagatattggaaagttggaagagccagtttttagtagttattactaaagtctcttactattttaacattttttatttctgagctaaggatagcaattttttttaaaaaagcaaaggaacattacctacgaagtaatatataaaatacatgtttaccattgaagctacacttcttatatttttaaaatataaatctctacacacttggtaaatgcagcaaaattatttgacttagtttaaaactgattaagaaaaatactgtttttcttgtagatttttataatataaacaaaatccgaagtccatttgtttcacgattcagatgtgaccatcctcgggcacacctgctgtgtgttagagcccaccggacccatctagctacaataactcattcagtattccttaagaagtagttttcatcatccctaattcttagacgagtcaatgaagacttggttttttaatttagaacacatttttattcacaaatatttataaattgtaacattaactaaaatttcttagctgattgtccctgggaagtcacatttaaggtgcatgtttgcaactcaaatgcatttctgctaaagacattttaaggcatcagtgaaatattccaatgagctttgacacatagtttaagtacacctaatagaacagactgaggcattcatgtatctaattattttttaaagaaacccaagatagaacagtgaagccaggaatttgattggtgatgacctggtttcatccctggtgctcaatcttctaaggagtctgggggagaggtgacagggttagtacctggggaggagtgccagcacagaggctttggcttcctaaaggaaggttaaggcagacgttcccatagagtgccacactcccaggctgcacattctgcctacaacccccccgcagtccacctgagcctggtggtatagtcccctgctgcccaggtggagggcatggccagctccagctattgtgttagtgctgggagctcaggctgccattgtcctcacactttaccctcactctttcactgaggctcagcgggtaccaggtcaagaatgtttgtctaagtgtccaaattgtgcatctcctgcacctgtgtctcttagctaaggcgcttaattacaaagcaaatccccctccctgcaaatgctgtctgtggtctccacgtgagaagggcctcatctctgtcatgcgcttgtagtctcagcacctgggaaagtactagcatttagttgactcccaaatatattgaactgataarggaataacaacacaatctaacaccttcactgatagctaaaacagtggtaatccggtaaagataatctacatggaaatatatttgccaaccagtgtgtgtgtggactatgcattccagttgtcttagtgcataatcaggctctactcacgaccctctgtgactgtgggacaggaacctccctgtgcacagccttcctcatctacaaaatggggatagtatgatctacttcttaggaatctccagaattaaatagaaagttcttagccccgtgcctgacacacactcaagctaggcagctggtatacgtgaaagacatggaaaaatgaagagtaagttggagccggcttgtgttacatttcaactgcacagctctactgctgagaccgtgttcagttttctcaattccaggtgtttagaaatatcaatctgttttggttttacccacaggatttaaaatagaatggaacagtatcacatgttaattgacaagaattagaaagagaatgtatataaatattaaaagttcaacatggtatggtaatattttatacatattttacatgtattaaaagttttcgttaaaatggagatttacgtcattgtattgtagttgtcttcattacagtctttaaatataaatgtcagaaatgwactctctgtactactttttaaatccaatagcttaattttcacttttatgtagtgtggagtccaatactaaagtaagttttttttgttgccactctattaaaaggttaaatgttccttagtggactcatacaatgtaaaataagattttcctagtaatcaacacctagaatactatcaaagcttatggtaaagtcttaagtaaatatattccaaatattaagtaaaaattgattcatttaattttttgcctaaataactttaaaaactggctttcggtattcctttatggttaaatcaatccccttagatatcartcaaccatgtacatgcagtggagcctttctctgacactgattcattaggagagctcatttaaggagttaaacatctctcacttgtcaacactgaggtaattatgcactattaattctcttgtcatttcaaaaagtgctattttaaaactattcatttcatcaatcctgagaagtaggataargtagacagcctgctgtaaaccaatttaagatgtgattacattgctttattcctgcaatgcacgaatcagaaagttgatttaatgtgaatacagcttttgaaatgtttcttacttcattttaggagatgaatatgattaggcaaccttgagaggacaaaggagttgatgtagaagaaaggaactttaatttattctgctgtttgcagaatcaagatagtaggtagggagggctgagggagaaaatcaggaaatggtagttttctttgtccgttttgtttaatggaagcttttgtgtgtatctgctatctgcatattattagctgttaattagagtttaaacttctttacagtgaccatctatgaaggaagtagaatatgaatttttttgaaaataagaggaattacattgcttaactacttaaaattatttttaaaggaaaaacgtcaagtaaaccagagactcaatatatcatgatagatatctgaaaacattgatttcaacatcctgccaagtttgcaatacttgaagttcattaatatgcagattttaaataaatgttaatgtataaaatgttggttaagttatttctcctaatttaatcttgtagaacaattgtcacgatagttttcacctcctattttaaagacatatcaatttaaaggagatgtttagttctacaaaaacaatatactattgttttttgtattttgatttaatttgatttttaaaacccttggtttaatagaagatacagggaaacattttattcataaatgaaactattccctatatgctttcatgagcttctgttggtttcattttgtcggggkgtgtgtgtgtgtgtgtgtgtgtatgtatgtatgtgaktgtgtgtgtgtgtgtatgtatgtgaatgtgtgtgtgtgttcctattggaaatgagtttttgaagttatacttttgctaatactgaaagattagtgatgatgacataattgacatgttgaatgttgagtctagttgtacactgaygtcaaaaaaaaaagagagtgaagaaagctccaatcttggaagcttgttgacccttagctttacaggttgtcttactacattgtctcaagccctaggtattttgattggtgaacaggtgtgctggacttgtatttttttaatcacatttaaaatgattaatagttcatgtaaattactgttgttatagggttaattccagtgctgacccatgagccaattttttttttttgcaatgcatctcaaattttaaaaactactttttaactattgaaacatcttacttgtgattctaccacggttctgataaaagttcatttccattttaatagtggaattgattatcttaattaatttaattttaattcttatcttcttgtgcaatagttatttaaggtcttttacagaagtccctcgttacattatctcttttaagcattgctttttagtccgaagcaacagctgcttttttgttgttgttcattacaattataatcacattgaattttggttttcttmgcagttggcagtagacaaaaatcacatttcataaatttgactttgactggtatatctgaatagacattagtcctcagattttaatggtcagcaccactgattcctttattcagcaagtttttgttgatctcagagggagtccagagccgagcctttacaaacaaaaccaattttagacacagattctgctttataaaagtttatgttttatctggggaggcaagacatgtatgtaaattaattaatagcaaagtatgtcatgaggtaaaggaaaacctaatgcagattgaaatgattgcttatgtaccaaaaggacaggccttgaattggatcttgaaggatgtatagtatttttaatactataaaagtgcttttatagtgcttttttaagttgagagaaatagaaaataggagtaaaagatgtgcgatagatataagcatatgatgttgaggatagttaggaaatgggtcaatttgaagtagagattcataagcttatcagatttggcattcaaaaagaacaagcagaaacaagaaagaaagatgttaacacttaatacctattattggttaggtgttttaactgaatcatgtcactgaattctcaaaatgtattcctgtagtttgatattgtgawcccaattttgcagtcttgggagctagatctcatagtcttgctgaaggccaactaagaagtgggtggagttgagatgtgaatgttgaagtgtttgtgttatcaaagccttcgctacttcacctgtatcatactataaacagtgggcacaagagggattgtcttgctgttcacacaaattgagcatgctcggaacatagctcctcatctcttttcttctcagatcattttcttcctactcatatttattaatggtatggggacaaagcttcttttctaccctctgaaagtttgctgaaaatgaactgacaataagcagattaatgggagaagaagacttacaaatttgtttaacatgcctaagcatggggcaattgcaggagaatgattacccaataacccaacgaggtccagatgcttgtatacccttcttcatagggaaaggagagaggagggaaatgaggcaattttgtggggtgtactaaatgattttaatgaacatggaagatagaagttagctcgtcaatgattatttgtgtgaagtgcttgaatattcattcaatattcattttgggatgaagttcatcagggttctaggtgtggtgtttaattttcagtctcttcctctaggatatgagttttaatyttctcttgttaatgaaattcactgaagagatcaaaggtaacgtacttctctttggtgggtctggtttctaggtagacaagagaacttcagagaacagcctcatcctctggtttgggagagacagatgattgagagaccgggagaggaaggtcacagagaccctagggctcctgctttggttcagtatgccaaagcaccatattttggggtattgtcttcagagtcccaagaagggcttcaccattctttcagtcattgagacttaaaatattggagacacttttattcttaaaattagcttttgtttaatatatgatgtttgaatgaaaaatttaaaaagaacctggcaaacaatgggtcatagattaaaacccatattcttgattatatctcacatagtaagcytaagctcttttgatttccagtgaactgtatatgcttttcatgtttcacagcttaccagatgttatctattcagagcttcagcatatctaggaggagtggattcagttaatctagtcttagccttgtatattttgtcataatttggtagaygtttttggcttgccttttccccatatttcagcatttgattatatattgatttggattaattttttcttgttagtctttttttcttttcaataagattatagaaaggcaagagtgatttcatattcttcaatagcttccccacactttgctcatcaccataaggttaggcaccaaatagtcaatatgtatctgcttaattactttacctgaaatgatctaaagcatattgacatgtaagacacccatagacttgtttctgtttctgtagctatataaagccagtaccagctatcacctaatccatgagtcacacatggcagtaatttaacaatattttttaaatgattaacaaaacccttttaatggaaatgaagagctcttcagaaaatgttgaaggactgttgtttctgtgaactctattgttgggtctggctttttgagtatcactctctgatcaagaagccatttattaatagtctagatgttagaagttctttggggctcagtagtgaaatttaaataattttgtttctaaaaactaagggacttaggctctactggaatgcatgtccctccaaaataaaaacctggacatatcacaaaaacaactacttgaaggtactggattgtgaagagaagcagagatgctggttgggtgtgcatactggcatggaggagaaaaggtggagagctgtagaagtcagttcttatctctgcagcttttagcctggggccaactgcagcacctgtggtccacacacctggggagaaacttgcagtctctccagccagggaaagaggaaaatgaagccttttgactttgcaagccaccatccttggggtcctcatgctcatgtgatggtgcttgagctctagccagcacatagaggtatagggaggaagacaaagaggaagaaaagggtaaaaggaaaaagtagcaaaccagcctgactgtccccttataaaggattttcaatccacctagtgactcccacctaaatttcattaacaaggactgtgtcatgtggtcagtcctggctgtgaaagaagttgggaagtgtagtggttaaaatctaggcacattgccaccctcagtaatgccaasgttctgttagcaaggaggaaaggaaaagcaatattgatagactaggcaaccagcaggatctgccagtggacacgtatgcctttgtatgctgatcctcttccagaacctgctgtcacatctgctgagatcttcaggcaggaggagatccatcctttgtacattagcataggcttttagttaacatatgtaggagtaaatatgttaagtcyccaaggagtctcctctaattgctgtttgtaagggaaacaggcaaggcagcttagtgtggtgtatattctgtcatttctgtattctccatacctcctgaggtctagataggacttcacttcttcaactcagtactccttattcattgcttatccaattgaatatgttaagaagtagacctaggaatatttactttttttactaatgaagtagacctaggtatatttacttttaataaatactcctgctctaaaaaatggtattttcaaattattgataatgtaaaaatggttagatatgcaaaaattgtttccataaatgtatttaatagttttaaaatttctcagttaagtcttaattgaccttcaataaaatcctaaactattgtttgaacagatgcttcccaacttttgacgccatagcatatatagaaggcaggcactgagtctgttagcctataatctccaaaaaaggcagcacctggtttgttttatgcctatatctggtggaacctgacataaacacattaatacaggattttaaaaattaattattcaactcatattttgatgctgttaaaacttgctttttttactaaagtaaattaactttctactctcagttactttgtgtttattgaggctacagggctaggaaggtctgagtttcagcatttttttgacctaaaatgtcatttaaaaaaatctcaaacctgtgagttatatttattgctatctttttattttcattgatgtatgtctgtataattttttattacggaaaacttaaaacatttttcttactgaaaacttgaaggttatacagaagcagggagaataacttaatgaactctgttataccagtcatccaactttaacaattttacttatatgtgacctttttcatctatatcctcaattacccactctcttatccctcagcaactagattatttggaagcaaatatttggagtctgaattgaataaactgtaaagaaaattatgagacagtggaatatatttgagtattaatttgctattaaggaagcattgttaatatttatagatatgttaattatattgtagtatgcttaaaaataactttacttttttggagatacatgctgatgtatttatggakgagtaatgtaacctcagggatttgttaacaatttgttttttaaaagttcttcctggctaagtgcggtagctcatacctctagtcccaacaccttgggaggccgargtagatggatccctcgagcccaagagttcaagaccagcttatgcaacatggcaagaccccatctctacaaaagattwaaaaaaattagctgggcatggtggcacacacctgtagtccctgctgcttgggaggatggcttgarcctgggagtgcagtgagccaagattgcaccactgcactccagcctgggtgacagagtaagaccctatctcaaaaaaaaraaaaaaaaaaaaaagtttttcctgacacaaatcatttgaacaaacaatgtagtgaatccagtatcgaatccagtatctaatttcctcacaaacaaatacatgcttttccagtagactttctgtctctagtccttgaagccaagtcaaggggacaggaacacacctacctcctctaaacagaagttttaagagaaaacccacaagcaaagaaggactggaattccttcccttcctcctttcttgagygtggcactttctcaggcagggggaagcacatcattcttaggatttcgaattgaacatcctggtctcaaaaacggattttagtgatatagcattctaattatattttcctagttgttttcttttatgatacttagaaatcattgctaccgggacattttttgcctttttaatgattttcatttttgccctgtattcactgtttttctctctcttttttagtatgtttyctgttaccaatttgtttataggattccaagaaaataccatttgctgagtaccatgttccaggcactttctgtagtcagagctcgtttacttttcagagcagctgtacattgtgtgcgttcccattgtacaagcagtgaatcttcggctcagagaagtgaaaactgccccaagatcagtagttaataggaggttagccaatatttggactctagcttctcggactccaaactctatgtacttaagagttctaccatattttactattgatactttttattttcccaaatatgatttcaatattctttaagttatatacttgtaacttacattttccaaccaaggcccaattatttttgctcagatttggaaattatttcttaaattacaaaagactattgcagaggctccctgaacttgtacattcttctacttaagtgtwcatacagtatgggtagatagtcaagaaatatccatttccaaaggtcagaaatagtgttgaacagtaaagtataaagagttttttaaaaatgaatgatggaaaatgatagaaattgatagaaaaattagaaaaatataccatgtaagtaaagatatataatgtttttgcaggtctcattttacagagaaagtcatgtcttgacattttttaatggggctataaatttagtaatattttagtaggaataataggatattaaatatgagccttcattcctgaaattttagattttcttaatgatacttacccttcctgtgagcaaccaaccttgagagtgtatttaactgagattttgaagtaatgcatgatacatcttgaatttctgtgacccagaaatattgatgtgctaattttctgagttaaaaactttctttttatgtttttgtccttgttaaatgggcaagtgctggctaaatgtcttggagaatacagtattttcaggaaatgacatgaagtattgatttactttattcttattgcctcaagcagaacagccataaaatatgttcaatttctcctcatttctatctgcagatcacactgacttgtgctgcagatgacaggtgtggacatgataggagcatattgacatttactgggatttgacttcaaagctttagagatgaaaagcatactgacaaagtcgactagaacttgattcacataattattgtggtgctaagttttgttcagcagcacagtataaacacgaatgtagatccgacacagaacatccaggcaaggacaatgcctactgtgctaaagcttttacgatttaaaaatgtcagcatgaaacctgctttggaattattttggaaaactctaactgttgaatatgtgatccagatgaataactttaaaaaatgtatcctttcatgaaatcacattcaaattgagttaaacagttctttatcagttactgattctttcttaagtatgaaagattaaaatttaatttgagttttatacaattttcaagtatgttaattgttgtcaggttagtcacaggtgactgaattcttccaggattgtgatgtctctttgggagtgacacagtttaattttgaataaccttaagagagtcactatggttcaaggtatgtctgctcatttgcctctaggagcacctgtgcaaatggacagatttcctaagagctgccataaagacacatactgtgtgtgctactcctcatatttagctctgcttctgaaggcctcgcattctgctggattgccacagttatcactgctatctctgccatgtagaatgagagaagcaatagaggttaagctactgattgctgctattgacagaaatgtctaccagcactccatatttcttctttttttttttttttttttttgtctcactgttgcccaggctggagtgcagtggcacgatctcggctcactgcaagctccgcctcccagattcacaccattctcctgcctcagcctcccgaatagctgggactacaggtgcccgccaccatgcctggctaattttttgtatttttagtagatacggggtttcaccgtgttagccaggatgatctcgatctcctgacctcatgatctgcccgcctcggcctcccaaagtgttgggattacaggcatgagccaccgtgcctgacctcttcaacattttaagtaccaaattcctccagcatttattcctagagctgcacaaggtcaataggcacagagatatttatagtatgctttgtaacatatgtgtatcatgttaaatatgcatgtgcaggttgaattagcttcacttattcctgtttatctcctgtttgaatgattattttagtcactatgtacctcttcaagtgactctttaaaagaggcttcaattgaacttttattatgcacaaaaattgtctgagattcaagatggataatttgaatattttgaaggatctttgtgcccataacccaagtttcttgaaagcaaaaaaaggtagctattggtgtctcataaagaatgaaatttaatggctggataattctccttttccagtttgagttcctttaatgcatttagagagggggccatcagagatggtgattgtattcaatgctgtccccgccctcacatctgttagggacaactcttaagtacagcttgctcactgctcactgtcagcccaaaaccatgtgaagaggaaaacctgagaaaaacctttcctttattgccaaaagcagagctgacaacatgcttctttgattcttacacctttataatgaatgtttgggtaggtcacratcccatctctactgaggatgcagcattagtggccaatgttgtgaggtgatagatgggacaagataggttagaaaggcaggatggctacttcaggcacgaccctgctgggcacatacatcttatacagttgaatttgtgaggcaccttcatctcttacctagaggatagtcattggcaacaagtttgaaaatagtccagtttgcagttggtcagtctcttttatttaatgtttattactgtaattggcctaaatatcaaaagttgctttttacattctacagcaaattatatgggcttattttttctgtgcatttatttctgctgaaatctggaggctgatttaacttaaggggttcgatagatattaggtgtctgaacagagactggtcatgaccaaggagtcagataataaggctggttgaatcctagataccaatgggaagaatctagtttgtctctcgggttcagtgatttgctgaaaggactcatagaaatcataaaatctattataaaaagctattatacacacagttatggcttaatatagcaaaatgatacagattcaaatcaacaaaggtaaaagggacatagaacagagtcagggagagaccaggaatgagtttctggttgtcctgtcctggtggatttgtgtggacagttcctaattctcccagcaatgatgtgtgatagcacacatggagtattgtcaacccggagggtcactgagccttggtggtcaaggattttgttgggggggggtctgtcttgtaggtgtggaacacctacgtgggtaactttagttactcagtctgcagcccctcctgtagtcaaacttctgatacagtgtgacctagggcccygggtgaactagaacgggtgtttgccataaatcacattgttagcataaaactgtctagtgtggcccaaggccccaggtagaaaagcaaactcttactaggcaggatactccaagcacttagaggttatatcccaggagcttgtcaagagccaatcttttcttttctttagaatgtgtgtggtttgaaaacctcaagactgctaagttaaccctttactgcacaagtctcttgatacacagggaaatgaaatcccagttcaactgtctggacaaccatgattttttttttttttaattttctaatcttttttttttattatactttaagttttagggtacatgtgcacattgtgcaggcataggcatgggcaaggacttcatgtccaaaacaccaaaagcaatggcaacaaaagacaaaattgacaaatgggatctaattaaactaaagagcttctgcacaacaaaagatttttttttttaatctgtgcatatggacacatggcctttttgaaaattttactacctatttacatgaaagcctgataaaagcaagatctaacaagagtaacattgaaatagcccaacgtatttgcgtgacagatttaccccaggctgctactgctgcttcagtaagagagagatgtcttcctttccctttctaaccaatgaatcatgttgactctagtgatgtaggttgaatttatttctcactggttatttgatggaacttttttctaagtatttgtttatgaaagtattagaatcgtgcatgagtatgagaagtatgtcattaactggaaaacaatatatttcaccgaaagttaattttttcaaagcaagaattctcagagcctttcataaaataaactacattttgatcctttaagggttattcaaacttcttgagatgtagaaccttttttttctttggatatccaatgagataattggtgggacacagaatgggaggtacatataaatattgactattattattttgaaatcttgatggtaagtgggggtgtttttggaatatattcttgaaattatgcaaaaagttggcattttctgacactaatccattatgtagcatgttatgtagctgtctctactatgagatggtgtaatgtatttttaactaattaaaacaaattagttgaaatattttgttctaaaacattttatgttttaagtgtgcataaattgaaaaaatgtgtttacttttataattatctaattgaaatgcttttgctttacatttccaactatatatttagatatagtaggggcatttgttgaaagaaatttttatgtatttatgaaaaaaattccttatcatcatcggatgcttatcagatatgatgaataaataatatgttaactttaattctggtgaaattctattttgaaaaagatgaatgggaaacacctcagataaaaaattgcaacattactagtaaagattccattttttaggacagcatatccttcataaccaaaggtatttactgtagcatgaaggcataacattcagtgccaagagtgaggtcactgtaattatagaatctgtagcatttaaaatttgaaattatcagtaaagaaaaacccaagggtttttcaaagatcctttaatttctatatttattctgtcttagggcattccattagtaaaagaaaaaaagaggaacatctgatctgacctagttagtatcttaaaggaagcaaagactctgaagatgtccatttctagtacgagaggaaaatggcatgttgttatagaatcatcttttcctctttttgacctcttaactctttctcagcctagtgatatttattatctactgttatcaggaactgtactcattgtctccaagccttttgtttcttggtccctgaaactcctctgctttgtagctaaggtaggaggtatagtatatgtagtgattttggtggtgagtttctatttattttatatcagtcttgctaatgagtgaaagctaccgctttcccttgatgcattcatgtggagtaaatgagctgtgctcttaactaagaggaagcgagcagtaaacaaggaaacagagactctgaaagcaggttgcttgagtttgaacagcagcctcattagctgtgtttttgtgggcagattgctttctcattctgtgcctgcttggtttctccatagaatcggtgtgagaatttcaagtctgtttatgcatgcagagtgcttagaatagtacttggcacctagtaagtgctcagtaaattttatgttactgtttttagctaaagcgaggttactckttactgatattcagaaatcagaggcttaatttgtattcgagtacattctaaataatggagtacattctaaataatggagtacattctaataacaatatatcttcaagaaaataaatcaatgctcttatttaacccacatgaatatcttttatttagaggacataatacatcctattctgagtcctcatatattcagaataaagacttctgatttatgctatgggtctgaaattggtcaccccacataggcatgtttggcctagcagtatttggttttggtttttggtttgtttttgaagtttctttaagcagggcatgcagtcacaggctgcagactctgcctcgctctactgttttacactcttgcgtgattcatgcctttaggcttctgagcctgttgcccctgttatttaaattttttggaatacctgtgttaaatttcacccagagggtctacgtgtattgaggaggaccataaaggatggtgttccttttcctggagacttgttttcaatcattaagacattaggatgcttcatgtatttccttgataaataaatactgttggaacccaaaagtagacatcattttcctgccaaaaagattagtttggagaaactaattcaataaagacaacataatcgtacccagtagtataacctgtgttaacacacaaaagagttaaatgattttcaaggaatttctgtgttaatacaactgatataattctaaagatggctgaatttagcctaacaggcaatagaagcctaggtaaagaatacctagcagttttttttttcctatagtagttggagctctttaacagatcttcagtgttcacaaattcataagaggcttcttcttctttgacttgtgcattgtttatctgcccatcgctgttaacttctttcagtaagaatgatgccctctgagtaatgcccctgttgtgaactaagaaagaccgatgaattattaataacccacagggttgcagagcccttgtaggaatgagagcagtgtgctctgtacgacagttctgttcacctgatcttgacaaattaggagcatctaaaacatactcctgcttgttaatacaagaagtgggggaaaaggtgactttgaaatgcatcaatatttagcccttttttagaatctcagaaggataatagggaacagtgtttcttcataaataactgtctctcctatctttggtttagcatggtaggctaatgcctttctgtcaagctaagctttatggttcaatttctgctgtattccttgagaaacaactggggggaaaaaagtaaaaacacaattataaagatgcctgctccataatcatttagtcctgtttatagaacttgatccttttcaagtatattctcctatgtattaagctgataggcaatgagagagcaaataaaactctttactggagaagcaattgttttatcaatagcctggctcatgtgggattcttgacaggaggattaggagttgtagccacgttgaaatgtaaaatatgtaatgctgtgctacacaaggagatgggttccaaaaccttctgaatgtgtgcactcttggtactcactaaagtaacagttaaattttgttttaggaaagataaagactattgtatatttattatctagtactattgatctgtttttcaattttgttagttatctaatacaattgacctatttttaaatttttattgcagtatatcacacaaatattgaactgtacaaatcttacatgtagaggttaaataatattccatatgtatacacccatgttctcaccatctagatgaatatgtagaatatttctaagtcatgaagactccctcaggcaccctcccatcaatatcctcactgaaagtcaccaccatctgacatctatcactgtagattatttttgtctgttcttgaacgttatatagatggaatcatgcattatgttttatgtctgtttttttcagtcagtgttatgtctatgagatttatccatatataaagcagtaccatttgtaattgagacatttaccttatgacttgatttcaaattcaggctgcttatttaagtaaaatatttccccattgtgagcagaataattctaaaaagtaccctgatattcaggtatgtatgtgcttcaacaattgtcagaatcattaccataattttttttactccacatccagcaacaggatcctcaaaatgttcctttttttattctaagagcaatgagttctccattgtgtaaattaagatcttaatattcatagttacttgttgctggagtttgtaaattgccagtcttgccttcatgctgagaatcaaattgcatttgtgggctggcaacacccttgttaagccatcctcatggtatgataattagagattcctgctaggtttggcttgtataaaaaagtaacacaggtgggaaaatttacatacacatcttcaataacaaattgttataatttttcagaaggggaatttttgtatttcatgtagattgctcataagcaacagtgtgattgcttttctctcatttttagatatatagcctctgcagtaaggggaccatgttaagaagaagcatggccatttatgagcagtaaattgaatttatctggctttattccattctctatttctccataaaagactcttttgtggccagtcacggtggcttacgacggtaatcccagcactttgggaggccaaggcgggtggatcacgaggtcaggagatcgagaccatcctggctaacatggtgaaaccccgtctccactaaaaatacaaaaattagccgggygtggtggtgagcacctgtagtcccagctactcgggaggctgaggcaggagaatggcgtgaacccaggaggcagagcttgcagtgagctgagatcgtgcctctgcactctagcctggacgacagagtgaaactctgtctcaaaaaaaaaaaaaaagaaaaagaggctcttttaactctaatcatagatcagaagaattaatattgttaaaacgaccatcctgccraaagcagtgtacagattcaatgcaattcctatcaaaataccaacatcatttttcacagaattagaaaaaacagtcctaaaattcatatggaaccaaaaaaataaaaaataaaaaagcaaagcctaagcaaaacaaaacaacaacaaccaaaaacaaagctgcaggcatcacatttcctgacttcgaactatactgtaagactacagtaactaaaacaacagggtacttgtataaaaatagatacatagatcaatgaaacagaatagagaacccagaaataaagccatatatctacggagtgccagctgatctttgaaaaagttaacaaaaacatgctctgcgtattctgagatgttctcaggagtatatgttagtccttctccacatacctgttttccaggttggtcttgaactcctgggtgcaagcgatttacccagcttgacttcccaaagtggtaggattacaggcacgagccatcatgcctagctaggctaccttttaaatatatatcatggccaatwtttgtttattctgattatttattagttcctttttgatgtctggaagaacttattttctagccagacagactcttatatcaaatatcaaatttccagccttccaaatgggttttcctaccttgtctcaagccaaagcaaaacaaacccccaccccacaaaagaaaaacaaaacaaaacaaaaacttctcctccaaaatcagccgttacaccacccacctctggtgtggacatgacttccttgttcttcctcaggagttatcatttattaaatgtccagtgtttccactgcactggattattctcagaatgttcagccagctgggcaccatagggtcagctggaagaatctgaccctttaagttttcagctgtggytaaatcatgacatttatggtgaagttttacttaaaatatagtttttcatttgattgatcacttcctatattttagagaaaaatcatgtcaccattttgtattatgtttaatattttaaaattaacttttttttatgttgctgtagccaccacatccctaacccagacagtgcttaaaaggcttgaaaggagtcctatctgtttaataatttgtgcgctctcccttcagaatggacrttcgctataaacaggcttgcttaccctctattgcatgcaaagcagaggttcctgtgtttataatattgaatgcacacgttaatgatgggcgaagagagacacacgcagactgaccttcacacttgacatccactgagagggaaaaacagggaaggcaaattatggcaggggagggtctgctggccaaaaatactcagctctgtttsagaaatgttgagtttgattcttggaagttgtccatatatctggatctcaggaaagaacatagctagaaatatagattttggtagtggtgagcatacgaaagataattttagtcactgaatttaacttttagtaagtggatttccttggcttttcttctttctggctaaactgtttaccatttgttacctgcttataccagaggaaaagggaattgatttttcactttttaatgtcggtggtaaaggtgtagaggaatacttctggttttcatctatcttaatttttcccctttgtactacgacattttccaggaattggagtgcttttcatatttctaatgtgaaattaatagttatatatatatatttacttttgtatgaaaaatatatacttttctgaatattgaagaagtagcacagttctactcaatggttaaatttattaaaactagaagttttaaaacacagtatatctctagtcaaaaatgtactcaggagagtcttcatgaccagctgtgctgtaaagatgactgcaaacgtacattgatttattgcagtacacatctgtgcaacatgcttcgtggcataatttagtcatcacagcagcactatgaagtaggtttcatcatcaacatcttaaagattagagcattaatactcagaggtgtaaagtaatttgcccaaggtctatagctggtaagcagtgtgactggtttgtacatggttaggaacatgtccagtcctgctgcagacttaatacagtagatgcaatatatataaattacaaattttcttttttacaccgtaaacatgtttatgaaaaacactaggcttaaattatacttttaagttacattttaaaggtccgatgaagttctatttaacaacaccttttagttaaatgaatacttattcccttatttgtatattttacagatctgtttggtcatattattaaatatatttaaagggaggctggcctgctgggatttgttttttaatcataatcattttttctggttttgttttgaataatttacctcactaacagtgaacagatttaaaataagtaacctgctccttgtgtcctaacttgtaccatgaagacaacagtaaccccatgtattatgcattctcagtgtctctattttgtagataaggaaacagaagtttcgagaatcagcaacattgacaatcagcctaaaacttctgactccaaatactcagcttgttttcctgagtttcccaccctctctaaatggatacattgtaaaggttgtcattcaacttatgctgtattagggttttccactgatattaattgctgtggtgataaaattcccacctctaagtaacatttaataatcttaaaaactagacataatttttgaactgtatggaaagctatggggcattgaaacacttttaagtgcaacttacatcttaatagttacactttctgctgccttgattttcctggctgaagagttcagttttaaatctcaagggtagaaaacactggaaaaaaaaaatcagaggatcttggcatacttcaacaaagataaacagctttttgtagtgttcacattatgtcagtaaaatccagcctgcatgtttgaaatgaagacagcctattaatttaaaatggattggaacatcttcgtacaatgatgagggtaaatcaagaaaattaaataaacattctaatgggaaatgtattatatgtaatggaataccaactgcacaaaatactctagtagataagcccttcattaataatggcttggtgaattgcattcttatttcttcatactattctactttctcaaataaagaaaggtgtacgttttttcactcttaaacatttatccacctaagtgattttggtactgcttttgaagagctagtttttcaaatgaatttctttcttctttcttgcctttttttcccagaaatttttaaaagaaaaaagttttaaaaagtattatttccaaagttgtctttttgtttcctgtttctgcctcctcaagacaaccgattattataagacaaagacaaatttgtttactctgtaggaaggctgcatgttggaggaattgttccatcttagagtaattatagtttttttacattcataaacttccaacagacgtgatttttgtatgaatttatcagataccaaaataacatccccaggaaactaaccaaaaacctaatgacttatagttactttgctaatgatctgtgagtcacttatttatatagcatagtccatcttgtagaacaggctttcttaatagactaaggttgctggtttagtgtagactaactacagagtcttgcatcttatgaattatcctttccttgtaggttatcttctatgatcccatgccaattatctagaacagctcgttcacagtagaattttctgacgatgaaaatgttctctctgctgtctgatactagtagactatggcaattgacctcttaaaatgtagttagtatgactgaggaactaaagtttgaattttaattactttaaatagccgtctgtggttagtgattactcttttggacagcataggcctagaataagataaagtcctccccgcttcactgttgaagaagcatgaacatatttgtatttcttggctctcttattaaaaatagcagctgttttgcattcataataatgcgtgttcattaaataacatttgcaaaatacaagaaagtaaaaataacaattattgtaatgtcgttgctccaataaaactactgtttgaatttttagtgatactgaatattctcacagtcattttaattctatgaatcatttttaatataagctgtataccttatttgtatagttctgtatctgaaaatttcattttgggattcttctgtttgcaaatgtacccttattacctacataatggtctaccaaattaatagaatctaccatatgttcttttttttcttcttttttaatttttaaaacttttattttaggttcaaggtgtacatgtgccagtttgttacatgggtaaattgcatgttggtttggtgcactcatgattgcctgttgatctgatatacaaataatttcatgacccaggtagtggacatagtacctgataagtagtttttcagtcctgacagtcctcccactctccaccctcaagtaggccccagtacctgttgttcccctctttgtgtctatgtgtattcaatgtttagcttcctcttataagtgaaaacatgtggtatttggttttctgtttttgcactaatttgcttaacataatggcctccagctgcatgcatgttgcttcaaaggacatgatttcattcttttttatggctgcataatattccatagtatgtgccacattttctttatccaggctaccattgatggrcatctaggttgattccatgtctttgctattgtgaagggtgctacgatgaacctatgagtgcctgtgtctttatggtaggacaatttatattcctttgggatatataataataccatatcttcttaaccagttctctgtggttgcatagctgggatgttttcactgctgcartccaacacagcactactatatgcacttgtatggctgaaattcttccaaatttaggattgtttttgaaaatctctggtagattcagataaataaaatttactgagtcaaagggtatgaacattttaaggctatgtatatgtatatgaatatgtatagtcacattattttctaaaatactgtcacatataaaaatattcattttgttaccagtggcgagtgtccaggttcttggcattttgagcaaagaattggacaaaatgcacaaacaaagaaaggaaagaatgaagcaacaaaagcagagatttattgaaaacaaaattacactccacagggtgggagcgggtgggagttgggtctatttggacccaaatagagaatattcttgggtccaaataccccctagaggtttcccattggccacttggtgttcaccttggaaaacgaccattcagaggctgaaatgaagttacaaaggtcacacacctgtgcaaacatctgattgattgctttatgctttatgcaatcaatcagaggctaaagtttcaaagttgcacttctatgcaaatgaaggcttggcccacaatcattttgattggctgtagacagtaatcaggggctgaagggaaaagttacaaaggtcacactcctatgtaactttaaatttcccatctaccatgcagacaaggtgggggtttgcaaagggagtagtctctggtccttttgttacttaggtgtggaaagttagggttttcctttcaatttagttttaggaagtcagtgtgaaacagctttaggttccctgcctccagactctattctcctgcctcaatttcatcacccaacaccaacttcaggcatccaacacacctttaagttttctttaatttctgtcatatttgatttcatgataaatttttcctgagttgtatctattttaataacttatagagttagaagtcctacaaaagaatttttctttggtacatttctgcattttttgctaataaactatttttcttccacattcttacgatttttcatgaagaaaaggaaacagagtgcatgtgctgttctgtgctgttgagcacagaggagtcttcctggaatctttttcaaaaacacgtgtgaaagtgagaggccaaacgagagattttctatattttgccaactttttgcaataactttgttttatttgtgtcttatgttttaaaatattatctacttgaaagtgaggcttgaatataatggtgccttttccaatattaatcacattgtggctgctstgaaaacaataataaggacaattcggaaaacagtttatattaaatatctccttttgtgcagtgttaaaaaattattttggacacagtggtcagaaaatgattcactgaagattgctttaaagaaagcctacagatgtaaacctgaatttatgagaaggagtgattatttactctataaaagtgttttcaatagagttattacctaaatagtgagctccactagtgaatttatgttttagtttttaaaaaaaattgatttacaagcctttatgatcttatcttttgcattaagtgagtttattgaaataagcattctactgaaatgccttaggactagaaacagatctggtacctctaaaagataagctacttattgctctctcattactttatcaaggctcatctgtggggttaaaattgcagtgggaattaaattttgtgttttctagctagatttggattctatgacaataatcttgatctcatgacctgtatgtgtgtayatrtatatagtatatatgttttttaatttgtttctcaaatattaaatatatatatacacacacatacagtacatataaatatatctgtattttcttcctcaaatattaagtatatatgcttaattaagtatatattaagtatatatgtatctgtatatacacacatacatgtacatagtacatataaacatatatttcttttcttcctcaaatattatttagtatatatatgcttaattaagtatataytaagtgtatatgtatctatacttaataatatttgaggaagaaaagaaaatgtgttatatgtatttaataattttgggaaaacagaaaataacattttaatgaaaggaaataggatcagaaacaaaaagagaaaaaacaagatggcagtgatattttaacattaacattgaataggaaatatacccaaacaatgagcaagggagttacagtaggggaaaatttaaaatgaagatcctcagactgctgaccctaaggctttaacccatgactctgacctcactggcctgttcttcctcataatcttcatttttaaagtttcatgggtcagaggcaaaatagagasggcacccagggagcagaactctcacaccacagtttttccttccttggtattgatactgaagtaaagtattcgcccttttgagaaggggttattatcaacataatatcagggaacatttggcctacattgtctccmagaatagttgagatgctgatgctgcaacttcattaataggtgtggttacttacttctgtcagtaatatgtcagttaagacatatttagaaaaaatgtcctttttcaaacaatagrcttaaatgttaaaactataagacttccaaatgacaatcttcatgaccttgaaatagtcaaagatttcttagatataataccaagagcaggattcataaataaaacaatttataaactggatttcatcaacactaagaaattcggctcttcaaaacaccttgctgtgtgcattggctcacacctgtaattctagcattttgggaggccgaggtgggcggatcacttgaggtcaggagtccaagaccagcctggccaatatggtgaaatcccatctctactaaaagtacagaaaaaaattatccaggcacattggagggtgcctgtaatcccagctgctcgggaggctgaggcaggagaatcacttgaacccgggaggtggaggttgcagtgaggcgagattgcaccattgcactccagcctgggcaacagggcgaaactgtctcattcattcataaataaataaataaataaataaataaataaataaataaataaaggccaggcacagtggctcacgtctgtaatcccgcactttgggaggccaaggcaggcaggtcacctgaggtcaggagttcaagaccagcctggccaacgtggtgaaaccctgtctctactaaaaatacaaaaatttaactgagcatggtgctgggcacctctaatcccagctactcaggaggctgaggcaggagaattgcttgaatttaggaggcagaggttgcagtgagccaagatcgcaccactgcattctagcctgggtgacggagagagactccatctcaaaaaacaaacgagtaaaaaaccacattgwtaaaagaatgaaaagacaagtcaggacttggagaaacatatttgcaaattacatatctgataaaaggagttatatttagactatttaaagaactctcaaaactcartaaatactaaaacaacccaataaaacatagacaatagatctgaacagttacttccccaaagatagtatacagatgacaagtaaacacatgcaaagatacccccaacattattagtcattggggaaatgtaagttgaagccacaatgaaatgctattatacacctattagaattctgaaatttgaaagatgccaagtacgggtgaggatacagagtaactggaaatctcatacatgacagatgggaatggaaaatggagaaaccactttgggaaaaagtatggcagtgtcttatatagtgaaatatacagctgccttatgacatagccattctacttttagacatttaccccaaagaaatgaaaacatatgttcatgcaaagactcacatacaagtatccatagcagctttatttgtaatagacaaagactgaaaataactccaataaccatcaacaggtgaatggttatacaaattggtgtatactatacaatggaatactatttaacaataaaagggaattattgatacatgcaacagcatgaaatgattttcaaaatcattgtgtggaaggaaagaaaccagacaaaagaatataaactgtgtgatttgacttgtataaattccagaaaatgcaaactaatctgtaattcaaatgggtgagtggagggtgggaggatgtcagggagaggcagaaggaagagattacaaagtgggaggaagaatctactgggggtgatgtactcattatctcgattgttgtaatggttttatgggtatatgtatatgtccaaatatgtcaaattgtacacattaaatatatgtgatttattgtgtgtcagacctcaatagagctttcaaaaaatacgttgtcctttgcctaggtaagcgctttttcaaagaaaatttgcaagctagccaacacctcctgagttgatgcaggtattatacaaacgtgggtcagcttgacaattgcattacatactagcaatcgacagactagctttctagtgtaaatcagtcatatgggtctgagtatattcacctctgacagagttccaggccagtataattgagaacaaaatctgaaattcagaaataaacaacagttggaaaatattttccatttttttccctattaaatatgataatttcaggtgcaaagagtgttttttttttttttttttttttctccacagtgcttttcacggtggggactaatggatatagagggtgggaggccagaataaccaagtacctggaagtgaatctttgtggagataatgaaataattttattcgaaaggtgcaaaaggaagtcttccatcactagctcagctgttatggtccttgaactgcccttgcccgtctgtctttttattaatcctttttacctgtcgtcattggctgagccaggctttcttttggtgatgctgcttaccttgatgccttcatgtggctgctactcattctgctttatctcctatgccctgtgatcagaatttggggttgtctttaagttctccagtgttttttttccagcatttcctaccacatgcattgattcttaggtcattttttttttttttttttttgattgagatgttgtctcctctcttggccaggctggagtgcagttgcaccgtctctgcccactgctacctctgcctcccgggttcaagcgattcttctgcctcagcctcccaagtagctgggattacaggcacccaccaccatgcccagctaacttttgtatttttagtagagatggggtttcaccatgttggccaggctgctcacaaactcctggcctcaatgatctacctgccttgcctcccaaagtgctgggatgacaggcgtgagccaccgcgtccagccattcttagataatcttttacaatatgtgtactgtgtgttaggcactgtggagagaaaaataaaaacatatctcagcctcacattctgtygtcagtaactttttaccttagttgaagctcaaaatatttagctaaatctctttctttcttttctctccctctgtttaccacaggtcatgcctccacagtaatggaggaagctatcattcaataccctgtccccatctgccttaattcttgggcacttcttttggcaacttcagaaatctatgttattgacctgcccaaatcctggccagacatttctgctgctgcagtctgatttattatgccatttctctgaactgacaactcagaaatcttaaatttggcaagcccaatctctgacaataaagttttatttttttcacctctgctattttttttttgatatttccaataaattgggtatggaaactcatcaaaacatctgttcttaagagctgtctctagcattgttgtcaagtcatccttcttggcgctttcctttctgaaggcatcatttcattatggttggtggtttcttccatgattccctccagtagtaaacattcactagaatccacaacttccttacttctgactttgtgataactgaacactttcttttgtatttctgttactartgtcttcctctctaagtatgaaaagcttagacgacctccatcatccttaacacaactcagaagaaaaagctttctcatcatgttgcttctctaaaagattaaagttatcttttttcttgctgatttgaaattgcaggtttttatgctttgaataattacacatacttttgtctatttctggactttctaacctagtaatctttttgtgtataagtcagtattccattattgaatttttacaatatgttttaatatctgctaggtcagttttgcctttcatattactcttttaaaaatagttattctcagatgctctttccagatgactttagaataatttcattaagcttcccaaaagtatattacagttttttattagaattttattaaatctacagattaattagagaattgatgactacacaaattattcttcccatccagacacatartatctctctacatttattaaagtgtttctctctatcttttagtgtaggttgtagttgttttaagtcctgcatactggttattttagatatcatactttttagtgatagagtaagtgtcattacwttggtttccttctgacttcaaatgctgtccccttgaaattttccctggtgttgtaaatttgcctgtcatctattacacagatgacctctcaatccacgttctgagcttctgtgtcttagttccatctttctgttgaatatcatcacctccttgttttccagagctacctcaaattcaatctatttaaaaatgggctgggtgyggtggtttatgcctgtaatcccggcactttgggaggccgaggcgggggggatcatgaggtcaagagatcgagaccattctggccaaygttgtgaaaccctatctctactaaaaatacaaaaattagccaggcgtgtggtggtgcgtgcctgtaatcccagctactctggaggctgaggcaggagaattcgcttgaacctgggaggcagaggttgcagtgagccaagatcgcgccactgcactccagccgggcaacagagccagactccgtttcataaataaataaataaataaataaataaataaataaaataaagtcttctttctctgccgccccaaaatgtgcttcctctatgttaccatccttaattaattttgtcactgccctagccatataaggtcaaaaccatgaaatcgtttttgactttcctgtgtgctaattcttctgactgtccctcagcaatattgctggcatctgtttccttctttccaactcgactgtcttgtcttgtttccagtctgtattatttattacctagcattagttgttgcctggagtattgatgttttagcctctattctttcttcccactctctaaatccaatctgtcttccatgataatcctagtatctaaaacactgatgtcattatcagcccaaactggctctcctttgcttacttgttaaagtccaaattgcacaacagggccttcaaaaattgaccccaacagaatgttgccattttgttttctgtcacagttccacgagcatcctatcacacagtgttcaaccaccatcagcttctcgtgtcctcccatgcctcagtttccttagttatgttgtccaatctgcctggaatgactttccaataccattattccctacttggttgtactctgactcctctttcatgtcctagttcctacatcacttttaatgtgatattgccccacagccgtacccctcagtaatccatcatttcctcctcttacttcagggaacattgagtacatctctattctatgcatgtcacctgagtcactgttatatgttggtatttctgttcttccatttccatgttaggcttttgaagacawtggtggggcttcatccaaccaagttttaaaataaatatttagtctcaataaatattgaatctatgaaataaatgcagcttggaagaactgaatggtatcttttgcatacagtcaaagctgtaatgatgaatataacagatttggcatacattgagctcttaatgtgttctgacaccatgcaactagcactgtgcacggattggctggtgtcaatctcagaaccctatggtgatgctctcataagagctccattctgtatgggaggaaaaggaggcccagaaaaagtcattratttctccagagtcstacagtgctaacaactggtgaaatcaggctttgactcctgctggcktgatctgaagttttacattttaaacactgccgccttccgccacacttgcagtcctgctgtagcctttcttgacagaaagtttgaacgtatgattgagtgttggcatgagctcaggttcctgattctgttattttccatcttmctctgtatggtttggatgttttggttttttctcttactttgatttacatttaaaaaaaatctaggctgggcgtgttggctcacgcctrtaatcccagcactttaggaggccgaggtgggtggatcgcttgaactcaggagttggagatcagcctgggcaacatggtgaaactctgtctctacaaaaaatacaaaaattagctaggcatgatggtgtgcgcctgtagttccaactacttgggaggctgaagtgggagcayggtgtgagcccaggaagtggaggttgcagtgagccaagatcctgccattgcaagccagaccctgttttaaaaaagaaaactacattttatcatactttgttgtaaactgcttctgttttttttcaaagtgagtgagtgtaagttacaaatccttagttaactttttattttcactccgttaagtacttgttgaccgtgtcctctgtggcaggtgctgttctgggcattgttctgggcaccagctacacaccgtttctgcctcgaagcacctcatgtgggcttcagggcaggcactatcattcagtgtttacagattaatttgcaaatattctgggaactctttttcaaaattaggaaaataggagaaataaatggatgggcagtgactatatttaatatgtataaaaatgaaaaagtatgaatatgtttataacttacatattgaatgctttgctcttggctattaaacttgtttcccattttcatctttccagcaatatttcattgaacattcctgttgctagaccactgtccacatccacaatcttttctgtaagatatattcttataagtgtagttactgtgttaccttgacatagtcatttcaagacatttgatatgtattgacagtgataagtaaaatatttatatctctgctgtagattgttttaaaatcagaaagaggcctgtaacaaatattagagtagacctctggcagataagttttcacatgattattcatgtgtgtctgtatatctatacacatgcatacacacacacacacacacacacacacacacacacttttcccccaaaactttctataatgaatgcataaaataaagagaaaagaattttggtttactacagaatttacaaactttctaaaatttgaaaaaacataaatgagtatttgtttttaaatataatatttaatcagttttaatgattaaccttagatgcctcatagttttatagaagatagagtatatcaacttcattgtatcttctttaaagtacaaaagttaaacatgatttttcaaaattcccaatcctagtgttcatttattttttttgccaaagtggttaatgttaccgaataaaaatgagggattcagagatttgttttctcccttagcttaatgatattaattttatcagaaaactgtaagttttgagtgaagttttttcacaatggtatgttttttgttatttaaatgaaatttccaggaagcacctttttggttcaaaaaattgttatatttttaagtcatatttttctgaccaataagacaacatctttagtgtattttttgtttttttgagctaggagtgagccaaaaaacaataggagtgatgttgccaagttaaaatggttaattctatattatctggagtctctaccacattaagttcaagtccttctgcctgatttctggagcttccagtgtctggccccactctctgtcttcactttacttcatgggcaccactgctctgccaggcccatcctccccgcagcacctcccagcactcacagtctgcagccctggygtctgcctccgtcacctgtcttcctccctgtccctcatscaacctacctcccctctctcctcctctcagcacctgcctgatttccatttattctttgactrtacaatttgacatctgattatttttaatattttaatatttttgtttttatatttaatattttattttatttaatagttttatattcaatattttaatatttcctaaacatgtatgtatatttttcgtatttcctactagtgagaagtacacagcagatattcagtaaatacttctggtatgattgactggtaaattcttctatgatttcggaatttttgattactgcacaaatgtttcaaagtacttgctttttctcttaaggagtaatttgtagccctgagggatgatggcttattgtcatcaaaatgactttgactctttttttttttttttttgagacagagtctcgctctattgccagcctggagtgcagtggcgcaatctcggctcactgcatcctccgccttccgggttcaagccattcttctgcctcagcctcgtgagtagctgggactacaggcgcgcgccaccacacccagctaatttttgtattttcagtagagacgaggtttcaccatgttggccaggatggtctcgatctcctgaccttgtgatccacccgcctcrgcctcccaaagtgctgggattacaggcatgagccaccacgcctggcctgactcttctttagtatgcctataagtaatttttcatcaataagcagtatagtgaaaagaatgttagacgggattgtagtcctgcttcttccattaactggttttctggtgttacatatagagcttgatttccttttttctstaaatagataagattatacttggttattcctagtattccttctgttgcttcaaaatgccattttatatattccagagtgtatataatgtcttcaacaatcgaatggtattgatatcacctacttggttaaacattatcaaagtagaactttaattcttaagtcgtagtttgcttatggattaatacttttatcagacagtataaaaattgcctacctatagattttagctgcaaaatattatggttcaaccaattgcttcagtgatctgatgattttcttaaattctataggaaaaaattgtaaatatggtatatttaatcttacatttttccccttagttttaataatcttggaaaataaatattcttgtttttcttccataaaacccacattgttgaagcaggaagcttaggtggtggcaagtcttctttttaattcaggtcccagcattctttctggctgaggtacaagagcttgacctctttgtgtggctttgctgaagtatttgtcccctacgaaagccaatacaatcagtagcgccagcatagataaagagctgcgtaaggttgtattttagtggcaaggctgttttgtgaccatgttctgcaggcagactggaggtgacagtattatttacttttgttgcttggggtccaaagagagaataaattgctattgatttttgagacattccagtgaagggtctgaatgccttcagaggagctgggtggcaggacagccagtgatggcacagggactgccttttaaaatgaaaattcattttcttgttattgtcataaagatttttttcgttcttagagctagttacaaaaagatgtgactgcagggctgttgctgttataaatgttttctatctccctgaaagaatggaattcagcacttttcacagcagtttgaaattgatagagttctgagtgtgtacttgcatacatgtaatcagttgtactcaaaagggatatttaattctgttagtttattagccactttaccaaggatacttttaggtttgtcaaatgtttagcagcacaaaggaaggaaatttggtttctgttagtttaacttaaaaattgcaaatgtgcttctaaagtgatatatttgctttccttggtgatttattaatttcttgtccaggtgtagtatttaagtggacactttttcaatttggaaaatatttgagacgtttgaattctattgatgccaaatatgccatccctcaatcctataatctcttacaagattggaaatttgtaagagattatggaattccagtccttggaatatttaggattctaactttgtagtgccaacygagggccaaataccagaggaatagctgcaaattagctcatgtcagttattcttaaatcgatagtgcactcctaatttaatagtctaggatgattcatgttctcaagtatctgttttggggaagtatgaattattggcatccagaaagtcactggtatacataaaagtggaaactgtgtatgaggcttgtcatggcatagactggcaaagagattgcaaatggggtaacgttcttgaattaggaagggcttttaaaaatatatatgtaaacgtattcaagtaacaaagggttaaatctgaattccttaattctaaagtttagcttaccatccagatctctaaataaacagtcctctttaaaacatagtggtttttaatgggggcaatcgtgactcaagaagatacaacacttaatgtcttcaactatgttgtgtctgtataatcattttacttctaatttgttgctattaatctattcagatgtgaagagcataagaacatgtttcctttaaaaaaaaaagatgtcctcatgctttttaagtttcacaagtagaagtttcaggcttttaggtcaatgatatggtggcttttctgtggtgaggtatactgggaaatagtagatggtataataaaaaaaactgtggattttagaggtttagagactgatttcaaaactcaatctttcctgttacttattgtgccatttaggcaaattgtttaacctctctaggtcttggtacttcagattctcaaacgggaatcattgtgtctatctcaaaatgggaaggaaaccatgattgtaagtcaagatacatcgttaccaccaccaccagggccaccaccatcatcattatcatccactstcagaatgaagtaaatgcctagaaagcaggtgccattaaatataggaaagaagtacagctgaaaggtctgtccttcctgttcctactttatgtccctgggcctacctattagatacttctcatgaccaggtgccacacccactcatcgaggccacaggatgctacagtgggagcctgaatgagtgctgttcatcacatccttttgtgtcaacgcttgagttctttaggaacttcttgagtggctgtttgtcactgtgttggtctgaccgtggatggttctgctgcrcccccatacacagccacttatggtgctccctcccctctccttcaastgctggcccagcacctctgtcctcatcgtctcatctcttaccctgtcagtttttccccgtctctggcattctcttctagccatagcccaggtcctctgtccacagcctttcttgccattgctggcctttggcacttggccagcattaactcctgaggtgacatggttctgtttattccaccgggagagtaacaatgacaaggtaaagtagatgttggactattactagatgtgatactgcacttttctcatgtaaatctctctgcttatcttttaaaatctgtgccctttttataataaagtttcatattttaatcttacaattatgagcttttcattttctaaatataactgtgaaaatcttgatgaaatactctgatgagtttactgaggatatatctgcttccttactttaaccttgacaccaggggaaaattattactctaatggttcaaakaatatttttgttattgttttaatcaacataattataagctaaattgagaaatgtatatgacacttctcttaaagaaaaatagatttttttcctctcttgtctatgagttatctatttgaaaataagtaattgtgcttattaatgctatgtaaatcctaacattcattgagtatttactatgtgccaggttctgttccaactgctttgcatgtatcatttaatttagtcttcataacaaccctaagagataagtactaatattaaccccatcttatagatgaagaaactgaggctctaagaagttaaataatttgcctatttttactcagctstaagtggtgaatygagattccaatccagatattcaagctccagtatccatgttctttactatgccctgtgtatgctatatttttctgttagaaaagtgagaaagagggaactcaaaagatctatgtttgcgatagatattttaaatatatatataggacaccaatatacttaccataatggagtcactccacatgaaacttcttgaaggttctatagttttatctgtaaaatgaaataataactcacaaggtactttatatgacttaaattttgacagactttcaaagtgatagaaaaaaatttgcatcctttttatcatttttgtcataatctacataccttaacatgcatttattaaatgtggttgaaagcttaactaaaatattttaaacagcatttagattttatatactgtatatgtggattatatacttggtaattaacccgtttaaaattgtaaaaaatcttctggctggctttgcattctgatctagcaaggaagcaagacttgtttttaatattaaactaagaaaaacaaattgctaaggtaaatttgtcacgcacagaaatataatctgtgccaatagaaagaattgttaaattatccactgtttaggattagccagctttctgaattagcatggataattgaagcttgacagttcttagtagtattatcaagaatgtctttcaaatgataattttctttattgtacttgattaatttgtaagtaattagagtttagcagtaacctgatgtgttcagtcttcttattaatgtaggtttatattcataatcctaagtactttgtaaactcatttgaatacgtcatctgtattccaccttgtaaattcaatgtttgtttataatggaaacaagaattagtcaatttgcttgtcctgaaactctgattgttataagctcttacttgttaaattttaatatgcaggttatagataccaaggtagctcatagtaccaagaaacctcattgtattaattattttcctgaagtactgtagtgctttaacataattaccaacatagcctaaaaatgagtgttctatttttaaaccttgacataatttaaaaatgggagtttgtacaacattttttgtgggaaaatgattaatctcaaatttatttttgacataaaagcattataaaatgttactccatgtgaacaaccttaattcacctcctgaatttatgttcttattttctctgcttttcttggcttccaggacatttcgctctcctaggactaatatcttagcgctctgtggagataggaaatttgagtcctgtaacttgtttcttaaaagtaattgcagagcatttgtatatacaatgccatttttaaaaaatgatattttagttcacatctgttttccaaggaattatagcttctttgcagatttacttattttccccagatcagtggaaaatccaggatatttattcactagtctcattgttatttatataccattataatgatcctcagacttataaagcatgccgcattctaaccacagtgtatctcacatgatagaaacaaaaactactccctcctcttttcttatagacatcttaaaactggattgagaataaactgagaataattaaaagtctttgcccatgcctatgtcctgaatggtattgcctagattttcttctagggtttttatggtttgaggttttaaatttaagtaagtctttaatcaatcgaattaatttttgtataagatgtgtaaggaagggatccmgtttcagttttccgcatatgtcsagccagttttccagcaccatttactgaataggagatccttttcccattgcttgtttttgtcargtttgttgaagatcagatggttatagatgtgtggtgttatttctgaggtctctgttctgctccattagtctgtatgtctattttggtaccagtaccrtgctgttttggttactgtacccttgtagtatagtttgaagtcaggtagcatgatgtctccaactttgttccttttgcttaggattgtctaggctatacagggtcttctttgattccataatttaaaatagtttttttctaattctgtgaagaatgtcaatggcagttttatgggaatagcattgaatctataaattactttgggaagtatggccattttcacaatattgattgttcctatccatgagggtagaatatttttccatttgtttgtgtcctatcttatttctctgagcagtgatttgtagttcyccttgaagaggtccttcacatcccttgttggctgtrttcctaggtattttattctctttgtagccattgtgaatgggagttcattcatgatttgtctctctgcttgcctgttgtcagtataaaggaattcttgtgatttttgcacattgattttgtatcctgagactttgctgaagttacttatcagttcaagaagtttttgggctgagataatggggttttctaaatataaaatcatgtcatctgcaaacagagacaacttgacttcctgtcttcccatttgaataccctttatttctttctcttgcctgattgccctggccagaacttccaatactatgttgaataggagtggtgagagggggcgtccttgtcttgtactggttgtcaaagggaatgcttccagcttttgcctattcaatatgatgctggctgtgggtttgtcataaatagctcttattattttaagatatgttccatcgatatctagtttattgagagtttttaacatgaggggatgttgaattttatcaaaggccttttctgcatctgttgagataatcatgtggttttagcaattgcaacaaaagccagattgacaaatgggatctaattaaactraagagcttctgcacagcaaaagaaactatcatcagagtgcacaggcaacctagagaatgggagaaaatttttgcagtatacccatctgacaaagtctaatatacagaatttacaaggaacttaaacrtatttacaagaaaaaaaaacagcatcaaaaagtgggcaaaggatatgaacagacacttctcaaaagttttcacagccaacaaacatatgaaaaaaatctcaacatcactgatcaccagagaaatgcaaatcaaaaccacaatgagataccatgccacgccagtcagaatggcaattattaaaaagtcaggaaacaatagatgctggccaggccatggagaaataggaacacttttacactggtggtaggawtgtaaattagttcgaccgttgtggaagacagtatggtgattcctcaaggacctagaaccataaatactatttaacccagcaatcccattactgggtatatacccaaaggaatataaatcattctgctataaagacatatgtacacrtatgtttattgcggcactgttcacaatagcaaagacatggaaccaacccaaatacctatcagtgatagactggataaagaaaatgcggtacgtatacaccatggaatactatgcagccataaaaaagaatgaaatcgtgtcctttgcagggacatggatgaagctggaagccatcatcctcagcaaactaacacaggaagagaaaaccaaacactgcatgttcccactcataggtgggagttgaacattgagaacacctggacacagggtaacaacacacaccagggcctgttgcagggtggagggtgaggggaaggaacttcgaggacaggtcaataggtgcagcaaaccaccatggcacacatatacctatgtaccagaacgtgtatacctgcatgttctgcacacatatccccccaccttttttttttagaggaaataaaatattcaaaaattcaaaaaataaaatgaaaaaaaaagtattgtggggcttcaccagtatagcaaataactgaattcagctacattctccccatccaaagtctgggcttttctttttagtttcatgtaacttgggagttgggggtaggtttcagatagaagttgtttttggttttgtttcaattctatcttctcttttttataagtgaggaaactgaagcccacttaatccccaatctaacttgttgctttactcctcttgtcgtctcttttcctggaagtacacacttattttctgtctacaaggaaccagtgcaagttctaatctaatcatagtaatttttaacacctgtcttaaaaaacattttaaaacaatatttaaaatgctcttcgttttgtgattgtttcctctggacatgcagcagtttcaagatggcttttactaaactttacagtgatgtctgcaactaacccaactcatagggaaatttcctttttttttttttcctgttcagtttcttcctgggtagcacaaaatctccccttacgtgctcatccccacatacagtggtcaggttatcacctccttgcttagaagagtgtcagtctctgtggccttgatattaactcttccctgccacacttttctgtgaaatgagatagtaatggtgcctgcctcacagggttattgtgagcattggaagaattaatccatgtgaactatttttgagcaatccctgatatataaaaggctttctgctaagaattagctgataaggaatgtaggaccatcggctggtgggttgtgcacaggcaatgggttgatgttttgtagggtggaggcatatttgggagcagctgggtgtcgggttctactctgctcccttgttctcccagtgcaagatgcttccccctgccttcatcttgtcaaggctcttggttccttcacacctttcccttcagcttcaatcgctcttctgcctccctttcccccaacccaagcctttggaacagaaaatctctacagtgtgcaacagaatcattcctacctcatatcacattacctgactttcaattataccacaaagctatagtaaccaaaacagcatcatactggtataaaaatacacacatagattaatggaacaggatagagaaaccagaaataaagccacatacctataagcaatggatctttgacctagttgacaaagatatacattggagaaaggacaccctattcaataaatggtgctgggaaaattgggtagctatatgcagaaggatgaaaactggactcacacctttcaccatatgcaaaaattaactcaaggttgattgaagatttaaatgtaagacctgaaactattaaaatcctataagaaaaactgggaaaaactcttctggacatgggtttaggcaaataatttatgaccatgtcttcaaaatgaaatgcaacataaacaaaaatagataaatggaacttaattaaactaaaaagcttcttctcagcaaaagaaacaatcaacagtgtaaacagacaacttacagaatggaaaaaaaatttgcaagctatgcatccaacaaagggctaatatccagaatctacaaggaactcaaacaactcaacaagaaaaaaaaaaaaaagtaacctcattaaaaaaatctccatgctgttttccaaacaggttgccccgtttcaggtttcagattgtcctttttggagatttctgtaagaactaaaaatagaactatcattcgatccagcaatcccattactggatatgtacccaaagggaaagaaattattaaaaaaaaaaagataccttcattcatatgtttattgcagatatatataagcttgcatgttctcacagatgggggctaaacatgtacacatggacatagtggaataatagatattagggaatacaaaaggtgggaggggatgagggttgaaaaacctactgggtacagtggtcactgttcaagtgatgaatacatcaaaagcccagacttcagcgccacacagtatacgcatgtaagaaacctgcacttgtatcccctcgatatattttaataaacaatttaattttaaaagaaaaaattatttctgcctcacatttaactgtttctctgtgcctttttttctgcttcaagaaaagtgtgagggactaaagaatatgttaaatacatagatacgcgtagattattacttcagccataaccctgtcatatttaacaaagcaacaaactgcgtttggtgaataaagatttccaggacacaggaaccttcaagtgttagagagcagagtttagaatctgtttggttacttctagtaaagaaacctctgtgctcagggttccccaccctgcctaataaggccaccgccaggtctcccaaaccaacccctactaacctcattgtccgtgggaactgtatgtctttgcaccttgtatatcctyattactacttgtctttatagttttgctttaacctgattttaatctctgtatcttcctgctgcattttaggcattagaatttttacagaaattacattagaaacttgttctttaagttcctaactcaacttgagatactgaagtcagtggtggccaattgctccctgaccccttgttcttttttttttagacagagtttcattcttgttgcccaggctggagtgcaatggcgtgatctcagctcactgcaacctttgcctcctgagttcaagccattctcctgcctcagcctcctgagtagctgggactacaggcatgcgccaccactcctggctaattttgtatttttagtagagacggggtttctccatgttggtcaggcttatcttgaactcctgacctcaggtgatccgcccacctcagcctcccaaagtgctaggattacagatgtgaggcaccgtacccggccctcccttgttctttcttagttgaatgttgttgctcagcacccagaattcttagtgtcataaatttcatctctttaatttgaaaatcaaacatcttgagtacccagcccaggaacttgaactctcctacacaagttgaatacagtagaaagattagataggcatttctaaataattggcaagtccctactttggggctgayggttttaagatcaatgaacagaccatgtggacagcaatcactcatcccatctctttactttgttgaatgtcttaggtaccgaatcttgagggttactagtgatagaaggaccaatgagttctacctccaggagcctcctactcttgtaggaaggacaaacaagtagataaatarttagaatgcaaattgaacactgtctcagaggtctgcataaatagctatggaatcatagggaaggaagcagttatccaagggggtcatagaagactctacgagaaaatagtgtgtgttttttattttgaaggatcagttcacattttctacatgggaaggggagaagatgcagaggaaattgcatacaaagacacagtgtgatggtgaaacagatttagtgggcagaactagagaacactgcataaggaaaggtgagaagtgagcctcttgcatgctttcataaggagctggactgaatcatttagcaagaaccagctaattgtgattgaaacaaggggtaaaatacttaggcttatttctgagaaagtagtaaagtagaggacatgctttgaagcttaaaaaaatgagggtgacttctttataataaaatgattatactatacatttaaaataatttttgaattttgagttatttttgttgaaggaagctattttgtattgtgtgtgagagaaatctgtgttctttcaacattctagtagtgagaacaggaaaataatggatgaaatggctaggataggaggattatcataaaatagagtgtattttgtatgcctggcataagtttcacagggtttttaatattgttcttgatgtttcataatgatatgacaaataaattttgtttagatgaaaatgttttctttgctgataaatatactctgtccaagcagtagcaatgcatttgggtgtcctcacttttatctaataaaactttcatggttctatcattttacgaaagtatattacttttcattttccatgatgaaaatataataatgtaattttttatgaaatgtayctgtgggaaatgtataatagaacagagtttggtttcatttcttttttttctgatgtagaacttcagagacagaataattttctttttggcacctaatgggttaataactcatggtacaaaaacccattttattttaaaggaaaattgctttgaaaaatatgcattaattgaaatcctatttaagggtaaaattatgttattgattatgatcaaaatgtcccagacagtgatgaattcatcaattcttgtttcagtggcattataaatctcttagtaagagctagagaacgtgaacaagatgaatattttcaaattatagtggtacattacttatgttaactttcttaatctgtatactgtgtaggaatggaaatagctctttttcagaggcaatatagaaaagtagcttacaatgttatctatgtcacaaatcaaattggaatgaaacttgttccaatataaaccttaaaaatccaaagctggaagttggccaaacaacatatttaagttaaaggaaaaaaggcataaagtgtaaaattaggcatagccagaaatgaattgtatttagaattatagaataacagccgcttgaattcatgtaactaagaaaggtattataacatttaacattcataatatatgatcaaagtctgaaagattgcaaatgattaatccataaaaagttatactttgaaagccctaaagccactattacctatgaaaattgaagagttttcagtgttttacagcttgattctttccaaaggtatatattgatagaatgtattatttcttctttttactactaaaaaatcggtaagacgtggacttgttttaaatgtcataacattttaaaatacaygcacccatttaaaaatccttcttaaatatctttaaaatatagtttgtcttgagttgtacttgcaattcacatgacttatatgatattggcattgtaagtacctagttagtgcttagaatgggatgtgtagatgatttaagttcagatcttcaggctatttcttttttttttcttttgttttctttttctttttcttttttcttttttttttctttttttttttttttgacagagtctcactctgtcgcccaggctgtagtgcaatggcactgtctcggctcactgcaacctccgcctcccgggttcaagcgattcttctgcctcagcctccctagtagctgggattacagtcacccgccatcatgcccagctaatttttttatatttgtagagacggggtttcaccatgttggctaggctgatcttgaactccttacctcaggtgatctgcccgcgtcggtctcccaaagtgctggcgtgagccgccatgcccggctaacacactttcttatatcataggttactatggctatgagtgcagaatattatttgtcttattttgagtaaatattatctygttgtatgactcttcacaagcattttattaagtatgtctttgcataaagagctagactctacagaaagaaagttgaatagatatgatgcttgctcagtacaaacttctttaagaccagtagaatatattgtaagaaatgtataggaacaaaaaactgtggcaccaatgcaatgcagtgatttttaagtgcatctggttaaattatgtggaatttggggatgttgtaccatgcagaggtttgattttgccacaagagttggcaatctggttgcatgccttgtcataaatgactctaaaatctcagaattgttctggtgacattttatagtattatattttttaagaattctaaaatacctatgtcatcttcttcctataatcctctgaggcagagatgtcattttaggttttgagttgcagaaacaagcctccaacaagcctccagtgacagtgtttgccagtaatttggtgcttgtgctaggcctggaaccctcatgtccctactatattctgacaccagaccatactgaaatggcagcagtcatgagtcatgacaggggtgttcrcatctgactacaatatggagggtcttccactaattttcagtgtggatttccatgagaaagatttattacaggtgttttctttcagccatttgaatttaccaagtgtaatttttaaaaattatcattgaaaatatggcaaaaacaacttttggatgccagggtgctactttagcagatgaaacattatgtattctttgtcctgaaaactcttaagagaactttttgttgcttagtttcctgtatttttttaaatttagtaattgttggaattattaaatgaatgtaataaaacacatattgatggaaagttgatataaatttactcaactttgattttaaggaagtttgttaatatagatttggggattttgatcatacccacatgtaattattactgcagttaatttgtaatttatctgcaatactgaacaaatgcaatagtatcaaatgaatagaatactatatataatatacaaaatatgtctgtttaattaggagccaactcttctgtaacactggctctgtcaaggatataataatctactatggataattgcatcaatgtattcattttttcattcattcattctagcttttaagcaggatttgtttagcatctaccattgctaggccatgtactaggtggtgttcatataatatgaacaagcccaccacatatttagcccctgtcctcaagggtcagtaaaattaaacttatggcaagttggcaggatacgacaggcatctgtaaagtagaagtcctgggacagcgtagctgagttctgaaagtagatgtttaacaaagcagagagaagaggaaagctcctaactaaggctttgtgctaggagagtacctggagggtgggtgcctgggattgagaggagtatggctggagtgtcaagggggagagggaaggagtatgtcttatgctggaatacatctggaaggccagctgttggaaggtcttgttaaggataaaggtctgtgttcaagatcaagaggaatgtaaagctgtttcaggattgtgttgggatggtggtggtcataagattatatgtgctcttcaaaactaatactctcattgcagtgaggagcaagggttagaggggacaggaaagaatggtaggaggtaattacagacttgcattcatgtgctatggcagagacagtgctaatgggatagattcaatgcctagaaaggcaattcaattgtcggattgaatgtggactacatgtgaaagagaggttcaagtatgacatacaccttttagcttaaataatgggatggagggtgaggccattcactagcatcctgatttctgggagaagatgagatcacagatcataaaatgtcagataacttccatcttgcctgccagctccattcagttggtagtggctgcgtagggccacagattgagaaggatcttaaagctcattgtagaatctttgatgatcaacaatttgacttaaaagtactgagagtgggttgtgtttctctatatcccgaattagttcttgctcttaaattaatacatatgtagctgaaaagttgccagtagagagaatgtttctgtaactgctcttgttagcgaatgccacctatgtgcttggtactgttgtaaatgtacrctctactttgtgccatttagtccttgaatgtagattagcatttagaatcatatagattgatattggacctattctgttcaagaataatttatataatttgggcctaataggcctttttatactgggttgttaatctgaaatgaggtgaattcctggtgtatagggaccctgaggataacattgtgtcatgccccttaatattctaaattactattaatgaataattaaaagtcagtttacatttcactcagcatagttatctctcatttatgtgtgtatgtgtgtttgtaattattggtttgcagctcatattttatgtaaatagatggtagcagaagctcagaggaggaaatgccatatggtattacagttaatgatgacccaagtgtggctctcattttctgtatatctatctcacagtgccaaagaccttccaagtaattgaatctttcctttctgtgattgaattccaaaggggatttccataattcctttttttccctgttaaaaccatcaaattaaagtaattctggcagtactgtaacttactaaaatttcttttggagcaaattatatatgaacactcataagagctagggagaaaaacatgcttttctgacttgctaattagtgttaatttgtatatactctctctttgtatatacgcttaaaaaaataaaggagacacgattgtttctggaagaccacacagttatactaggctgccagataaagtttctggaggcaaaaatccctacggtttacttgtgaaagtgttggaatacaattacgaatcaaaaaactaccaaggaaattcttaaatactcatgggttaatccaattgtgattttccttttttatagacttcatggcggataaagctcagggttttattcaatacaaatgtgataatatatttaaagcataacaactatattgtagatcagaatgccaaaatcattaatatattgtaataataaattatgtatatttttattttttgtggaattaaagtatgaaatttatgaaaaagatgaatagcattttctaattattaaaattgacattggtataactatgcatacagaattgttagaaaatcatattggggtttaattaaaaagactagagcattatttttgtttgaaagattatgattttttttttaagtaaatgatatggtttggctgtgtcccgaaccaaatctcatcttgaattgtagttcccataatccttatggttttatagggggatttccccccccacttcactctgcacttctccttgctgtgccgccttgtttagaaagaagtgtttgcttccccttccgccatgattgtaagtttcctgaggcctccccagccatgtggaactgtgagtcaatcaaacatctttcattaataaattacccagtctcaggtatgtctccactggcagcatgagaatggactaatacagtaaacattaaaaaattgttttctcttgaatgaatcagaagatttgaaaataaattttgaaggataaatgtcaatttagaagatgctattggataatcttttatcattatgaagaaagataaattaatcatattctgatacagtaaaatagattgttgttatctaatgccagttgaatgtgtgtggcacaaatcgtggttgggaactcgggctcctcaggcaggtaacatgggttcaaaacctgccactgttacttaacagctgtgtgattttatgcaaataacttaatctctatccctcagttttcctttgtatgaaatggggatactggtaatatgcatctcataggatgatatttcttaatccataacttgataactgttaaaaacatgtgtatgaacatggcttttcacagtgggccagaaggagagctacaataatagcaaagtagtttgtcacaaatgtggaagctcgactgttagacttgatcctatcactactttaaacaagtctcttaactttcgacacttctgttttcctatatctgaaatagatttagtaagatcattctttcctatagcatgtggtttttgataggctcaaataatgtgaaatacaaaaccacttactttatgtgaagtacctaaagtcctctctgccttcaaaaagagtgccagygagtaggtacttgttgaacaaagaaagcagtttttgtttctgcctgtatgtgtataaatggttattcattgaaattgttttataaatactaagataaaaaaggggccatgctcaacactgaggaataatacactgtaatycttaatctgttttaaytactatgaagaatatttagawactgttggcaaccagttagaatactgtggctttatattttagaaggtaatttttataaacatttcctctgctattctcacagtagcactgtgaagtagatattataacgatttgtcttttatgcaagggaaaacttaggcagaaaaaaattaaataaccatataaataattcaatgtgaatgtaaggaattgaggatcagacccaggttgtctggaaacaaattctatcacctaagattccaaatacacaaaatttaccaaaataatgtttatttacccattttgtctattgaaaaggtaacgctaattccagagaaattttctaagattttctatgagaagattatttgcaacatcctattaaattatgagttgatttttaaaaaattattatgaaaaatccttaaaatatttcaaagaacrtgcttatacacacagagacacacacacagacacgcacacaaacacvcacacacacaaacacaaactcccattctgaattaatcagtcttcatgtcttgacatatttgctttagcaaatgctttcaagaagttctataggtacagttgaaactgctttggacctctttccagtctcattaaactgtttgtatatccttcctgaatccaaaarcaatgcaatcatcgatttttaaatcttttaaactcagttagaattctctagagcaagaaacccaaagacttcacttaaaattgtttatgacagctagtaataaaatatcttcaaatcattgattgactagatttttggttttggttttgaattatcacatagagtttctaaaggaaaagatgctagaagctatacagttttgrtacatatggatctctgaaaggcctgttttatatcttttgtatttgaaaaagatgctcagaatactgatgaaaaagcaaagcttttagtcatttagaaggaatttttaataaatcttatcggggggttagttctcaattctttgtatttattttttcttcttcttcttcttatttttttttaataaagaggaagtgtcagtcagctgttgcccaggctggttttgaactcctgagctcaagcagtctttccacctcagcctcccaaagtgctgggattatmggcatgagccaccacacctggctggtctcaattctaatagaagagtggcatgggtagaaaccataaataataagcaatctaaaatatatttgttttgaccttatattgtgttgtattgctttttttaatcctttgacttcaggtatatttaaactaaatttaaaatgaattctaaggatactattggtcttaaaatataaggaactaattgaacatatttaaaggaatttatatatgaaatgatagagactatggtactgagaaattggaaacaattgttaactgatacaacacttrtgacacaacctgttaatgaggcacagtgcagcagttaagaacacactgaaagtatgtacataatgagctgagaagatcgctatgacatatcagtcagctggaagagcaggttataaaattgtgtccttaggatccagctttgtaaaggcaagctagacaccacgtatgcccaaatatgaggtgaccctaaatataaagatcaactggggcggttttgccaccagtggacattgatgatatctgaagaaatttggggctgttacattgaggggtgctactggcatccagtgggcagaagtctggtaagctgctgagcattctacaagtcataggactacctcaatgacaaagaactgtctgacccaaaatgtcagtagtactgagggtgagaaatctcgacataaggtaatgctaaatatctgagtattatttttaaaagtatgtggcccacattatgcatatgaaattttagggataaagatgcaaaagtcaactatctacttataacaattaatttattagtgaatgaaaatcaactatacaaaaaagatagcaatttagaaatattatttttatcattatcatgaaataattttattcacacttttcacatatgtcagcaccagcactgccyaaagttgcttgagttagagcactctctaaatccacttacgtaacctgagaagcctgcttttttccttcttcccatgggcatatattgaggatcttgtcagtgtgagcacagtataactttctaaaagtgatccttaaaaagcttatttacaggagttaatatttgtggttatgaggtgtaactagtatgaaataattaccaattcggtacggaggaggttgtttcaggttaatgtgtctcctcaaactactttctccttcaaaatgcaataattgagagagcatttggtaatctggtgaagtgaagacaggaatagatggagtctccttttcagaaggatagattagttatagtgatggagggaacttgtcttattttcagacttacagagttccacgtaagtgtgttacggtgtgcacgtgtgtatgtgtgatcatgcaaagggaacatcgatgaagatgtacatcaaaatgtagtcagtggcagtgtcatttgagagattttcactttctctgttttctgaaaaatgtaccaggagaatggaggtttgtaatgagccttacatttataatcagaaggaaacacagtgtttctttccagtttaaacaaacaaacaaacaaacaaacaaagccatattgtggttgctctcagttgactaaccctcacaggataataaagtatttcagtatgaactcctgctctggcctatcctatctagaaaaggcaatgtgtttcttatctttcctctccttagatcttctcgacctctcattccctcacattctctccaccagcaaacaaaagaacataaatacaattttggggcatttgggactttgctttctgaaacagttgtcacacccatgctgtccttacatgtgagtaacctcatccttcctcccacagaattaatagatcatcttcactgtgagttcccttaattttatatctttgttaggaagactccaagagaatggacaaagattattggactctaggataagccaatggagaaaaacattaggagacaaagggaagcttttctcactcttgagatcatacctagggatatctgtatactttgtagactgttaaaatctctctgaggtttcagccataggcagagagttttcttttttttttttttttttgagacggagtctcgctctgtcgcccaggctggagtgcagtggcgggatctcggctcactgcaagctccgcctcccgggttcacgccattctcctgcctcagcctcccaagtagctgggactacaggcgcccgccactacgcccggctaattttttgtatttttagtagagacggggtttcaccgtttttagccgggatggtctcgatctcctgacctcgtgatccgcccgcctcggcctcccaaagtgctgggattacaggcgtgagccaccgcgcccggccggcagagagttttcaaacctgcttcaaaagcattgtggagggtgtgcagcagttgcagctcctgtggtcacactggagaggaagtgttctcttcactctcgtctcctagcaacagtttccagcagggcagaaggattgttggacctgcttttaaggcagcttctacttcggtatatattggtgtagaattcagtttaatgaatatgaaactttttaaaggtaaacctaaagtcacttttagcaatcttaacagtgataaatggccgcttgagagtcacgtatgtccgtgctctaaattatagccttgccatcatttcatcatttctggtgcactttgctgtctaattcccaggcagaatgttcagatttctgtcttttcttcaaaaatgttaaaaccaatgacatacattcacatatgttaaaaaaataaagtagtagagaaagacttatattcatgtaccaaagttttcagtgcaccacttaatccccagccctgctcggcttaatcacttactttacatgcactttactgaagggctggcaggttccagttctttctgtatatgctgtacatatgtgtatcattagttctcacattagatggatttctaaatggcatgattgagactcataaaagtttaatacttttttttttttgagacagagtattgcactgttgcccaggctggagtaaaagtttaatactttttataatgtgtaaccgagaattggaacccaaatctctctgaatctacaagtctgttcctcaactttgattaatgacatacacctttgactttctacagttagccagatgcatggtcgtgtgggggagatgggcttcagtttcactagagacttagatgatgtgtaccatcctggtttgtcgagatggctctgggttagacatgctgccctggcaaaatcattaccagtatcctatttcacccttatcttaaaagtgctctggattgtatgatgaattatatggttaccttaactaacaatttgctagtcatcttagtaccactaaactataagccccatgaaaatagagatttttgtctgtttcattgatggttatattacctgcatctagaacagtgtttggcatgtaaatgcactcaataaatacttgttgattattatattgacggagatttagtatgtgtatccgtcaaggttctccagagaaagaaatgtttatatacatatatgttaaggaattggctcatkgttgtggcggctggcaaggctgaaatttgtgcggcaggctggcagactggaagctcagacagggttcctgtgttgcagtcttgaggcacarttccttctcttcaagaaacgtggtttttgctcatatgaccttcaactgattagatgaggacccccaagttttttagggtaaacttatttacttaaagtcaactgattgcagatggtaattatgtctacaaaatacctccacagccatatctaggtgagtgtttgacctaactgagcaccagagcccagctaagttaacacataacatataaggctgtatgtttgtgcacactctatgagatcagtgcctgttggtaaaaggagcttactcacaaactgtcaagatgacatttaaaagagagaacactggcyggctgtcgtggctcacgcctgtaatcccagcactttgggaggctgaggcgggtggatcacttgaggtcaggagtttgagaccaacctggccaacatggtgaaaccccgtctctactaaaaatacaaacattagccaggtgtggtggcacatgcttgtaatcccagctactcgggaggctgaggcaggagaatcacttgaacccrgygggcggagrttgcagtgagtcaagatggcaccactgcactccagcttgggaaacagagcaagactccatcttaaaaaaawaaaaaaagaaagaacaccaaggatttaattacctcagaggagttgcatatagaaagaatgctgccatgctttaaacacatagtgaccattggaatcccatttagtataatgtaaaatcacagtacagagagatattacaaaaacgtgrttataaaatctattttttaggcagagcattttgaagcttgctggagaaggctgtctgtctttcctttgtcaagtagttacatgtgatatttaatacagtagagttatataatactgccattttacatcgctcgtctttttacacctttcctcagatatttgttgatttataataaattgtgacctttctgtaattagttgggaatgggtgatgtgggggaatatttaggaacttttctagtactcaacaaattttgccccgtagacttttttttttttttttttttttttttktgyactgtggacatatagagatggttctaggacctagcactgggagctctaacatgatcttatatagctagaaagaaagtacttcttcattgtttgcaatagaggagtgatagataaagtggtgacagaggaaagagrcaagaaaaggaatataaagtagggaaaattgtgaggttgtgatcagactgagctcagaaacaaactttctgcttccttggtgagtggcaggaattactacaaactctggcatgctttcttaattgtaccacaaaaagtgaaggtgaaacatgaccttaatacttccagaaagccctgaatagttcttgtttgacatataagtatgagtaaaggattcaggtagcttctatatattattaataattcagctttaaagccaaactttcttaactacctctcacttagattcctggattttagatttttaaggctkttaagacctttccatagtgcatctgctcatgcgtttgaatcacaattttgtaatattaagtaaccaaattaaaatacccaaataaaatgartgttaagatttgttaagtctaaaatagccctccatgacatctgacctaatatgttttttctccaaaaacagattgtttgttctcattgatttacttattgcacataaatattttgaaatttaatttataaatttatttagcaaaatactacctttaagatgcatgtatttggattaatatatcaacattattctagaaagagaactctctttatattatattacattattatttatattattattctttctctctagaagagagagaatgatgagaaattgctcagtgtttacctttgtggagagggctcagagggaaggggaagaagcttttactctttattttgtatctttatgtatggtttcagcttcctagttaaatttgttttacttctgtattttttgtccttggctgtggacttatgagccatttttgttttctttcttataatacaatcatgtgccacataataatgttttggtcaatgacagactgcatatgtgacagtggtcctgtgagattataagactgtgtttttaatgtaccttctccatgtctagatatgtttaggtacacaaatacttaccrtgtgttacagttgcctacagtatgcagtagagtaacatgctgttcagcttgtagcccaggagcaggaggctctaccatacagcctaggtgtgtagtaggctataccagctgggtctgtgcaagtgcactctataacgtactcacaatgatgaaatcacctaatgacacatttctcagaatgtatctgcaatgttaagtgctacacaagtgtactttctatttaaaaacaataaattcagctgggcatggtggctcatgcctgtaatccaagcagtttgggaggccaaagtgggagaattgcttgaggccaggagtttgagaccagcctgggcaacatatcgagacctgcatctctacaaaaaaatttttataataaaaaaattagccaagcatggtgacatgtatctgtagtcctagctactcaggatgctgaagtgggaggatccctggagcccagggtgtcaaggccacagtgagctatgattacaccactgcactctagcctgggcagaagagagagactctgtctmtgaaaaaataaaaaaaaaaactttgtattttaattttaaaaaccttttatttattttatatgtttggtttctttgtgtgattttacctgggaaaactggaatctgctttagaaagtttaggccgggtgtggtggctcacacctgtaatcccagcactttgggaggccgaggcgggcggtttacgaggtcaggagatcgagaccatcctggctaacacggtgaaaccgtctctactaaaaatacaaaaaattagccaggcgtggtggcaggcgcctgaagtcccagctactggggaggctgaggcaggagagtggcatgaacccaggaggtggagcttgcagtgagctgagatcttgccactgcactccagcctgggcgacagagcaagactctgtctcaaaaaaaaaaaaaaaaaaaaaraagagaaagtttatgcactrtggctcagggtcagaatttgtctcctttcattctggaaatgacaagaatggggtttggtgggagtcttttgagaagacacgtagagtacgtgaatagaagcaaggtggctatcaaacartctcatcagttatatccgatttgttgattattacttttatgtgaatactttttccttgaaagcacaatttagttttcaaaagacaatttttgagtatttcaaaaagcactttttttttcttccttagcatttcatgtagtggcycatacagctaaacaactatgccarcaaaaaatttataggatcaragaaataattaaggaatccctgactttgttttttccatgctatgaaagagaaaactctatgaaagaagagctgcaattgacctcttttattgtagctcttagctrtcttctgtaagacaggtaaggtttgccatagctcagctgcataactgagtgactgtttgcttcttgatgcacaaaaatcagctggtgtccttgaagatttcatcccttggatttttagtttgggtaccctgtcttttccatgaatgakgctgcaatagttacaatatttcttttccttttttttgatattttatgtaatttcctgtaaagaatcatgttaggaagatagcaaaggtcacagaccttcataaaattaggctgtcagtattcaatagaatagtagtcaacaaaattgtaaataaagccattttaatatggacaatgttataatatgaaaaataaagacatggaattgaatatgcagttaagtagatactctattaataagccacggaaagaaaagttgaatacactgaaatggtattcaataatattaatagcaattgctcaataaactatgactattaytatattctaagagctatgctaagttctctatatgcatcttattaatcatgaaaataacttgactgtttyttctaagccttacttagataagcttttggtagttttccaataacatacagctatttagtgtcagtgcagggacttcaaccaaatctataggatttccaaaccatattctttgcagtataccgtattgctttcagatttttaaatacacacatacagaataaatctctgaaatttatttttcrtaaatggcatcaggttagcattgcctagtggtacttagctagctacaagtttactaagaaaattggggctctataattagggccagctaggggatacaccaccgtatttatgggaatcttgttcttttttgtggggagtgcctgcctttctgaaaatattcaacggttattttttatggaaggttaaggctttgggaaaaggcttcagactttaggctgcagatacatattctcccagggagggattaggtctgtgcgggctggcagtgatgatggctccagtgatggtgatcaccagccctatctttagatactgagtataagacagaatccatttttatcctgcaagtacatgttaacctttgaccctgattgctactgccaagtgtggtctggactggtggtgtgtgcttctccagctcagagccttccatggggggtgcactctgcctggaggatggtgtggactgtgagggtggggcttagtagccatatctgggtggcaggaggaggaggagcacaggcagggtcctgggaactagaaagataggcaagccgaggagccttttatgattccaggcaacttgtgcatctccattgccaaaagactgaatgtgctgaaagtgggagcgttcaacctacttggagtcagagaggaggtagagctgggcttgggagaatttccgtctgtgcttggccccaaagctgctgtttagcaagacatgaaacagtrtctaagaaagattaaatgtatgttttctatatatggttttacttaataatctgctgcagacagtgttgctgactacaatttgaaaaattatggaagtccacaaggtaataataagttgaataatttattactacacgaagtaaaatgagtattaactgaactaaattattaaattgaaaatttagtgtacttcagaagacaaaaagcttcagcaaaacactggataaaaacctttcagaaatgataaaaatacattgtatattaatgaaagycactatattcataggctaaaaataaacatgaaattaatattttctataaattcacatagtgattgctttttattagaggtgagtgataaacttatgaacactggatagaggtcttcaggacagctcaccctttcccacagcaagagtccattaatggaaaatgtgtatgattttctgtcgttctgcctccccgccgaaatgggcctgcaaatggtctaatttctaggtaaatttaaaatgtgacagctcatttaaaataattacacatagtgaaaaatatgcttgttgttctttctttcttttttttttttttttttttttgaggcagagtcttgctctgtcacccaggctggaatgcagtggcatgatcttggctcactgcaacctccacctcctgggttcaggcaattctcctgcctcagcctcctgaatagctgggattacaggcatgcgccaccatgcctggttaatttttatatttttagtagagacggggtttcaccatgttgcccaggctagtctcaaactcctgacctcaggtgatccacccacctcagcctcccaaagtgctgggattacaggcgccagccaccgcgcccggctgcttgttctttcttattacccgtggtgtctttatgtctatgtcaacttttatttctgattagttattgtgtcagtgcattaatatttaggtcttagaaaataaaatagataaggatatacaaaacttttaaacccataatttaaaatgtcgcaatccaccatatcctatattcttcaatcatactatgtcttacaatgaattcagtaaatattcatatttaaattatgttcaatataagaaatttagaaaattcagagtatctcctaatattgtactagacttaaaatattcttacagaaactactaaaaaagaaacaatttaagacttcacatgaggtgaatttttgattagattggtttaatcatttttcttaagaaaaaagttatataacttttctatkatatttcaattttaagtataatatactatattatattcttcataagatttaaatttttctcatgaagcaactacttagtctgagttttcgacactactatacttatattggtttgctaaccaaaaagataatattacttctaaataatgtttgagattatgaaatgttttcaaatatattgaattacarttttgaccaatgattttataacagtgattrtgttttatagaatgttagcttaaacataatttcaaggcccagagtaacttcaaaatttggattaaaattaaattgagctaattaatmagtattattttagatccctgaataatttctaagatagaacattataagaactaacattaagcaaatgttaattttttaatatttttggttcttattttatggatcatatcattaaacgtgttcattttttgtcactttaagaatgtgcaaaaaggatgaatgtggctttaggaaggtatgtgttgtgtatttttgagctttgctagtctgctaaaatgctgtctatgacagttctcagttatctcccacccagctttgtctatgaaatagaagttgtaatatctgctaaaaattaggactactgttatcacaaggaggaattatgacaaggaacacaactgtgtaagtgcatttgtgtaagaaaacaaaaacaaataaaaaacaagactagtcccaaagaaaagtattagtgtrttccagcatatgaagagaataatgagtgtggagagctagctatagagtgtttgaggaaacaaattgtatttgccttgtttttataatatctgaatctgtaaagaaataatgaaacgtgttaattttttggtaaattctgttcagttttgatagaattattcacaagatataaaaaaataaaaggagctcatgaaaactttactgccaaacttcacattaaaamaaaactagaaaatgacttctctatgttaaaatgataaattggccttagagttaacagagggcggatggagtgacaaaagatcattctttacctgcagagtaatctgcctaagtagcaaggattctgcatctcaactttgtgtggaccttatcatgtccttgattatttacaaaaacaaaacaagataaataaatgtaaacaaacacgaagttcagtgagccaaagttcctcactagtaaagaactgaagtttcctggtacttgtgtgccttcttctgtttgccacgttgattaaataggtaaccagatactgtttctcatgcccccatggttccatcctaattcagtgagcaaatttcctctgacaacactttgatttttgccttctacaatttgattgcaaatttagaaaaaaaaaatttcagtgtaaaatgtcttttacatctaatgctatctttgtgttttgagggggcctcataaagattattctttcactttataagtaaaagaatactagaaataattgggtttgtttcatgggttccatatgtcttaattacctcaaactattgtgagaactrtatgragatagttgtcaaatcaggaaagatgcttaaccttcactaggttaaatttgtataagtaaaatgttattcatttttttaaatattttatagagtgtacacattttgagaagaccctggaaattgtcagtgcctctgctatccatcatatgtcttctctctcaggggaaacccttatgamatagttatgtcctctatcccaaaaaagaaatttactcttgcctgctgtgataatactgttcctggaatatgaccttcgccatgagtcttaccatcaagcaagagctcttttcccttctgatgtttgcctggtgactttgctataagcttcaggctagagtttatacctttagcaaaggggagttcagaacctgtggaaaggcctgtaccagcattatgaaccattgccccttcagggaattgtcaagcacagccttacaaacaggtattgcttagacaacttgcagactrtatcagtgactaaggatttccaggacttctttcagtccagcagcagacatactttatgaaagcagtatccagcagaataaaacttaattactaaggactaaatgaactgatgagactaatttaattgtggttatttgtttagatatgttgctgttgttggaatgctctcttatttatggttgtatgaggaaaccctttctcctttttcccaagctgtctctaagcctcagtttaatagactatgctttggtaaactgcagtgaaacatttttagtggtatctcattctcactcatcccttagaattcagaaacagctatgttactaagatttgtgacttgacttggcaatatagttatttgggtaagattcaataagaatcttgctctctttttatcagagcataattggaaacatcaattgtgcaagcaatatcgcatttgagaatgattctcatttaatcagctgtgaaaagccccctattaaagagcaagttcttagtkggaagcctgttctcaagactagttatgtatggattcagtgcctacagagtctcccaagaaccctggcttggcacttggtacttggcttacagagcatcagcttcacagaaggtatgatttcttaccagatcagaggccttagagaatttggaagtcatcaagaagagaagaattcacccagatttatgggtatatataaaatctgctggagaaaacgtcttgggctgagtctcctacactcagcataaaaaaatatgaggactataataaaaatcaaatctgagacctctgatgaaaaatctacccagaaaattcttaatctttcatagttgctcaatactataaggctctagattttcagatcaaactcgaggcctgtgtgtttgattaggactcttgttgccttgcatccatgtgaataattagaccaarcctaatgaggctagactttttctttaaagataatctttgaggattatttataatcataaggggtagaatatcagaaaagttttctgaaacaaaaatggagcaactactgagtgtttttccgttcagtgtaggcttttacctttgattttctgttgctttgggtgttgtaaaaccttgtaggagaaggggtgaatgtacagatttttgtctagtagagatacagataatttctatctggtggaaaagaygatttaaaaattatagtttattkccctgttggacattawcccattttattaatatatctaaccaggtgatcttaccataaaattactttgtaaaattgcctttaaacacctacctcttcaaattttaatttcaactggttttaacatcttactggcttcctcattaattactaagtgtataagatctttgacacacattcattttttatttacataagagacatgatttttattacataggaatcatgattttgctttgttgaaactcgtactttaacaggcctgagcaactggggaaatggcgccattgactgtggagaatcctaaggaataagcatacttgttagggataagcatgcggtgaatcaggaagctagtgaaatactttgctttggaaatgtttaattcaaaacagagctttgtttacttaagaatgtttatagcaatgtgaagtagcaagacacaggaagactggcaaacttgacctagctcgtatagtggccaaagtcacagaagcatagagatatgtatgaaaggygggtgggtggatcgcctgaggtcaggagtttgagaccagcctggctaacatagtgaaaccccgtctctactaaaaatataaaaaattagctgggtgtggtggcaggtgcctgtaatcccaactatttgggaggccgaggcaggagaatcgsttgaacccgggaggcagaggttgcagtgagccgagatcatgccattgcactccagcatgggcaacaagagcaaaactctgccaaaaaaaaaaaaaaaaaaagggatagttagcagtcatagagatcctagaataccaaacggaagtacttgtactttgytctgagagttttggggcgcagtgaaagttttttatggaagaatgacagtcctaaggtttccaaaagattcaactggaatgcgtgttttagatgacttggccagaggraaactgaagatagagaagctaacatgaagaccattgctttagacttgggaaaaacaatagatgcatggatgggaggcggaagggtataaaatgttagagtattagaatttagataatttggcaaatcctttgtgttcttgtctcgtaattgtaggcttctgttaccagggagacagagtyggaaagtcacagaattaatggtgataagctttcaaaccggctcctttacaatgagttggcacagaacaagcgtatacaggctagggaaaaaaactcttaggcttactgaagcaaaattctgtacgtcaagaaaacaggaaaggaggcattttgtgcttcataaagttgaaggggtagtaataaacatagggataatattattgtcttacagttcagtgtggagaaaaagaaataatatggaactccttacatagrggaattacattatcattagaacaaattgcatgctgaaaaggaacttcacatttcagcatttcttttattttttwaaaaaatgaaactatgaaagaaactatataaaggartctgagaatgtcatctgccttcgttatattgtaggattgacagttgagggcttttagagatgctttcttcaaggagcttcaatcattcattggcgttcaatgctttagggccatagttttatgcagaaaaatttttgtatttcctgttattcaaccataattggaaatgaatgcatgaaaatcagtatcaacaaagtaaatttaggaataagtaatttgaaatagtgacttttaaagaagttctgaaactaaatggtraaaagcaagtttctcattcatctaatgayccaaatttacaaggatttggtaaaattattgttttaattaagatayaattttaatttaattgtattttatgatagtcagagttaatagggaaaagagaatacagaagtcaaatatgaggtcaaagtttttacttcttcctgatttcaagctagaaattctgtgtggatagaaggaatgtccatgggactcaaagtgaaggtcaaagtcgagccctgcttccgtactggctgaagacctgtatgtccagctcctgtcagctgtgctcaggggtttctcatgtaagactttgatctctccctactgtttagaattttagaatggtaagcaatatttggttgtgctcctcatcagctggagttgtgtgtatgcaccagtgtgtgtatttgcaagtttgacctcctgaaatctcaatctgatggtggatgtctctaactttattttgctgctgcttttttttgggggggggggcgggtgggaggaggtggcagacggagtcttgcactgtcaccagggctggagtgcagcggcgtgatctcggcccactgcaacctctgcctcccgggttcaagcaattctcctgcctcagcctcccgagtagctgggattataggcacccgccaccacgcccggctatttttttttattttttagtagagatggggtttcactatgttggtcaggctcatcttgaactcctgacattgtgatctgcccgcctcagcctcccaaagtgctgggattacaggcgtgagccaccatgcctggccacatctttttttttttgggacagaatctcgctccgttgccaggctgatgtgcagtggcactgtcatggctcactgcagccttgagctcctgggctcaagcagccctcccacttcggcctcccgacttactacaggtgcatgccaccattcccagatgagactgagtctctgtrtgttgcccaagctggtcttgaactcctggactcaagggatccttctgcctccgcctcccaaagttctgggattacagctgttagccaccatgcccagttgttttgcttctttatgggtgtttatttcatttccgtttcattcaccraatgtctgcattttgtgtcactgtttacacaagtcactgtctcttggttgttaatgtgaaaacttggagaacagaaacaaaacttctctagtgatcttgagcaggaacatagatttgcctgagttcatctaatatattccattaagatgcccttaacaaggcatgttaccttcagtcatctctttaccctctttgtgccaagtttcttcatttgtaaaatgggaaggttagaaacakaactagatcttatttattggttggtttatttctcccccacattgctccacaggaggtggagatggctcaaaaatttcaaagctatttttagccaaacatttggtgctatttatttcatgttgggcttaaagcaaaaatttatgtcactaagattttttttttttctactgacttgttgcaaragaaaaaacaaatgtattgtccaataataagattaagagtatatgaaaattagagcaatttaacattaacttttttgtgggcaaattatattactatgtaagtaatatatagctgttgctgatatttggcaagtgccttcagaatatttaatttttataatttccactacttttcagtcacagcactcaggagaacagaaccattttaatttttacagaattccttaacccaaggatgatttgtaagtagttattttcatttggaagcctttttctccaaacgtgcctcatgccataatggttttcatttgggagrctttttctccaaacatgcctcgtgccattatggttgagagcagtgcacacaaaatagaccaggctaccaagcccccaaaccggaagcgaatcatgtgactgaggcactcacttgtgtcaagtgamagatctgcctgtgtacaattattggtggaatcatcagaggctgttaatcatcaccaaattgttttccttggaactgttttttatatgattaccactgagaatcaacaaactcttaaatcataatgacagttgaaagacctaaatgtcaaccaaattaagaaataatttcttagagtaatgaaaattaataatattattataataaaataagaaaacttaataacaagatgaaataatgttaacaaagctacgacataaggtctactcttggagaatatttgaatttcagggtaaaaatggcatcagaaacactaacagtctcatataaaatcaagcaaagtcaaatttgaaccttttgagtatgtgggatcctgccatataatcacattggtgatttcaccctaaaagccaaacatttcattgcactgatttgattttaaagacttctaattttctggtaaaatacccagaatgagaaagaggggaagggaacagagactaaagatagaggaaatttattattttggaaattgaatgcctagctcagaatgcagttgattacccttctcaagacccatgtctatgttcattttccacatgtgaaaaatatataaaaggctgttaccccgtgagctgttgtgtgtgaaacttgactcttgtgagcacccaggactgtcctgcatgaaaggaagaaatcaagtcaagtaaaaagatactttgttctttggtataggcagaattaagaattaaactcattatttaaatacttgaggtaagatacagtatttgaacttctcaaaagtgaaattagggaattttagagattaaaaggaacataaatgtttaatattacaggtgagaaaactggagtctaagaatgtttaattaaataaagatatgtctcccagcactttgggaggcyggggccgatggatcatgaggtcaagagatcgagaccatgctggccaacatggtgaaaccccgtctctactaaaaatagaaaaattagctggccatggtggcrtgtgcctttagtcccagctacttgggagactgaggsaggagactctcttgaacctgggaggcggaggttgcagtgagctgagatcacrcctctgcactcagcctggtgacagagcgagactccgtcttaaaaacaataacagcaacaacagcaaatgtccatcactcttctcgtgtcagccattgcactagtggctggtgatacaagctaaataagacatcaaagctctgcctgaagaagtgtgcattcatgctggaggagagaggcaggagagtgtatgggactgtatccttactgtgggaagtgatcacagckatggtagaaacagcagaacagggagcttcctagcagctgtggtttgagtcctcagggtgtgccttggagaaagcactgggattacaggtgtgagctaccatgcctggcctgggttttccattttttaagggtggggaaggaagaggaggaggagggagaaaccagcagcatcaggaggccacagagccaaaaacatttaccacctggccctttgcagacaatgtttgctggcccctgggttagacagggaggcctgtgagggtagatgtccacacctgcagatgcattccaaccctggagracagccaaagcccaggtatggagaggtgaatgcacaggctgttctgggaactttggyttttttgtttcaggggagtcactattttaaagaaatggcatccccactggagcccttttgtaaaatgctggttagttttgttgacacaagaccgtgtggtatatttttcatgtacttagcagtctctgtaactgtctcatttctcctttactgttttccacttctaattatttagaagygattaatgtttaaacattatttaaattccctcacacctagaatgtctagggcaatgttgaaaaatagttttccagtcgttagtctcttgtttagctcatctagctacacacgttcctccctccctcgcttcatcctgccatccctcacatcacaaactctcctcccttcctcccccacctcatgttattctgtcatcccaggcacattcagggtcccacggaaagagactgttctggggacaccagtcatggggtgcactgggcctctgcattcagcaagtgggacaaaactcaggcaatctgcaacctccaggtttgtgtgawttcacatgatttctcaactagaaaatcagccaaatgtgtgaagttctggaaatccggttttatacataattgaatttctctagaaactggagttttaggagttataagtcctcccttcccagtgactaaatggatccttttttttttttttttttttttttttgagacagtcttgctctgtcacctaggctggaatgcagtggtgtgatctcagctcactgcaacctccgcctcctggattcaactgattctcctgcctcagcctcccaaataactgggcttacmgkcacctaccaccatgcctggctaattttttgtatttttagtagagatggggtttcaccacgtcggccagrctggtctcgaactccttacctcaagttatccacccacctcggcctcccaaagtgctgggattaaggyatgagccaccgcacccggcctacatttttttttttaaaggtttagcctggtgattttatagctcatctaggttgtaaggaatagcaatgaatcctaaaagatatgtactaaagatacattcaaaattaatacatgcataaagtataaattaaatatgacaagtattgaaacttaacactatttaatattttaaatgaaaaaatattttcacaagggattgtactgaacaaatcctttgaatttcagctttgcttatgtttkccagcaggaaaatgattataaaatatacttgtaatggagaagttagcctgattattttgtattatattagaattaccaattacatttgtatctaaggacatttgctatattattrtaacaaactggatttttgtcttgggcatatttttctgtatcatttcaagttttatttttgtcttttctacctacttctgtttcttattacrgttacacaaaagtgagttctttttatttatttttttaatttatatttttaattttagcttttatcttagatacaggagtacatgtgtaggtttgttacatgggaatattgtgttatgctatagttcagggtatggatcctatcacccaggtagtgagcatagtagccgataggtagtttttcaacccatgcctccctccctcctccttctcatagtccccagtgtccattgttatgtccaggtgtgttcaatgtttmgttcccacttataagtgaaacgtgcagtatttcttttttttgttcctgtattaattcatttaggattatggcctctagcttcatccatgttgctgcaaaggacatgatttcattctttcttatggctatgtagtattccatggtgtatatgtaccacattttctttatccagtctactattgatggacacctgagtttattccatgtctttgctattgtgaatagtgtagcgatgaacaggtgagtgcatgtgtctttttggtagaatgatttgttttcctgtgagtatatacccagtaatgggattgttgggttaaatgatagctctgttttaagttctttgagaaatctccagactgctttccacagtggctggactaatttacattcccaccaacagtgtgtaagtgtataagcgtttccttttgtttgcagccttgccacatytttttyttttttttttactttttaataatagccattctgactggtataagatggtatcttattgtggttttgatttgcatttatctgttgattaactggctgtatgcagaagactgaacctggatgcctttcaccctatataaaaaaactaaaaatggaccaaagattaaatgtaaaacctcaaactatcataattctgaaagacaacttaggaaatactctagtcaacattggctctgggaaaaattttttggctaagtccccaaaagcaattgcaacaagaacaaaaataaacaagtgggactgaattaaactactgagcttgcacagcaaaagaaattatcaacagactaaagagacaacctacagaatggcagaggatatttacaaactatgcattygacaaaggcctaatatccagaatttatagggaatctaacaaatcaagaagcaaaacacaataaaaaaaatttaaaaatgggcaaaggacatgaacaggcacttcacaaaagaatacatgcaagctaccaacaaacctatgaaaaaatgctcagcatcactaaaaatcaattcttaaagcacccttcttwtaaggaattccaggcagaacgcagagttagtattgcagtttttagttggaaaagctggttaatataacagaagtaataaaccagtcctctatttgtgtttattgacagttgcaatttaattttgacattgaatttatagactatttaatatatttgagtgcacatggactgtagtggaacagtcattcctgaggtggcctgacatctcattgatacctaatacagatgactctgctctaaaagttttattttcctccagaaacattgtacacagtagatgaccatgtccttcaaatactgtggcagctccattagtgttccgagaagattgtgaggtcttatgacctgttgtatttgagtgaagctttggaaaagatgagaattctaccggaaatgcttaaggactaataactgtaatttcctgagttatactagtcaatttgatcaaaattccttttgatctgtgggcaaatggttctataaaattttttactttttgtgcttttcagactcattttgcttcctgttgatttttggctttacaagttagcaattctggttgcaaagtttattattctgaatgctsatcatcaacttgrgaacctgcttccaaatacaagtgtaagacagtatcatgcttacaatgtattgatatctgattacatttttggtgaaagggaagatgtggacaaaatggcctcttaaaatggtgacagaattcaaggctcttttctatgaaattgactggaaatattacagataaagatatctttgcttctgattgtgaatgctgtatacaagattcatgatagaatcagttattggaggtagaaraatcttaaatccccattacatgttcttcactagatagaagtcatgttctagaaacaggattttagataatgattacctctggcacatccaatgtatattacrttgtcaacgattgatgttaatgtcgatggctgcttgtaatcaggcagaatgctcagatttgggattgtttcaaaagaactctaattactaaattccattagcagtttgggcagcctgggaaatcaaagtaattgatagcagcttttctgaagatctgtgcagcattagtacgaagaaaacctgttagcttggcaggacagtataaagcttagggaagaatttatagttggtagttaaaagggcctttcagataccaattattttatatactcagtaatctttttggcttttatacactattactrtatgactaaggtggtaaatcaatgtgtgcaccgtaagagtaagaacttgtttgattcgaaaagtatggatcttttatttcagcaaacacctttagcrcctacttgtgcagaccatcgtgcacagttgacgcatgtgatgaatcagtcataatcctggcccagtaggattttacactgcagctaggtagtttatccaattggataaagaagtagaatgtaatgaaagtattctgaggaggatagaagcaagcattttattgggaattatatacttcaatttcaattttaattttctgccattttctctgacatgctattcagtcattatacttttaaaacataataattattctarattctgtgacaaaattcagatttaattctaacattgtttaaagcacatgtcccaaattagatatggcttatatgaaatacatcatttttttaaacagctaattgctttctatatcagaaactgttattacaacattttaatgcctgactgcagcattgcgtgtcgtaggctaccagactttaatgaagaattttaaaatgttgactaaaagaaaattattcaatattttggtctgctgaaacttttatcaattaattaacattaatttaaatgtaaagcatcattcctttaaatatatatatgttgtgtattcagtcttctgcaattgactcttttaaaaatacgaacttgttttgtacatagttaaaacaaaaatgtatgaagagaggaataaaatctttggggaaaacatgctacagttaataatatatagcagctgtaaaacctgtgtagtgatttgtaggtaattagcaaaaggactaacagaccatatggtcaagcattatgtattagttatttttccacatgcaaaaataatgttataaaattggactttccttaattaactcagcattgaaacttagatttatgcattctagtctataaataactaaaatataatttgtaagtatctcaacactttgggatattttagattgtggtttaatctatgtatgaaaggcatagcaaaagcattttcttgtatatgaattggggcagtagggaacccctgaaatgtcagattattcatttttcattcattatggatcattatccagattaatgctgaaataattagttttaaattagtctttggtagtgattcccagcatggagttttcacataataaaataattgtaaaatagtacgagacattattttagtacagtttccttatagaaatagggaaccttattaaccttcactgggttaaggttaaactctagtgaggattaatgtaggtaacattactttgaaccatattcctgtatctttggcaaaatgaaaagctattgttcattaaagcattcattagaccttatatataagaatacacttatggttgagctagtgcttgaaaataatgcaatcattccaggttaactttttgttattatwcaataattaccatgcactctgaatattttttttcttgtcttatctgccaagaatcactttctcattcaatatgggagctctgccattttcactacttgattcctaatgctgttggaacatatgatttgtctcctatttcacatagagatcttcacttctgagatattccaattttaataaacctttctactccatcatttcctgactatggattagggatactgatacctacttattggtaatatttagctaatttaggaaatgcatctgaaagtgtacagcaaaacatctggyacacattgaatgctcaaaaaagggtggcctcctttcttcatctccgaggttatttctgtcttactttgcctcacaattatagcttctatcattgatttcttaactggatccatctttaggtcatacagttatgtttaagttccctttaccttaattttcaactctaccttaccctcaaccaactgtccttgtttcctctgcgtcttcatcatcaaaactttcagaaacgaccttttttctctgccttatttcccattcctgatttcatgacagtctggcttctaaccccacaaactctcaaattttcctccaatgacttccttattgctacctctaaagactgttatagtccttatrtattttcttctgtcgacctcatgacattgtgtcctactccctgtagcccatgttcattggctctatcactcgagtgataccgagtggtttgatgtctccctttcctctgcttaggtctcttgttttcctgttctttcttttactgctatatcctatacagtggcatcttagactcttgacctggcctcaactacaacctgtcctgtgatgactcttgacatctctcctagtattcaaaactgcccactgatcatctctagttgctccattgttattggttaatatgcccaaacagttccttaagttataaattcttaaaagttattgcagattcttgtgtctctccacctatttgtttcgccacaccattgtgtatggtgataatttcttcacctgcgttcaccctgcctaactgccccattttacccttcwtcatctctcacctcagtcattatagttgcttattaactaatctcttggtcaccagtctccctcrcctccaactccagttaccttccttaaataaagaaaaagaaattgatcctaccagtctcctgtttacragccactgataactcctcattacctataaaataaactccaaagtaggcagcgtagagctcttcacaatctggggaaataatttctatacaaaatcatttcctatgacaaacattgagttgatagtaaatatttytgaataacctcttaaaacatcttccaggtcattgaatgccctctattctgggtgaagccatcacagactgtttcctgaatgtgctttcttttcacctctgcactattatgtatggtagattcttcataaggaaggaccttgcatccttcaagacagagcccaagtatcaagccctcttagaaattgtccatcattttcagggcatagttagttactccctccttgaagttcagtttgagatgataggattatgtggttgcatctcagtctccagcactgcattgaattctgtagaacagagactttgccttgtttatcctgatgttggattccctccaggacatactacgtttaaaacattggtaattatctgctatttgaagcttcttcagcttgttcaaaatttgaatggtcagttactttcaagttttcattttaaaatgaatattttattgaatataatgcagttaaagacatgtgaagggactatattttaatcatcttatgctcagttaaatttttttttttttttggagacagagtctcgctgtgttgtccaggctggagtgcagtggcatgatcttggctcactgcaacctccacctcccgctttcaagcaattctcctgccycagcctccaaagtagctgggattacaggcgcccactaccaggcccagctatttttttgtatttttagtagagagggcttcaccacgttggccaggctgattttgaactcctgacctcaagtgatccaccctccgcggctttccaaagtgctagattacaggcctgagccaccatacccggcctgagccaccatatccagatagtttttttaaatattataaagtattctgtttctttcatctgtgaaatgtaagagtagtaatttataaatgaaagttcttcctctatgattaattcgagagtcattctcaagggcacagtgtcttcctttgaggggaaaagctttttggaagtgmaagtattatgctgtccctgagaggtcttgtgttttgcaaatatagcacagtcattctctacctttcaaatggaaacattacacaaatgcattagaaaatgtttttgtttaaaacatcacatttgttttgtcatgaaagaacataacagtggtaaattccccatccagcatgcaaaaaccagattaaccccaaatctaccagaaatattgcactaatcaatgattgcacttaacctaagtatcattttgtgaggcaggggaatggttctgatttggttgccagcgatacctattgtatttggcagcatatgtggggattttcctagtctctacccagttgtaaataagtcattcattagtcaagatatgtcgagttagcgtaagtcaaggtctgcctgaactgtgatatattttatctgttaaagaaagcagactgaagtctttcttgcaaattcatgctaatgaagtaactggagtaactttcctagtgctttgtttatttgtcttactttcttcatggggatgtagagatcataatttttcagaaaggaactatgagatgtgtattaattttcaggtttttgcaactagataaattttatataagttttagatatgtttttgcamacataagtttatatatatatacacacacacacacatatatatacatgatacacacacatacataaatacatatacacacacacatgcaaatggtggtgaagtagtgtggagaaagacaataagggagggagatacagagtagaaaaaaagaggaagggactcatttacaatttgaaatggatggttaagtcttaatgagaaagtgacattgagtaaaccctgaagacacttgccttctcatcttaggttcctgaacatgagcactggctgccatgccgccatgtaaactaaggctagacaagaccaagttcagcatcacccatccccatgttaaagtcactgagtgaaaaggcatgtttggaaatgaaaactgtttataaacctacactagatagacatcagtcctcactttaacgtcatccttcatctggtactaagcattgtatcagtgaggattgtctgagctgcagtgataattgatccaggggcttcaacaacactgatttattcctcrctcagttacacgctcatcgtgagtttgcagtggcacggctgaagttgccctcactccacgacagaagctgatggagctggttctatctggagcacgttcagccttatgacagagagaagagacatcacagtgatttcatctaattccatttcattggccaaagcaagtcacttatgcaagagccttacctgagtgargaagggaaatagagccttcccagaaggaagggcatagtaggaagtggtagcagatggttgaaacactaattgtattttcctcacttaggtatttaattttatttcccttcaagctccaatatatgttattttccacttcagttacacagatgtcctcttgttaccacatccctgctgtgttctcttcttgaaaatctgtccttgctgggcatggtgtctcacacctgtaatcccagcactttgggaggctaaggcaggaggagcccttgaggccaggagttcaagaggagaccctgtctctacaaaaaaccgaacaaacaaaaatgtttgtgttttctctaccgctggtgtgttagctgtcttcctcctatagattgtttgaatcccaagagtcttttaagatgcagctaagtaacatttttccttttcctttacagttaatctgcttaaatacttcaagctgtacaagtctgctgtggaagtgagcaccacacaatgtggcttcagcttccgatgtgatttctatttgaactccgatattagaaaccatgtcttagacctcccatgcagctctcaaagtgctttgcattgytgtggttacatggaaatgttaaacaaatgagttaatggaataatttttatttaattgtttttaataaatattcatgaaaaatgtatctatacttgtaaattttaaatatgagacacagattgttctcctcacgtaacagaagagtagatttcagtttttggtttttgtttttttttttttgtggagacagagtctcactctgttgcccaggctggagtgcagtggcatgatcccagctcactgcaacctccgcctcctgggttcaagcgattctcctgcctcagcctcccgagtagctgggactacagggatgcggcaccatgcccagttaattttgtatatttagtagagacagggtttcaccatgttagccaggctgatctcgacctcccgacctcaggtgatccgcccacctcggcctcccaaagtgctgggattacaggtgtgagmcaccatgcctggcagatttcagttttgtttgagaaaaacggtgtctttgtggtatctcaggaccctgaatgaagctaggctgtgaagcatctctgcccccaccttcagccttctcaagcaaaacaactgtacttcagtttttttatatatgtgtaggtatgtgggtttctataagcttttatttgataattaggttattctaccaaaatttttaaaatcactgttttaaaataaaaatagagagggccttactagatgtacattttatatgacagttcttttgactgccatgacctgttggacaacagccttaagatttaagacaaatgaagcaggagataggttgtgttttaaaattagcttgatctttgaagctgagggctacttttcttcggccagtctctagctttggtgaactctccttgggaaaatgatttatctctattctcattggaaaataaccttattttattttaatatactgctgtccttttgggcctatgttgctttcataagtttggaaataaaacgaaatattatttagtgtcagaaagctcaaacgaactttaaattctggagcgtttaatgtagcaatgtgtgcagataatagcaacattcatctaagtgatcactgatttcagaaatcctttaaaaagtgtcatcaattctctgaaattaagaaaaaaagccaatttttaaaataagatctctatattggaaactttattcttcacacataaattattccctacatgaatcattctcaaaatgtattctctcaaaaataaaaccgagtgaattctgttatcagcatgaggcatttatgacccgaagaagctaacgaacaagatccaaaaaaaagaggttgaggctgaagcctaatgacygggtttccagtttaagtcagcaggttcaacacactagcttaattctcttttctcatatggtagcattaaaacaatggaaaaggttttttttgtttgtttttgttttctgttttgttttgtttctctgaagtgaaatcctacattgagcattggggaaaagtgggaaaggtgttcaggagggcggttcataaagcatttcacgtgtaaaaaagggaggttcataaagcatttcacgtgtaaaataaaacttgtctgtcttggcaggcatgggtgtcaccagcctgcctgcctgcttttcygctcatgaaacccacagaatgttctgagtgttgacatgtctttcattccaggaagaagccttttgggatcatgtatttcacagtgcagatgaaacaatatgaattacccatacaaatcaatgtcatttttcacttagaaaagtaactaggattatcagatccaagaatcatcaatcagatatttagggraaaactgtatttagaagaatgaaaagggcaaccgataccagaagattcatgtacaattcagggattaccagaaacttttaaaaaggtgtctaattaataccctcagcagaatttgagaggaaggccaggcacggtggctcacccctataatcctagcactttgaaaggccaaggtgggcagatgacctgaggcgaggtgttggagaccaacctggccaacattgcaaaaccccgtctctactaaaaatgcaaaaattcgcctggggagcagagcgagactctgctaccaaaaaaaaacaaaaaaaaaaamaaacagaatttgaaaggaaataatagctgtaaaggctgttatgaaaaaggaacaatcaaaacaagaaatttccaggaaattaaaagtatgattatcacagtaaaaatgtattaaaccaaataatggaaagggaactgttgatgcctaaacatgtttttttcttcaacttaaagtgaagattaggctgggtgcggtggctcaagcctgtaatcccagcactttgtgaggctgaggagggcgaatcacttgaggttaggagttcaagacaagcctggccaacatggtgaagccccgtctctactaaaaaatacaattagctaggcgtggtggcatatacctgtagtcccagctccttggaaggctgagacaggagaatcaattgaacccggagatggaggctgcagtaagccgagatggtgccactgccctccagcctgggccacagagcaagactctgtctcagtaaataaaaaataaataaataaattgaagattaactctgaacacttaaaacagaaagataaggaaatggaacattaaagagttaggggcaatagtgaatagagtcagtaggtccaacatctgattaatacaaaataataagacaatgaaaggcagaaaatraagtttcatgacaacattttataagctcaagaaatagtctatgtcaattaacmtttgttatgtaacacatgacttcaaaacttagtgatttaaaacaaagaccattcatttagcttgtgtctgattcggctggttgattcttctgatgtgggcagtgtggctgtttccacctgaactgactcatgtttctctggtcagtggaagattggctgggattagctcatagaaggtgaactcacatgccgttatctgtgatctttgtggtgatgggaggagctgagccatgtgtctttcatcaccctgctaacctcgacttgttctcttggcagcaggattcctaagagcagcaggagtgcaatttccaaggcaggggcattttcaagtcgctacttactttcctttagtactgtcccatgggccaaagcaaattatgtggccaaacccagagaacccgggaagggctcttccaaagctaggcacaaattggggccattgctgctctcaatttaccataggcatcaatagacagatgtaaaagtctggcaagygggctggatcaaagctgrhtatgtggagatatcttgatgaaatttcaaaataaagaagatgccacaagcttccaatgagactaaaatagattgtctgcaaaggaatgaaaaccaggctaacattatgttttccatcaacaacactggatccgagaagctatcaaagcagtgtcttcaaagacctgagagaaaattaatttaaatatagaattctattcccaacttttaatcatacacaccggaaatacaaagattggtaaaaaatatatatctgggcacagtggctcatgcctgtcatcccaacactttggaaggctaaggcaggaggattgcttaatgccaggagttggaggccagcctgaacaacatagaaagaccccatctttattaaaaattaaaaagaatatctatatgcaaatgtgttgggtgttaacccaaaaaaaatgagtaaaaggatgatatacaggaraagtgatagctgaatataaattaaagggaaaactgaaactaaatggagaactaaaagggaataaaaagataatacatgaaggcctgaaactttcaaaactctttcttatgcagcagcacattagtgttggatgaaaatcccttccctaaggatctaattacactactwcattttgcaatgaatagtattcagtagtcataatgctagaaatgttgcttatgttgagttttaatttttagaatcaaattttacacaaagcattggagactaaattattctcttgatgttagaaaaaaaataatgtaattaacaataaccagaaggtggcagaacacggaaaaagtggaatcaagtgtctacgcagcagttcctcattttcactgaaaaagatgttgacttaaggttgataagtcarcaagacagcttaaatatatattacttgaagttataaatgataacctgttgaggagmtaaaagtaaaatacaaatgccagaagtcaggaggtagaataggaaagaaggagggaatgggtataacatccctcaattctttatcttccatagaagacaagcagaatgcacgtgcaaagcagttnagaaataatatgtatttgatatattttggtatgtctaatatgtatttaagcatatcarattgcaatgtcatgtatgttaatgcatgtgcaaatattacctttctgtttataaaaaatattgtgagagagaagataccctcattaactrataaagtgcattgtagaatatgtataaaatggaaactgtccattcgtcagaatgaatgaggcctttatcaaagatgtccatcatacattgcttagtgaaaaaagcagcagaacagtaagaatagaagtatgatttattcaacatgcttcagtcggcctgcttgcctatctgcggtaktgtgtgtgtgtgtgtgtgtgtgagtggaaaaagtgaaaggatagataccaacacttctgtattattactttttatacaactgttatatttgtaagtaaaatattctaagaacacaaaaatgtccagattcagtcaggttcatttcccgtgcaatctggtagtggcaccaatacgcatgtgttaaagtcataattttcctttttaatgcgaatcattagttaagaggctgtctacatattttccatttaaaccagctctttggagaatgagatccccatgctaytgtacactagctaaagtagtaaacgcatagttttccagcactttgggaggccgaggcgggcggattgcgaggtcaagagatggagaccrtcctagccaacatggtgaaaccccatctctactaaaaaaaaaaattaaaaattagccgggtgtggtggtgcatgcctgtagtcccagctactcgggaggccgaggcaggagaatcgcttgaacctgggaggcagaggttgcagtgagcagagatctcaccactgcactccagcctggcgacagagagasactccatctcaaaaaaaaaaaaaaaaaggaaaaatactggattagatatgtttaaggttcattttgcttgaggcactatttcaagagtctaaaagagtttcaccttcattttgaagtttgttttgtaaagttattatagtcatttatgtggcagtaaatcaakccttattggtatactaaaatctaggtattatagatgctagtgtcactatgcagagaatcctgtactttttaagaagttggagtcatccagctgttccttactctgatgccctgagagagtatggctctcttactgcgaaygcatttcggacacaatgtgttgctcgagtattggtttttctctacacatgtaatatccccaaagcctaaaacaagatgtttatctttttgatagacaagcaattaacttttgggggggagtttcaaggcartaaagcccatctgttaggacactggaaataaataggaatttctgacagaagaacattatggcctttcatttgttatgctgtagctaaagctctgtcagcatttttattataaacctaggggattatcagtctgcartaaaactctttttggactgaggcttatttagattcagagcgtactcacgaagaaaacctttactttcctgaacacgggatagatttgtttctgcttgcctttctaaaggagaaatgtgtctgggatttccatataattgtataaatttataaaatatttgatttattataaacagagtcattggtgatcacagtacattatttcctataaaggcagtgtagaaactggttggcagcatagttaccaagtagcgcttaaaatagttgtttatttctaagtcatacagtagtaggattttggcagttgccagatagctcaccattatccatgcattgataagattgaatacacacttcataagaccctttccttaaaatattgaaatttgagtggctgatcctgaatatcattcctattctgaaatgtgctccaaacagttttaaaaaatgayttcagtttcagacagaaagaggcatgtaatagtaatttatttttattcacatgaaagtataaagacactaaagaaagaataatgtttaacactaacagcatgggtttaaaccctcagtctaccacttatcagctgccrtcctgggaaaattccttcaaatctctgcacctcaggttcctagggaagaataaatactgataatgattattcttgtgttactggggctgctctgagttttaaatgcactaatacrttgaaaccccttaggaaagtgcctgaatatagtaagtgctcaataaactttaagtagtattagtactcctggtagtactattacttgttagttattactrtggttttatatttcatcataggaccataacaaaaaaaaattatttttcagataaaaattatactaagtgaaataagtcaggcacagaaagacagataactgcataatttcacttgtatgtggaatctaaaaatgctgaaatcatagaagcagaggctggagtggaaggaaatagggagatgttggtcaaagggtacaaagttctagctagctagacagaaggaataattgcatgggatgctgatcatagttaataatgtattatatggccaggcatggtgactcatgcctgtaatcccagcactgtgggaggccaaagcaggcagatcacttgaggtcrggagttcaagaccagcctggccaacatggtgaaaccctgtctctaccaaaaatacaaaaattagccaggygtgctggcaggtgcctgtaatcccagctacttgggcggctgaggtgggagaatagcttgaacctgggaagtgtttgttgcagtgagcccagatcacaccactgcacttcaggctgggtgacagagtgtgactccgtctcaaaaaataatattaatcataatgtattatatatttctaaactgctaaaagaatagattttaaatattctcacaacaaaaaatggtaagtagggtgaggtgatgcatatgctaattagcttgatttaatctttctacaatgtatacatatatcaaaatatcacattgtacccataattatgtacaattattatcaattaaaaattttaagatctaacttaaaatgccatgacattaaataataatttttaagaaatcattcttactgcttaacaatgcaagtgttacctgatcactgcagttgatcartttcagaaaacatgtaatatttattcctgtggaataaatactttgtttttaagtgtgagaattctgtcttcctaggagcttcatttaaaagtcttattcctgctgatgttgctgactttaaaagagcatttctcgattatattgcgaagtatagcaaaggaaaagtactgttacataatgtatatgtcaagatgtatcagaatagtgttatattatgtaaggctttctcctgcttcaattcagaggagtagcaattttgtgctgtacaaataaattgattgatagaagatagcaagaaaaagccataccattgctcagatatgcttggctatataccatttcacctttataatacaagaaggatacagtttcagtgtaaaaactgtgtagtgagttatattacgggggggtatcattgtatagagtgtcatgcaacaattatatgcttaccactggaaggcagtgtaagttttattctttttataaataatatttatggcatttaatggggtaattacagtgatagcaacggggtggggcagaagttgtgcacattgctaagtctatttattcagcaaggattgattgacttaatattgtgtgccaaggtgtgttagatgctagagatagaaataagaataaagtasgcaagytcccttgtccccagcgggcttactatcaagcaaataaatactctaccatgaactactatgggataatgcacaaagtcttcagaaggcagtggggtcaggggtagtgtccagaggatatgggtaaatgggccttaaataaaagagggaaaccctattctgtctcttaaatgaaggagagaaggatacatttggatacmctaatatttataggtttaagagccatgagttaggaggttcctgggtgayagctcatggttttgaatatacgggtatagaattgttttacttccaaattggcaataatacataatgtttatgagagcatcttcttggtttaggactaaagaatgattaccttggttaaatattaatttatatactctgccaatgtggataacaggtgatcagtaagtccttctgaatgagtgactgaaagagtgtgtgagtgaatgaacaaaactttttacccacatgtcccctgacaagtagggttttgcaagtcgttcttcgtccctctcttctatcctgtcctgattttacaytgtatttttcagttcctgtaaagcagatctcaatgctggcacatttgataattaattaatggtggaataagaggaggtgttagctattaatactgtcctttacagatggcacatgcaattaaacatcagttttagggaaacaaaactctaacccgaagaagagttgctaggagacttttgaccttgctggggtggcatgtgcattgcatcagagaccttctgtgctccttccagtcactctgcatctgtgagtgcctgccaagggtgtmcataggtctgtgtgcaggtctaaaaaaaaaatccatctcatggaaattgaggaagttaaatttgagatggtatcttgaactacatagcaggtatactgctgagtatatagctgaaattttgggtgaatgtgaaatgtaccagtataacatttataatattatgtggcaactgtaacttgtcagagaagcactagtgaacattatcaaaaaaaataagccaaaacatagaactgactcaccaaaaattgttaattgtatgcttaggttgcgtaattttctaagtcacakgttggtgggaaattttttttgatatgggctgacaaagcacaataaacttggagacaaaataaattgtactattgctacttaaggtatgtgctcatattttgcaataagcacatttttattgtttttaatcctctcattaagacataatgatcttcttccagctgaggtgtctaattactgtcatatccaatcacctgttaattggtgagaataaagcaaaaagccaccatggacacatcttgactgtgtgttctattctcaatgcatagaaatggattagacatagagtaattgttatttacagtgtggagcattgcctataatctttgcttttcaaaatataaacagtagcaaaaccaactaaactgtgtatatggctctttctatgctagttatctttcagtttcttttttaaaaaaatacagacttgagwtttcatcaattagagttcacaaatctggaaaatagataagttgtttttgtagattcaaaacttcataggcaaagctcagatacgtgttgtggcctagtagagtctagtgcctaaccttcctttcccttcgtgaacatttatttgatttagaccacagggcatccttaaaaatatttttatgttttaaaaattcatgtacatatttgacatttatatatttgaggtgtaatgcaaatttaaaggcacacattaaatatattcagggttctagagcttttgaaatttkatgcacaaatatattgaagtgtatgtataagttaacatatataaattattttacaagggcaatgaaaatattttttagagagacactaaaatggcatgtaaagcagacaatgtkrccctttgcctgrttttgcacttacaggtttatggcacaaaacttccycctcatgacttacccttctcatttatgccattgccaccgccatctcctgagtccctagaggcactcaggtaactcacctagtaactaactrggtgatttaattaattaaaaagttcagatatctcttacatgtttaggaggtgttagtttatgattaaaatattactataggagaagacaaaagtaatattgtcagaatcatttgactcctacaaatacagtatttataaatgcaagaaataatttacagaatacataatcagaattcttaaataattgtcatttattccactagtcctgctaacctcaggacttttctcttctttttgtttcttcatattagctgtatatttcctggaaccytctcagtgattgcaacagtacctgttcttttaagatcttgacctttttggtagtgactcttcaagctaagcaatacacatttatttctgagataatgactgyattagttatatggtgtttttatttttgttactcctatttcttaaatcttcatgcttggtcatcttgcgtttcagtctgtaaggcattttatcagccattctgtttacaatggatacctactcaggaaggatgactttcaaaatttgtgtatattttttcatttttttcttaggggagttctctttatgtacattgaaaaactaaaggattgtaattgttggtgaagaggtagaagcatttgctgcaaaatgagttatttatcttcaagcttacagtaaactgcaatgagagttcagctgtcttggttatactctacaggcagctcaccgttaaacaactgcacctgtggctgcctgtaaagtgacgtagtgagtttgaaacacaacagaggcatttttctagaattattacaaatctatggtttgtcaacaagataatatgagtcaaactgattgtaatacaggattgaaatttatctcattgggtattacacaaattcccttaaattaaaaaatcaagacttattctctattccctaaaaaacaggtttactttggttggttggttaaagctgctgttattcattctctctcttaatttaatgtcagtgcttctaagtgcaaggaatatcttatcatcatggctgaaccttgagttttggagttggatatcctgcagctttagtccaaatgctacaaactgagagaccatggggaagttattttatatttctaaattgcattttattaatctgtaaagtggaaataataatgatagtatctccctcataggcaacatgtcaggattaattggtatgtcttgttggtattaattttagtcttttaaaccaatatttgrtagtaacaaaatttcagggttagtggaaattttaaacattttacttccaaggggttataggttggtgggaagagactagttgcaaacctacaattgaatgatccagtagtataaaaatgtgtgagcagcaaggtgccctctgtgggccagaagcaggtgcagcctctctcctggaagctgcaccctccctagggagctccaggagcacgatttttcaccacttagggctgcgtctggaaagcgtaactctggggacactgtaaccattttatgccttgtcctttcatcatcatcctggaagaacttatgctgttgatgtgtatgcttcagtttaaggcaacrttttggtttggttttgttttttgctgtttttttttttttttttttgagatggagtttcactcttgttgctcaggctggagtgcaatggcgcgatctcggctcactgcatctggtccctaggaccaaacagagcctcagcaagtcagcatcttaacttgtcgagagaaatctggttcaataccrcgatgtctctgcccctggtttccactgcgctagaaagctattttccccagtgttaacatgtctaaaccttcgtccggcctgatcccttccaagatgaggaacctcaacattccatcctaggacagccctgactagatggtcttttgaattgaaatttgttttcccgtggcttccacactttggtcctggttctattatggaggttctgtttaagttctattattataaataatttgtatcatttcttttttttttttttttttttgagatggagtctcactctgtctccgaggctggagtgcagtggcgcgatctcagctcactgcaagctccgcctcccgggttcacgccattctcctgcctcagcctcccgagtagctgggactacaggcgcccgccaccacrcccagctaatttttttttttttcgtatttttagtagagacggggtttcaccgtgttagccaggatgrtctcgatctcctgaccttatgatacgcccgccttggcctcccaaagtgctgggattacaggcgtgagccaccacgccccgctgtatcatttctttatatacactccttcaagtatttgaagattttcacactcttgtcataactaagtatctttttctgcacatttagatttattaatcgcttcacttgtacaacaaacatttaccttgagtctactgcatacttggtattgatgacaaaactaagatgtggtcagtccctgacctcaggaaacttctcaagtggaactggacctttctcagtgtgacacacacctcacatgaaattattttaacaatccaccatcatcctggcacttttcttgtaaatgtccctcagtgtgtgtgtccttcttgaaatacaatgcccttgtactggaggtgtgatgtgatagtgtagggtaggttagcggctccttccttctgagtgtaatgcacccttgatacacctgtgataatatttactctgtgaatggttataagctgttgatttgtatggaagctgttgtcagttaataccaaatctccttagttctgctagttgtatgttgtttttcgaaactctagcacagttacttctattaaacttcagcttaataagatcagcacattgtagcaatctgaattttgtattcttattctatcatccaaatatttgaaaagcaataagctactttaatttatccattcattgatatacattgaagagaacaaggctcgagaaacccctgtagcaaaagcagagccctcccttaatatttctttctttattaattctatatatggtactagcagtctttaatatttatttacttaagcaattgtatagttcctttgccaatagatattacgaaaggattcaacacattatttctccagtgaggcctattcttcacaatcagttctgatatacaaaaaataaaatctatttcttagggaaataaatctaaagataattatgattctcctgtatgctaagtatatatttctactcattatacttatgtaggatgcatgtgatattgttacaactttattctaattgcatatttttgtcattgaacctatgtacatatcatgatttttaaaaaatgttaccttagtcaaaatttatcataaaatctcgaatgaattaaggattcctgctatagagatgtaaatgggagcaatttgaatatagccccttgttcttttagaaataaaaatgctaacatgaaatattgctaatctagatagcaatataatctgttttgaaaatttactattattttgctgttactggttacatcttcttgtaaattgagagaaagctttttgtgagggcatcaaatgccttaggatacttttcactttgcaaacccatcttactttgttgctatggttactattataccacaagaaatccttcatttgtgtataaatggttttatagtttaacgttacttgttaatattrtacaatatgtgagcctggtgaggaatcgtagcaggacatggttgcttccatgttggaatagtgacctctaacagcgtagcagcacattcgttataaacttattagcgagtaagatttctagagctatttttacaaataaaatcctgcttaggacagaaccatagcatgtggtgaagagcctagattttggaggcagtcctcctgaggtctgatcctgcctctaccactaaccaactgtgtgaccttggatgatttacataccctctctgggtctcagttttgtcgtcactaaatggggacaacagtgcttagcacacagggttgttgtgaagaagrgttgagttcatatttgcagagcatttataacagtacctgacagagtacatgctatgtaaatatgagctttgttgttgttgtaagagcgttctttctcttacatttcatccatctcaaatgatttcaaaacatacatgaaatkgtaagaattttcaaagtatcactatggaaaatgcaatttaaattacttttgttccaaaacgtatccatgtaattaatgtataatcgccctaatgttgttttttacttaatgtctgtgttatgcgtttaagaacgcttagttgtgatatgtcacagctgcctaccatttattctgtcttagggtattgccagaatcactggtactaacctagtgaaatagattacacaaagataaataagatttctgtggcaataaaatcattgtagagcattagttttattttgtttaatgtattttatgtgttttaaatatagtagtcaattttcataaagaataatgtaaatttaaaaataagaatttaaatatccaaagtttgtgttgaagcttggctaaaatgttgattttgatcctacaataatgagagattacctaaaaaggcagtttgaggccaatgcacagtcaatttgatatcagtgttagtgatatttgactttcaggacaatgaagaatcataactataggagtaaatttagcatcgtaagtaaaataaactctttttaccttttaaaagccacaaactcctcttctgattataaactatatgaagttgctattcttttctgtttaatttctaatttataaaaatatttttgagtcaaatgtccagtttaattcccactttcgtgggttacttcttcaggtctgcagtgaatcagtctaaggcgaggtcaggaagagatggaatatcagaaacctttgtggtctgggtaccaaaagacttgagctcaagttagtcctgcccctttcctaaatkcatgaccctgagaaggtcagttaagctccctgggcctgcactttatcttctgtacatgaaaggggtttgatgaggttgcctttatgtttctttctagcttctttttctcttctatctggaagttggtcctctttgtgaagaagctgagatggtggtgcagaaccagtgcttgctgccagcacactgtctcttctcaggaagagagcctcactggcagagaggcgaggcctttgctcatccactcccaggaaacgtggagactttctcccctgtgctactgacccatgccccagtagataccctcctgtcccatgccccagtagataccctcctgtcccttcagtcctaaagggctgtgtactctcttctgaccacccacacatgttttgcatgatttttctactgagacttccactccataaccagcatgcctccctatgttcttaacttcctctcttattcttarctggatcctggctcacatctgaggtttcccatttcctggaagtgtcccttcragtcaygaatgtttacattctcatccaactaacccagggccaagaattgggattggtgacatttttactctgaatttctgcttcttgactatttgtcctttaaccttttgcaaaacatgatcatttgaggtttatgtcattcaagttttagtctcctgtgtcatcaccacattctttcttgctcacagaagagttgacaccttgtttgtaatctctgtctatactcgaacctctcccattatcctgggagatttagcatccgacaccttgacctcccatcttctcactgcttcctttcctgtccttgagccacagggtcctacattaacgtcctgactttgtcggtatattcacctgttccagtgaacatactccagcttacgctttcaacccctgtcactgggactgttttgggactacattaggacctccagtctattgactcctgtattttctcccgatacgtcagtcttccctttttcttttctccacctgactccctggtccataacttcaataacaccattgtttatgctctgtgttagagtaggcctagaatctacctttgcttttcaatctttgcattgctgtcttctgtaaaaacacaaaacttggaakaacccaactatttggcctttcaacctgtgcagccacaagatgttggagaaagacgcccaagaggacaaattggctctatgttaatgtttgaacaccagcttcaaatgagctctcagcactgcttgtcccatctcttgctaggcatctctgatcagcttttcttcccagtcttcacaacaacagtttcatacctcttcccttctcttttccagactcctgctcagtcttggcagatgaactcttctcctactttacatgggaaatgaaaagtaacatatggaaactccctcatcttcctgataccaagcaaataaacctacctaaacccatccaagcttccttgcatcctaaggcaaatctcccactgrtgctttgctttgtatcccatcacttctagtttattaagaaagttaactctattgattatcctcccttttcttttatattcagcctcatcttatcagtgggatgttttccatgtgtttttaaacagacccaggtttcccccattwaaaaaaaaaactcatttaatttctctctctctttggaaacaaccctgactctcttcccaccttggcagtaacacctctggaatgggtaaagttgtgcttctggtctcacttgctttgtctccacctaatattagtatgttgtctaacctcttatctccacagtattcacttctaccaagtttaccagtgccacctgagcaacatccagcaccagcatcatccttcttcaggctttggtgacacaagctcttctacttttctggccatgtgttttcctgtcttttttggaagctcactagatggtctctcaccaatgtcatttatgtccatggcattcataactagcagtatccaaatgattcatgaatcaatctctagtctagacccagagatctctttgtgtctgtgacttctacatttggatgtctcaaaaggcacctcaaaccccacccgtgtaaaattaaaatcaggatctcttctcccacccacccactcccaagctgggtcttcttccagtgtttttgtttcaataaataaccgggctgggcaccatggctcacacctataatctcagcactttggtaggccarggtaggtgaatcacttgaggccaggagtttgagaccagcctggcctatatggtgaaaacctggctctactaaaaatacaaaaaatagccagccgtgatgacatatgcaatcccagctacttgggaggctgaggcaggagaatcacttgaacccaggaggcagaggttgcagtgaagcaaggttrcaccactgcaccccagccttggtgacagagtgagactgtctcaaaaaataataaataactatactgctcaactgttcacctgggaatctgccttgcaacttctctcttcctcatgtcaatatcaaatctatcaccaagtcctgtcagtttttcctcccatctgtgactctccatcttccccatcactatccctagtccaatcaatcatcttttcttgactgaactacagacagtccctggcttttacaatggtttgacttaacaagtttatgacctctcaatggtgtgaaagcaatacactttcagttcaaacgttacttcaagtacccatacagccatcctgtttttcactttcaatatcgtattcaataaattacataagatattcaatactttattataagataggatttgtgtgagataattttgaccaactgtgggctataatctaagcgctctaagcatgtttaaggtaggctgtgctaagctataatattttgtaagttatgtgtattaaattcactttcaacttagggtattttaaatttgtttattgggtttattgggatgtaaccctatcataggttaaggagcatctgtaattcagtgagaggcaaaagatgatagagtggttaatctacgaatttgtttgttcacatctattttgcttcttcttcaaacattctgttcattgtaggcamattgatctttttaaatgcaaatctaatcttggatgaaaggttttgctgtatggccttggaatctaagattaacaataaactttgaatctctgcatttgaattcagtggcattttggttacataaaatttttgtcactgaatatagtcaaattttatgagaaaatacatattagtctaaatagttggcttaaatatgaatacttaaaatagaagccattggcaaatttttgtctacttttatttctggcttaaggaacttaaaatttgtacactagacattgtaaaatgtttgtacaaggccacgtgatatgaatatatcattttgacatatttgttttctttttagctgtttatttgctgtttgggtataataaatcattaccctagtacttcacatatatgtctatataagtatacaggtaaacatttcttgctaaaagagctcttacactgtttctttaacttttacctgtggtaattggtttcttaatgaattatatcaacctattaaaaatcacttacacagttgtctttagtattttgagttcttagggtgttttgaattactgaatagacagactagaattttagttttaaattaatttatttaaattataccaaggaattgataccctgggttttctgggtttattttacctagttgatattgataaaatttcactgctrttggactctgtggttaaaataactcttaggcaagtaacattgtcrgtaatttgaataaattttctcttgggttttggggtaagggaattaatatgggaatcaatgtgggagaccaaaaatatattgagaagtaggatgaaagtagttagttaatcttctctattcttactggagctttccatttagtctatattttagccttcatattcagggttagaaaatttaactgaaaaaatcatctatacctggtctattatattaagctagaagtaaaggattctctatcacctataaaaggataatgaaaagatcacttttggcaagtgatatatactttatgattagaaatacatgcaagtaattttggagtatgaatcctcattttgcatatattctaacaaaaaaatagaaatctatgtggaaaatgacttaattttaagtaaaaggccaggttattgcatttatgtgaaatgaagtgaagtgctgcctgggtgaactgagcataacatgagtgtgaaaggacatatttcctaaccagttgcacttttgctggaggctgataaatagtggggtttcaaatcaatttcaccattgatctgaaagataatcctttttgtgacaatcttgtcctggggttttactgtcagaggtgaaaatgaatggcagggtctaagttaaaaaaaaaaaaaaaaaggagagagaaagaaacagggcctgtggggaaaaggctattgtttgtctgtcacacacgagctgacacaccagagacttcatatgtaggggatgagtgtgggggaaaaacatggacccagaaaagattttattttgttaatttctagaaatatgctctaaaatttatgaatcaatcaggtttcttattacatgtgggaacatatatggtagatgataatttggctggctttacgaagagtctgcagtgcttttccaatcaatattctgtgcttcatgctgtcttagccctggaaggcaaactgagtgggggaagctacaggggaaagcaaggtatttgacttggatggttttcattcagcacaggctgcraaacaaataaggattaccacaggtgcctcagagaatacccaaggggatcagtgctgagaccctttaaaacggtgctcagtgattctttttgaggtggaaattaagatagatttgccatttcttgccctgatttatgaaagcaggtacttgccatgtacaaggagtacatgaagctttactgttaagagaggaaaggttgctgtggtcagacaggtgcaattgctgcggtgcagtgtggtcctcaggtcgaactcacacacctgtctctgcattcaagtcaggcaacagagggaggtgttgacttggttaataactctgctgaaaagtgttcgtgagcctctgcttggtatccatcctcgcagtgttaaggatctgaacttcttttaaatgcctcatgaaactcctctgaaatatctgtcctctaaaatctgagtctgttggtggggtctggcagatctcccttaaatggttttctaacagtttaatcagcttccgcaggatccctttcagaaatgtgacagcccttcccatctgtggatggcacgtgcgggtggtttccagcgtgctctactctctcaagcagctcatgaattttatacatctcagtaaaaagaagatatgggaagttgctttggggaatttaaaacttttcttttgcaatttcaatgtttgatcattgttattcgtttcagtaaatttagaaaacargatactttagatgttatttttcagcatcgcttagagcagggacctgcatgtgttttggtaagggatacgtggtaaatattttcagctttgggggccgtaaggttctttgtcccatctactcaggtcagatgctctcatgcaaaggcagtcaaagacaacatgtaaatgaacgggtgggactgggttccagcacagctctacagaaaccaatagcaggctgcatctggtttgtaggctgtagtttgccaacctctggcttaggggaaaagctgaagagaaagcgagtatgtatttcctcaacttttttggtagttaaggcctgaggactatggctccagctgatgtcatttagtagcaaaatatgtaggaattcgcagactgttgttttttagttgttacctgccacttttagaggtatctctgcaaccttaataattcacaactgagaaatctgtcactcaacagtaatatactcagatagggaactcttccctgagttatacacaattcattcataagaaacaccccacgaaccaaaagaaaaaatcctttgttttgtgtgaaaactaaaagttggcataatagcaatgcatcctggagcttctggggtttgggagttggaccaaccctgtgcggtccttgtgatgggtaatgtcagccaagaaccccaggcggagaggatgtgacacacttagtatggttgccgtcctgcagcctcttactttctgcatcgccaagccaagaacaccaatttagctgcgaactttgttcccccattgctttctaaaaggccactctctgcttttgagacccattggtgctttgaggcttatattttaattttgaaaagagcttacctgattttcttatgattaaatacattttagtttgtttgcatgtgaaaatgttgtagaagacaggtaaaggaatagacatgggttttcactttctagcccacttctatgatagctcaggaccaacaacttctctaacccagatacctacaatggactcttaatgtgtctttgtgtctttttgttcctgctttgtcccacaccgctctgtgtccccactgcagtgagaatgatgattccaaatcacacatttgggctgccccaactcctcagtggctctttggagccttcacaacaaactcttaattctccaaaaccacatgcaagacacagygttctggcttcacccacctctgtggcctcccctcattaccctcaccttcaatgctgctctccactcctactgacttgatgcctccccttgcttcccagcttttaattcatgacactctgtttgcctgaaacattctgccttgtccatcccacaacccttacctgccttctcttctctcttctctccctctcaacgccacctcatctggctaaagcctttaggacccagggtgctcccagaggttgtttctccctggattcttttctgactctttgggactacgcggaggtgctctctcctgcasgctccctgggcaccatgcggggatacccgtcctagcatttatgacatggggatgtatgtgactgcctgctgtattagctgtaccacaccctctgctcttcaactacrgagtgaatagtttgtgtgttcctgtactcccaatccttggcacaaaatagatgtttgataaatatttgttgaataaatgagtcttcaggtgagaaaacacatgatagattggaacactgccttgtcaaaacttgcagtttgttaaagatacgataaattcataaatgacactgatggaatcacaattcttccctgaaaatctgataaatatgcaatatgtatagtaaaatctaggggtgtcttattaatattttctgagcattcaccctttaaatatactcctcatatataaaaatgtactcctcatatataaaaatgtactcctcatatataaaaatgtactgctcatatatgaaaagtacaattgttttttatataagatcctagctatacttcagaaaacattttaaattcattgtcttatgagagaaagttgggaagagggttcgaggaaagggaaacatggcccctctctaacctaaaagaaacgaaaacatatgtccacggaagtacttgtgcaagactgcccatcagcagcaagatagaggaacgaactaattatacacacaacaatggatgaacctcagaaatcatcatgcggagtaagagaagccttaaacaaatattacatactttatacttttatacatatgaatttctaaaacaaaacccatttaccgtggtttgaatgtgtccccchaaagttcatgttttggaaaccaaatccccaaattcatatattgactgtaggtgggacctttgggagggtaattaggattagataaggtcatcggggtggggccactatgatgggactggcggctttagaagaagagaggcccaagctgacgcgcatgcttttgccctcttgacatgtgtgcccttcaccatcttatgatgcagcaaaaaggccctcaccaggtgccgttgccttgttcttggacttctcagcttctagaactgggakcccaataaacttctgtaatttataatttacccagtctgcggtattgtgttatggcaacagaaaatgtactaagatactagctatgttatccattcttacgctactatraagaaatgtctgatactgggtaatttataaagaaaagaagtttaattggcttatggttctgcaagttgtacaggaagcatagaggcttctctttcttgggaggcctcaggaaacttacaattatggtggaaggcgaaggggaagcaggtgcatcttaaatggccatagcaggaggaagagtgagaagggggaggggctacacacttttaaacaatgagatctcacgataactcactcactrtcatgagaacaacactgagaggatggtgctaaaccattagaaactgcccccatgatctatgcacctcccatctggccccacttccaaaattggggattacatttcaacatgagatttgggtgatccaaatcacacggatccaaaccacatcaccatctgtgattaaaataaatcagaacagcgttttggggtatgggatctgacttagtactcttacgtatacacttaagagatgtaagtrtgtatgtccacaaaaagacttgtacaaaaatgttcacatcttctttattcatmatagccccaaattggaaacatctcatatgtccattaacaaaagaaagaataaacaatttgtggcacaatcaaatcatgggttattagtctgtaattaaaaaataaactactgatatgtacaataatatggttgaactcaaaaccytatgctggttgaaaggaactgaacacgagtataccacgtgatggcatgaagttaaggaataggccacaccacgttttggtgatagaagtcaggaaaggggttactgctgagagttagggaacgctgttactggaaagaggcacaaggaagctattggggtgatgaaagcattcatcttgatctgtgttgggatgagatgggtatataaatgtataaaagattattaggctgaacacttaggaattgtacattttgctgtacataaatgaaacatcaattaaaaatagattttaaaaattggttgttacctggcctggtatttggatacatggtttcttcaaggatgaatttattaactgaattaataattttaggactcttaggatttccacctttagaaactagtgaagtatatgctttgtaaatattctagaagacttttcatcatttctgttttgttgttactattgttgttgatggttgaaattaggcatcaagcataaaacagtgagcgtgaattctgcttcatatttacgctgacagagttctgcccatattctgattgacatcttcgggaagaatggccacgtgtgctgtcgtgtaccctgacgttttcacttgtgagcccatcttcacctgggctctgtcactgaataacccaygcagcctgccttgacaggatctttctccagcatgctttcgagtttgcctctgccgggcgtattatttggttgagactgctttttgttgttgttgttgttgttattttttctgtttaaggatgtctggacctgaaagtatgtcaatttgaaccccattctgttatctggaaagacatttttcttgcccagattctggacaaaagacacgcaaattcaacctgtcctgcttgtgaggtcgggtggactttcctggtccaccatcaaggccacagccttttgagggcacagctttcaagcctactggttgccgggactagccaatttaggggaagtgtcattatcttctgggttagctcttattttgtgtccactcattgtttcttaactgcctggggatttctttttataaatgacttcaacatttgaaaatgcttcttatcaccgagccagcttttctggtgttttgtagcaggaaggattacagtttaattgatcatatgtccagaaatggaaactggaaaagatttttacatttttaggatgtatactgggacctcataaaataatatgtgaaacttgcaaagctctttcagtataggagtagaaagggaaggagtgatacctacattcttgaacgtactgtaatttgtctggagggaagggcacatgattagtcctttggcctgcatttaatcatttaatatttaatcatttaattattctgcaattgctttttttttttttttttggtgacagaatctcactctttcacccaggttggagtgcagtggcgtgatgtcagctcactgcaacttccgtctccacgggtcaagcrattctcatgcctcagcctcccgagtaactgggattacaggcatgcactaccacacccagctaatttttgtatttttagtagagacagggcttcaccatgttggccaggctggtctcaaactcctggcctcaggttatccgcccgcctcgacctcccaaagttctgggtttacaggcttgagccaccgtgcccagccttgcaacaacttctttctatttcatgaacttcttaggcttcatattttctgttatttatagaactaattattatttacttgctattattatctttttcatcttccaaaagctcctctaaaatgtaagctccatgaggagcaatttttctgtgtttttcacttctgtattcacagttgtgagtgcctggcatgtactagaccctcagatcaaatattgttgaatggctggttgaaatagtatataaatgaataaaaatctggaaactcaagattttttctttcagtagattaagaaataaaaacgattgcataggagcctattttttcctgaaggggcccatatatttgttacttcaaatagtagacttccatgatatgattaaaacaatttctcagaaatttataagaaagttaaaatttaaaatgaaaatgctgatgcacaaatattacacttcctttggcaacacagatggtgattttgatctcagtggatgttggttaattcacagtgaaatgaattcatttccatcgtgattctattttaactcagataaaggctcgttaattttaattcagataaaaacttgttttttgtaaaataccattgaaaatgctcaatatattataattctagatgaaaattatgtctggatgaaaagagacagttgtaaaataatactagtcattatctaggaatgaattctattgcaggttatttttacctataatcacaggaataatgacagttcctttgtaacctgaaaggacttagtggaagtcaccctgtgggggaccaggccctggtttgttattatggagtttaacattgccacatattactgaatagtgatcaagattgtgcagagtaaaattgtatatgataaaagttcaatctakgtctgttgggagtaagaatcaagattggagggtgcatttcaaaacagataaatagcgtgtcagaaacattaggcatgaaacaattagacaaaactgtatttactgtattacaagcaaaattcatacaatatagacacataataagaaaggtcttcaaatatataatcacagcagagtcaaatctgtgaatcaaaactattctttatgtgcataattaaccatttcaaagaagagttgggaaaaatatttaaggatatgaaacagttatgccattttcaatgttcatttttaattccacctcgtaaaatacatctaaaatagtagaaaagtttaaagtctgttaaattatcctggagaataggaaaatagacgacttgccaggtttggcctaggagaaaatgcctagtagccctgtttatttttttccacatattctaaaaaaataaggaagcattgcctaactttcgtacatttcatataaatataaggtaacattgtatcttttgtccatttccatagaggttaagagaaaaaatcaagtttaaattaacacaaatactgtagtagcataaaagaaagcatgctttaatggttcgtttatttttagttactagaactagttcactaacatttcctaaagttagatttttgataactatttagacttgggaggagccctgcatttcttgaaggtcacgtgtgtctgaaacccggaactagtatagtgtctttctgcaccaatattctgtgaccctcttgtatgtaggaggtggcggggatcggattccccatgcatgaagcttcctttccttgggaagtcagtccctttctctgggcccctggtagaaataattcaccctttagcgccaggagaatctaagctttctctgctgtcctaattttaaaaccatgcctctcaatatgactgtagttaagattaaatgcctattgggttctatgaaaagggtagatttgggtagctattctaggatagtcagatacctgatttccaccattaatataaaatgtgtgcattttcttttatggtagaaaattcacactacaggaacattgatcatatgctttctgctttagtttctataaagaatgagtcacagagaagacaattgctttatttcaatgcctaggaagttattgcctttcaccttttgagcatctgtgttgcacacttaatggaaatacttgaaatataatattgatctacttatcaaattatagtaaatatgaagtaagaaacatcacatggtaacaattattcctttcactcaatggacatgattagcgagaaaataataaagaaatatttcgtatttgcagcctacctttaaagtattgaagcataattgtgaaacatttacaagttgctgagttgtcacttgtggaaatacaaaaaagaaaaagaaaaattgataaaccattgtcttatgatttcaaaaatttcacgggaagggggcagataataagtggttttatgcctataagttatttagaattccacatatttttaaaaggggrttttaatatgttgttatttgacctgctttgagatgtctacagtcttgacttcttgatatctttgtatcttgttacagtcttattattacaagcagtgttaggcaattaaatttggaatttttttttttcaccagatgtatctgagtttctacagcaaacttgttagaaattgtgaaggcattttggattaagttaaaagtatacattgtacaacttgattatgacattaatattcaatgagcttattttctttgctatgaagtatgaatctatttgtaaactttttatttattcattaacattagcattagtaactcaaatggagcctgttaaaagtaagtagacttgataatataggtgttattagaactctagttcagagaggaacacatgttcaaccttaactcctttactttttatctttggaaaagtgatttttatttacttttggattagcagtgaaattattatttctatttaaaaataacactaaaattattcaaatagagcaacactaaagatatttaaaaaaaaacaataactgtaattgttagagccaaacctcaagaaaaatcaggaacaagccaggcgcagtggctcacgcctgtaatcycagcactttgggaggctgcggcaggtggatcacctgaggtcaagggttcaagaccagcttggccaacatggagaaaacccgtctctactaaaaatacaaaaactagccgggtgtggtggcacatatctgtagtcccagctacttgggaggctgaggcaggaggattgcttgaacccgggaggcggaggttgcagtgagccaagattgcaccactgcactccaggttgggtgatagaaactcagtctcaaaaaaaaataaagaaaaaagaaaaagaaaaaaagaaaactcaggaacaattttttgttgccatgagggatatcatagttatgtttcaggtgattttcttttttgagacagaatctcgctctgttacccaggctggagtgcagtggcacgatctcagctccctgcaagctctgcctctcaggttcacgccattctcctgcctcagcctcccaagtagctgggactacaggcacccgccacagtgcccagctaattttttgtatttttagtagagatggggtttcaccgtgttagccaggatggtcttgatctcctgacctcgtgatctactcacctcagcctcccaaagtgctgggattacaggcgtgagccaccgcgcccagctcaggtgattttctgaaagattattcagagagaaaataagctctaagaaaggaagagcttaactatagcacaggaaaagcaaaggaagtatttctacataatatccaaaaaatatcatgttcagtcacatcaggaagtatttcaggctttgaccactgtactttttagaattaacatcataggaacaatttgagcatgtgaacattctgtaactaacagtgaacttggatgacatattcatttcattcatactaaattcctctaagtggtctagctaataaactagcctatgtaattcagttaccatgcaagtcatacatatttttttgttgcagaaatgtatatggagtgaacaatgaaagattttgaagaatcaaaatatattacaataaaatccaatagaagtagacttcaaacagaaaagaggaaggggaaggctgtaaaatgtccagacttttaaaaggaacttgttcatgtatttttraaattaataatagtggatatcatatcatgaattgagatccattggatatatttaggagattctaaaatgtttatttagaatttkcagtctttacatctaaactacatttttgtaattatttatatgtaagataaaatactgttaattgtacttaaagtatgcraagggcatgtgattttctcagaattgtttcatgaagaatttgagcaaaaaggtttaagactactcttccaaaggggtagttttttttttgtttgtttttgagagagtcttgccctgttgcccaggctggagtgcagtggtacaatctctgctgaccgcaacttccacctcctaggttcaagtgattctcctgcctcagcctccttagtagctgggattacaggcgcacgccaccacgctaggctaatttttcgtatttttagtagaggcgggcttttgccatgttggccaggctgggctcgaactcctgacctcaagtgatccactgccttggcctcccaaagtgttaggccaggcgtgagccaccgtgcctggcccaaaggagtgttttaatggttagattattctagaataaattatctagaaacacacttaacaaaagcgacattagccttttttaatatctaccaaaattttcctttctctgctaaaagctgttcctgtccctgccctatcctgactctcctttgggtgtgactgcccttgagtttgagccagttgcccttcctctgggcccgctggctcmtggtacacaccctttcatagcctcattatcttcatacatctagcccccagcaagcaacttgaaggcaagagatctggtccagaaacaaaataggccctttgtttgctgaacccagtggaaccgtattgtgagatttcagtgataaaccgtactgtgtaaagtccagagagatgatgccatagtttcacatgaggaatatataaataaagtttataagtttgatggaatggctttcattattgatattgatagattgttttccagatatgtagcattccaccaagggcttctcaggttcttttcaaaagcacaaaatagacgtgccatccagttgcatatgatcagtttatttcacctgtcattgattagtgaacctaaatttttctgtttctttcatatgcaaccagttgttctagaaagatgcccaattgccctcgatagctttgctgattgtacttgcctctgggtctttctgactttacttctatattcctgggctgtgctcttatacttcctaattaacccctaattctgtttcgtatataattgctttccacattcagacagtagaagagttaatgctttagctgacatcgtatccagcagcacttgtctctccttggtctggttgtcatcatttcgcgtagtgtccttctgtaaatggtccctgccttgcatgtctgtgattgttcagaggatttaaaggttatgtcctgtgggctttgtaatcgtgatgtgttagctgactttggaagtatctttgacatacattctgagatcgcattacatttcatccttttacagcttgtacaccacacattatttttttcttataataaagtatatttttaaaattaatgttgatccttttctatgtcccactcttttgatccttctgaatcttttaaaatttttgttgacatctacataaagctgttgtgtcaaggttgaagagaactagggtacctacttggttttatttctccatcaaataaccatatatccagtctgtggttatctaatgtacagggcaaaaagtgaacacacctcttttggttgtgtctgttttactctttgcagattctgaagcagtggtgtttggaagcaggcaggtgataagtcagtaggtacatgatgagcagttccaatactgatcggcacaatgctggactgtacaaatccccacagaacccaaatggggacaagtaaccagatattcatcataaagctgaatctgaagaggttgccagaaaatgcatccctgaaacaagtattcataaattgtgtttaatgagttcaaagataaatacatctaattggattataaatagcctacctattccacagagctgttacaagaatgaggtcctgggccagctgcagtggctcacacctgtaatctttgggaggccaaggcgggcaaatcacttgaggtcaggagttcgagaccagctggctaacatggtgaaacctcgtctctactgcaaatacaaaattacccgggcgtggtgatgagtgtctgtaatcccagctattcgggaggccraggcaggagaatctcttgaacccgggaggtggaggttgcagtgagccaggatggtgccattgcactctagcctgagagacagggtgagacaacatctcaaaacaaacaaacaaacaaaaaaatgaggttctggttttgaagactctttgtaaactgtgaagctgtatactaactgctattattggaatctcttctttttcctaacatgcctttttttttttttctagcagttcagtacataggaatttgaatgtgggtcagaatatcactaattttgattattattacaaaggattattattattacaaaggattattattacttacttatttcacacttgctgtataattgtcaaaattgttatccttcattgtagaaacattttaaattactgctgagttagcttaactgaagtttaacctaaattcttaatgtattcaatacctcaaggtgaaccccctcccacccattgtattgattgtggaaaaaaaagcttatatattaggtgatatttggtattaaaattttcagagtamacagaagagatgaacatgagtccatttaaatgttccttttagtcatttttttcttcacaagaataatcttacaattgcatcgtttaagaatacttgatgtgatagatgtcctaaataccctgacttcatcattacacattcaatgcacgtaacaacatatcacatggrcaccataaatatgtacaactattatgtatccgtgaaaaattttttaaatttaatttaaaamaattaagaagaggatactcagcacttagcaaagcagaacacgacatgtggccagtttagatgatactaacaaaaatgtacctataaagaaaaacaaagttctgatgtgacacttacaaaaaaaaaagaaagtatcattctgcctgtgtattcctagctgtgtttgcctacctctgtcccttgcctctatccttaaatttggagccatttgtaatggtttcctaacaaccatctggggcttgtagcctaatctcagcctgatgcatcttgagcacagcctgatgggaaggagtgcgccattcaggaatctggctcctgttccttcagaggagggccccccatgagacagtgaccacctgtgtctatgatatcatcagacctggtgactttgaactagagtagctcccaagctgagaggctagttgatacgaggcctggagaggatagtctgtggggccagccattcccacgttgccagaatgatcatcatgaggctgttgtgtgcccagagtatgtgctcctaagtgacacgttgcgtctgtgccgggtcatggcggtgttttgtttttgttttgttttttcaccaattcactcataataaaaaagtattccagagtactgatgaaagcttgatgagtctgtaggttatgtcagtgtttcttacgggtttcattgtggctttcattgttttcattagtcttcattaagactagagccagctgtctatgtgtgatgtgggctttagtgaaactgatttaggttgcaatcccattcaagactggtggacagaagattcagatggaaagtggcaagaaagccgcaagatcaatggatgctttgaaatatgttgtactagccacttgttttctgctttattggttcactatcttaataaaaaaaagaaagatggctaactttgcagatagattaaggttgatayaaagttggaattaaggtcattacttttgcttttcgtttagtatgtttatcagcaggtatttaaaatttttctctcagatactttcttttcatttggaaaaataatctgaatggaaattttatggtctcagaaggttagtattattcctaaaatatattactattagacatgaacaatgaaaagtccttttttgtccatatatatgaaaaattccataatgagcatttattactttgctattaaaaacatataaattttattttaaaggaaaggagaagaaagataaagacatctggcacttttggagataagctcacatgtgtttacatgcacacacacacatcttacgtgaaaattatatcaagtcagaaagtgactaatacatttacttggtgyctcattcacaaattatttaatttccaacgagttagcccttttattgaaatcccttaagtgagttcagtttttaaagtgcttacttaatgcctactgtgtgcacaatactgtgccagatgctgttggagrtacaaatgtcaagtacagtattaccatgacagaaacaaaaacataaagcaatatgtgaatatatgtttataatggccagggaggttttaaagtgagaaaacaaacagagttgcaagaccagatttctagtaatggtcgaaagtattgagaatacaaatgcaaatatcaacaataagcctaagtgtatctctacttttaatataaatgktgctgttatgagtatctgggaaggcttagagccacattcattattattcggttacaccatgaaaagatgtgttttgaatgcgttgcaaataatcygaaacacagaaaaaacacatattaaattttaaaagttaaatttaaagttaaatgtttaaaaagggaagacaaaaaaaaagtgtacttatgagtacagctgtttaaacatacagtcactatcctttcttttcccagaagtgtgaatgaggaagaaaaatactgggaagaaagaaagcaaaatacgaatatatctgtttatggatggtaggagctatcagtgttattttttttaaatttcttgtaacatttttgtatttttgagagagagagagagattgaagatatttacratgaaacaaaggagaaaaaggcaaaaaagtctagtggtggtatttttaaaatctgcgtaggtaygaccccatgtgaactatctcaagggtatgtgtttgtgttgctttatggcataagggactatgtaaagaacactaaaatttgtaataagataaaacatcacagtcatacagtttgtcagaaatcccagaatttcagctggagcataacagtacaagattgatgagccatggtgcccaaaggtggggtgctttgcagggggaggagagctggtgggagtggaagagagtgagaggatggtgacctcagctttcatccggtccacactcatagtgacrgtaatgacagctgcaactyactgcgcacccaccgtgtgccaggtgccacccagaagctttctttatggcactgtacgttaatggtgatgaaaaatgagctctgggccgggcgcggtggctcacgcctgtaatcccagcactttgggaggctgaggcaggtggatcacgaggtcaggagatcgagaccatcctggctaacayggtgaaacccagtctctactaaaaatacaaaaaatkacccgggcgtggtggcgggcgcctgtagtcccagctactcgggaggctgaggcaagagaatggtgtgaacctgggaggtggaggttgcagtgagccgagatggcgccactgcactccagcctgggcgactgagccagactccgtctccaaaaaaaagaaaaatgagctctgctctaataaagcaaagcaggaccgcacaaagcacagggacactgcctggacatagtgcccacctggctggacagtgttatgaagttcccatttcctgggaaactcagttgttttttagaaatcctagtttaatattgtttgctttttktttttgttaatgtgaggaatattacattctgatcatcctatttcttactgaaatttggcctttctcacagcaaaactcactttgttccggtgggygccgcggtgcacacctctaatcccagcactctgggaggctgaggcaggcagatcacttgaggtcaggagttcaagaccagcctggccaacatggtgaaaccctgtctttactaaaaatacaaaaattagttagggatggcggcatgcacctataatcccagatacttgggaggctgaggtaggagaattgcttgaacccaggaagcggaggttgcagtgagccaagatagtgccactgcactctagcttgggtgacagattgagactccatctaaaaaaaaaaaaaaaactcaaaaactcacttwgttcaagtatgkttatgttgatatgtaacttttttcccaaagaaaatatgaaaatttctagttatttgtattattgagagccaagttatgaaagatgtataatctccttgcaacatagatacatttttctctccctttattctgcatgataattcaaatgagtaaagctttcattttgctagtcaagattactttctttctgtgcttctttatgaggaaagtcattttgtaatcatcaaggaggtttattttgatatkcttaaaggtaaatyactgcaacctaactgatagtctattatgcttatatttaatcacatattatgcatgtataatcatcagattaacctattctttgcataacaacacagtaatgtttattttcattatgactattatattatcataaatatatttattgccattgttctgtaagggggaaggactaccatttgttcccgagactctatgttttatttttgatagttgctaccaggtcaagaagtgagactagtctttatgtcagtgacaactgtaacyccaggttttaataaatgctactgtgggctgggcgtggtggctcacacctgtaatcccagtgctttgggaggcctaggtgggcagatcacctggggttgggagttcgagaccagcctggccaacatagtgaaaccctgtctctactaaaaacacaaaaattagctgratgtggtggtgcatgcctgtaatcccagctacttgggaggctgaggcaggagaattgcctgaacccaggaggcagaggttgaatgagccgagatygcgccactgtactccagcgtgggtaacagagtgaractccatctcaaaaaagcaaaaataagaataaatgctactgtgtgcttatgttatgttcttataaaaacattttaattaaatgtttgttaaaatgtagttctttattaaaatagcgagrtgaataagtcacagccttcttccacttggatctggtgattttaactatatagcttacctttcacatgaccattggactaatagagcactgatgcctgcattgtgtctgcattagtaggacctgccacagtgcctatcacgggcatgtaaggcactcggtcagtgttgatggaactgaactcatttctttaaataatcaagaacaagtgtcttaattgcaagctttaacagttcatatatcttttggcctaatttattctgtctctctctctctttttctgtgtccttcaaacacatgtttacagarcttctttttctgtttcaagggaaaawgtcatccatttacttgattagaaatactgtttggctcttgatattagatttaatatgcagcagctgtcaaattacgamccggcttatagcccctcgtggtagatttcaagtcctgattgctatgaccttaactcatagtcatattggagaggatggcacaggacctctttctcttctgagattcccaggacacttactcaccaaccagaacatggtaatggggtgataatgtgtctcagtcagtagtgttcatagtgtacctttgccctctccatgaacatataaagacatatttctgacaatcatagcagaacattttagtggtttctcacagatagcattagcagagtayattttagtttcgaattaatgctaactattgaaacacaataacttcggagatgccaatatcaggatattatcaaatctagatacttataatgctttatcacgtagttagaaggaggtacgttgcattattatgacattcccaaaggtacctccttttaattttgtctactgaacttatatacaactttccccttattacccagcacatagggtcaggctaaatgggggtgaatcctggctcctctattgggtgccttggtgacactgaggtagttacttatcctatggaaacccagcttttgcttttgtaatattggagatgttattaatcaggttgatgtgttaaataatgtaaattggctgggcgtggtggctcatgcctgtaatcccatcactttgggaggccgaggcgggtggatcacttgaggtcaggagttcaagaccagcctggctaacatggtgaaaccctgtttctactaaaaacacaaaaaaaattagccgggcatggtggcacgcgcctgtaatcccagctattcaggaggctgaggcaggagatggcttcgacccaggaggtggaggttgcagtgagccgagatcacaccattgcactccagcttgggcgacaagagcaaaactccatatcaaataaataaattaataataataataataatgtaagtctatgaaatactcagtatatttgccctgaaatgtggaatcaaaaataattaccaacatttactgagcattttttatatcttttaatcattcatatgtacgcatgtaaataactgctaacaggaaataagagaagaatagaattatgacaggtttgaagaatgtttgtaaacactaatgccctgcattacccttgagataattggagtaaatatctatggaataaatgaatggagccagagaattttccagaatataggaattgggtgcagttagaagaactaaatgcagccaaygggtaacgggacaaatgtggtgtgtaagggaagttagtttgctgtcggaggamatggcccccataaccactcatttttagatatgcttaaatgtttactgtgatttgatattaattttattttagagttaaaagtacttacgataaaaatgaaagttaatttctaatatagtccaagaaaggtatttataggccaggtgcagtggctcatgcctgtaaccccagcactttgggaggctgaggtgggtggatcatgagatcaggagttcaagaccagcctggccaagatggtgaaacccagtctctactaaaaatacaaaaattagcttggcacggtggcaggcacctgtaatctcagctactcgggaggctgaggcaggagaatcacttgaacccaggaggtggaggttgcagtgagccaagccattgcactccagcctgggcgacagagtgagactccatctcaaaaagaaaagaaaagagaagaggagaggggaggggaggggaggggaggggaggggaggggaggagatgggacaggggaggggaggggatgggacaggggaggggaggggaggggaggggaggggaggggaggggagaggagaggagaggaaaagaaaagagaaagaaaagaaagaaacccagaaaggtatttgttgaattggtcttgaaaagttaatttgaagaactttgacaatatttctgaaaatccatttataggatatgcccacaattcattgtatggctggcttttttyccttaatttagagagctggaaaatcatgatatacaagcataaattaatgaattttttgcttgtgattcaccttctgactcctggatctaggagcaaggggaattattctgattattttttcctggctggactttgaaataccctgtctctaatcagtagcagctatgtttaaattctttttaggggcaaggcaggaattctaatttttctgaatgtacagagtgttcctctcagcaattgactttgtttattgactaatgacagattttccctcaygttggttaagaataactttaaaggtatatcagataatgttttgtgtacagtgttctatgttctctgtccaggcatatgtaaatatagtcagtgtttttttttttttgttttttgttttttgttttttgttttttttttttgagacggagtctcactctgtcgcccaggctggagtgcagtgacgcaatctcagcttactgcaagctccgcctcctgggttcacaccattctcctgcctcagcctccccagtagctgggaccacaggcatctgccaccacgcccggctaattttttgtatttttagtagagagggggtttcaccgtgttagccaggatggtcttgatctcctgaccttgtgatccgctcgcctcagcctcccaaagtgctgggattacaggcgtgagccaccgcgcccagctattttcagtcttagccagtaaactgcatttaaaactccaagtacttcagtaagacagcagagatttccaaaggtttcagaggatagtggtgggttatatttttgtatggcttttctgagggttgttttattttcatttgaaaatttyttctttataggatcatttgctatttggtaatttttttcatttgaatggtggaagtccttaaatatgctcatgkagagtttatgwgtctcgctacttgcagagagggataactctttagaatggctgccctctgggagaggaaaagcataaacagagagatgctgagtgatagagcattgctaaatcaacacatcaatctcaggaataattgttggattcatcagtgaagaatgattctaccacttaaggaaaggcttcaggagtatatatcctgttctcccagcaccagccagcccttttggatatgagactattatattcacaggtggagttttgtttgtttatcgaaggaaaagtgactccaggaatgaaaaagycatgattcacaaagaatttctcgcagtgtttctgtcctagctggtcacttcagaagctaactctaaaccctatacctctttctagcctttgccacatagaatggtcattgtcttagtgcatttatgctgctataacagaatatcacagactaggtaatgtgcaaagaacagaaatgtattgacccactcttctggaggctgggaagtctaaggtcaaggtgccagcrggttttgtgtctggtaaggtcgttctcttcttccaaggtggcaccttgtatgccgtcctgtcctcctgagygaggggatcaaagaggcttcaaatggcaggggcaaaggggccaagagataaaaaggcacacaacttacccttttatamtggtattaatcccatccgcttggggattatcgccctatctcctcctaaaagtcctacctcctatcactgtcacaatggcagccaaatttcaagatgagttttgaaggggacagacatgtaagccatagcaatcacattttcataaacactgtctttccatatagcaaggaagcatagcaaagtaagarcttaaaggcttattttccttgctgctgaatttaatatcatgtgttataattcagagacatgtaaggtacartttaaaaacagccaataagttttttagagacccactgagtacctagcactgtggtaggtcttatgcgggattcaaaagcttaaaataaaaacaaaccatttaagcatcagacttggactctgttcattaaaatgcaaagagagctgagtttaagagcttggtaacttgggttttaagaggaataaagcactgcagatattatcrtgcaaatttgaacttgaatttggtcctagaaataaatttctattcgtaactccatcttttctttcagagacccttaggctatctatatgacaggataactccgtgaacacaaaaatgcaggcaccataatcaggatattttatcctcagtatccttaactcctgaaactgaaataactggatgatacagaacatttattcagctttcatatgtgcaaagtcacatggataaacattctcattccagtgtawtttgttttccattttaaaaatacttaatgcttgtttttatacattttaggatctataaatcagtgagaactgaaggaggacaggatttcctcctgcaaggcatcctttgcatacataatattggacttctctgcttcagtgctgtcttctcagatggatatgtaatgtgtgaaatgcttaataatgtcatcaaagagatttatrtgttcatgttttgcagataagagacttaaccacagggaatttaaatgacttgactatagtggttagcactctgcatttggaaataattcaaatttttatctaagtctgtttaaatttttggcttttatagccctttgtgagagaggtcatgtgagggaaaacatgattccccctctccctgttgggtttttggggtctacctttgtgtcttggttttgaccagccttctcataactatattccaaagataaattaggggaaaatgtgcagatagttyagttaagtaatttactttacctaactctattagttgagaaaaactcttaaaatctaagttaagwatatatatattttgagacagagtttcactcttgttgcccaggctggagtgcagtggcgtgatcttggctcactgcaycctctgcctcctgggttcaagtgattctcctgcctcarcctcaagtagctgggattacagtcgcctgtcactacgcctggttaatttttgtatttttagtagagacgggattttgccatgttggccaggctggtcccgaactcctgacctcaggtgatccgcccgcctttccctcccaaagtgccgggattacaggcgtgagccaccgcacctggcctaagttaaatatttgtctttgtatatgaagwtctacaaattctttatgtaagtcattccatgggaaaattagaaattggtttccttttcttgttagaccatgacactggtgagctaggaatttaatattcatttccactttttcattaattgccatataactaccttgaatattttactattcattctaagttaaataatctttcaaaatctctcctgaaaagtaaattgcttatgaatgaatctaactgtctcttttgaccttcacttaacctcctatatctcagatgcttggtattcttttggggaaaggaaatcaaatttgtcttagtatcagttctccttttaatacgtttaatctttttattagccttgtgacagcatcttaacttagtggtgacaccctcattgaacctgctgtggcacttttgactctttctcagaagagtggtttctagcattgactccattctggtacccgaggagcctgggatattaatgttttctcaattcagcaagtatgctagacattccattgtatttttagtacatgccactgaatgatgtctgtcttacactttggggcgaggggaggaatctctgaagaagtggcaaaggcgttatatactcagcaagcsctcaggattctacagcagagggagcactgatggagcctcagattgatcagcctgctgagaacctgtgcccagctccttgctgtttgtgtgcttccacatataaacagtgtagctcaaggtttctgtgggaaaggggccttgcctaattgcctcccttgatgtattgtccaacacagttcatggaccttctcacatccagatgaatttcataaaatattttcttgcctgttcctgacacttgctggggggcatygtacagatttttttttttttctctgtttgccattgttatcctcctaatacaggtccctgtcaccccatgctagattggtcacacctaaattgctcccaattctcagtccctccttgaagttattttctttacttttttttttttttttctgagacagggtcttgctttgtagcccaggctggagtgcagtggtgcaatcactcctcaaagaaatctccaccttcctgggctcatgtgatcctcctacctcagccttccaagtagccgggactgcaggcatgcaccaccacacctggctaatctttgtattttttggtagagatagggttccgcaatgttacccaggctggtctcaaactcctgggctcaagccgtctgcttgcctcagcctcccaaagtgctgggattgcaggcatgagccactgtgtgcagccaatgttactttcaaagcaccatctgataccatggttccttgtcaccgaaagtccagtgtcttgtgtcatatgaactccaaactcttcagcccacttcacatctrtgggactggatcttaaaaggagttgtattatactgagaaaataatctaaaataatgataacgttcatgataggtcatgtttaatcaattcagcaaactcttgtggggaatgtgttgtggggtatcacccatctggggaggttctgtgtatatgtcggcatgcaaacagggcattccataagaagctgagtctgctagagaagaaagacatgtcaacagatagttacaatataagcccaataattgtgtgtgtgaacgtgtgtataaatctgtgttgaatttttatatgtttgtaaatgtgtgtgaatgtgtgtgtttcaatctgtgtgattttgtgtgtgtgaaatttgtgtgtttatgtatgtgtgtgtgaatctgtgtgtatctgtgtgtgtgaatttgtgtaaatctgtgtgaatttgtgtgtatgtgtgtatctgtgtgtgtgaatctgtgcacgtgtgaacttgtgtatgtaaatctgtgtgtgaatctggatatgtgtgtgaaagtgtgtatgagaatctgtgtgaatctgtgtgtgtgaactttgtgtgtaaatctgtgtgagtctggatatgtgtgtgaaagtgggtgtgtcaatttctgtgtgtgaatgtgtgtgtgtgtgtgtgcatgaacttgttgcatgtagattttgtccactgaaggaagttgaggcaccctccactacagtgattaggagtctctagagataaggtgattagattgggtcttgaaggagtattgggtctgagtatttgctgggcatggaagataaaagatttgaaaagtcattctaagtagaggaatcagcatgtttaatgtcatattcttgaaactaagtgacagatagattcaatggactgggagtcgcaggattggaggagaggggcrcatggcaatgacaggctttgatttctttttccaggaaaaggctcaacattcatttgctatgtcaaagaagaatatgtaacataagattttaaaagataggaaaaattggttcaaattgttttgtagactgatgactaaagaaacatatgtgggtaaataaactttttgaataagaattgaaggccagtatgtttttctgtcttatggtgtttaagttacttttgtgtcaaccttgaacttttggaacttaagttcatttacttttagtaaaatttgttttcctttttctaagaaaaaatatgacataagttagacttaaatgggatttttttgaagataaaatagctcttagaaattttgcattttgatgagatgaatttaaatgaaccaaatgcagtcaaatgaacagcccttaaaatatactatgtgtgaaaaatcaaatcaagaatgcttagagcaaaacatttaaggctttattgtattgaaaccatttgaaaagtatattctaaatgatgaacaaatagagtgtgtgatcaggttttataatttaacactgacttccctcttttccatgmttgtactcctttcctgttctatatacaattttcctaaatacattgtcctcaaaacagacatttaaaatagtattgctgttttattataagaaatatttatgctgtttgtttaaatatgtatgagatctagaaacatttaaaaacgataattaatttcacatgcccggccccagactgttaaacttttgttgcaaagtcctctgaggccattttaggcatgcgcatatatgcacacacataaccttttataacatatttttaatacattatatttaatacatttaattttcatatttttaattaaaacagaggcttatactatatatatgtttgtatatatcacatagttttgtacatgtttttcactcagtaccattaatattttggttgtggattactatttttagtggctaaatattattttaatttgtccaaatatttcctcttgataaacccctatgagttgaattgctggttgagagaatatccatatatcagcctttgaatgggtttttatgttcccgtcatcagtggttgcgagtgcatatgtttgcacaccctcatcaatattgaagttagcttcctttcaatcatttttgccaattgtatttatttagttttcaaaattttttaaattaattataggtttttgagacagagtctcactctattgcctgggctggactgcactggtgtgatcccagctcactgaaaccttgacctcctgggctccagtgatcctctcacctgagcttctcaagtagctgggactacaggcatgcaccatcttgcctggctaaattttttagttttagtggagacagatcctcactatgttactgaggctgatctcaaacccctggtctcgagtaatccttctctcttggcttcccaaagtgctgggattayaggtgagccactgtgcctggcccatttttgccaattawattttattttattttattttatttatttattttgagacagagtcttgctctgttgcctaggctggagtgccatggtgtgatctccgcttactgcaccccccgcctcccgggttcaagcaattctcctgcctcagcctcctgagtagctgggattacaggtgcctgccatcagacctgaataatttttgtatttttagtagagacggggtttcaccatgtcggccaggctggtctcgaactcctgaccttaggtgatccacgtgcctcggcctcccaaagtgctgggattacaggcacgagccaccgtgcctggcccatttttgccagttttagaattcaaactgttatcttattcttttccatgtgatttgattgatttttttcctattattgatcatctttttttaagttatctgtttatatctttgcttatttattgggggtatttatctttttcatatttatcagagctttttatagattgaagatataactctctttggttatgattatttctccacctactcacttatcttttaatttgcatatgtgtgtttttgtgtatgttttggcatacagacattttaaagatttagttcgtcaaatctgtcatcawtttttatgttttatctttatggtcgtgtttagaaatgaaaggcattatttttgccatttttcatttacctgaaagaaactgagcccaccctgatggtaaatctttagtcactaagatgccgtgaggggcatcaaatcctcgctctcaattcgtcttttattcaaaatgtacaataagtagtcccttttttttttttttttttttttgacggagtctcactctgtcacccatgctggagtgcagtagcaccatcttgtctcactgcaacctccgcctctctgggttcaagtaattatcctgcctcagcctcctgagtagctgggactacaggcatgcgccaccacgcccagctaatttttgtatttttagtagagacagggtttcaccatgttggtcaggctggtctcgaactcctgacctcaaatactccacccaccttggcctcccaaagtgctggaattacaggcgtgagccactgcaccaagccagtagtacctttttaaagggaagaagtgkttttttaggaaagcctgtgagattccaaagtcaatctgaatgttcaacactgggtratttcatttctgtgtctattgcccaccccttgttcaagttagtggtaatgcagcgttgatttcatcttcctaatatgaaattttcttgtttacatttagtgtttgtattaatagacagcatgccttttgagatttgacttttattaataattgtgtctaactgtccaggcatttttgtgatgctctagccttcccatcatactttaagactgagtcagcagagggaactgcatgttcaatggtacataggtgagagagaacatagtagacaggaaactggaaatcaggatatggtttctgaagagaggacatggtcagagtgaggaggcagaaggaagcagagtgagaaccaaggttgaagaaagaagtaagattcaagccatgcgtggtctcctaaaccttacagggagattgaacttcattataaaccaatagaaccaagataggatttttccaagggaagaggcacagtcaagacccaggttttatggctacagaatgcaaaactgaatggagaatgactggagagttgctgctgggggactgttgcaagagtgtacaagagatccaagcaaaacctccaggccgattgttctcttgttctggaatatagggtgtcatgggtctagagggcacaaatcctatggtgtttatttataatacaaatagtgttgaggagtccatggagacagtgagacctatagcctgtgtgactgggatgtagccctggccatycttttagacaccaaatatctgatggtgatgacaggctcagttgtggatgtgtagtctgtataaaaatgggtctggagctgagaaatctgggaatgtgctagagaggcaagcatggaggtcaagtctgcatgtatcagcatagagactaaactgtaagtcctgggagctmgggggtcaacmagtaagactgcattaaatgaaaaaagaccaagggaaaatacggaggaaaagcggcatgtgctctcaggaagctgagatacaattgctggagggagaggaggacagccaggatgtcttcaggaattcacaagtgagagcctatgaaatcatcagaggggtcacctgtgtagaatgagcaataaaggtcagggttaaaaatggtttactgggtgtgaccatgcagaggtcattttgcagtcttttgtctgaagcaatgaagaggtgaagaacacagtaggtagttctgtttctaccagaagacatcgctttctccaagactgacagaagatgaagatagatgcagatccaggtgcatggcctggaatytgagggacgtcgagcctcattttctccatggcatagaagaggccttctgaaggaggagaggagacctagtagccattaccaagaacactgatgagtttgattacataaaaactgaaatgttatgtatggtgaaagaaataacaaatagaaataaaagatggaccataaactgggagagaatatttgaaaagcataaaacaaaggattaacatccctaatctataaaatgtgaaaggggaaaactcaactacactgttgccaagtccactcagaacaactagtgtacataatggaaaataaaacaaccaatccatttgacctcactggaatcaagcaagttcatattaaaacaacaaaatacctctttttgtctatcaaatcagcaaaaaaaaaaacaacttagtatcattcactgctgttgaagaaataggggctatatgtcttattgatagaggaataaattacttcaacattttgggggatagcaatcttatgatctcttcaaaatgtacatatgcatttcctatgaaacggccatcctattttgagaatttagccttcagaaataaaactacaggaatgtccaagatacacgttgaaataagtagcagtattgcttctagtgacgaaatattcaatgtgaagatccatcagtaatgaaatggtagaataaaaaccggaatatccatactatgaaagagacgttaaaaagatggttggcttaagaatatcatgatgtaaatgtaactgggcagcataacctcaaaatgcattttaaaacttttttttttcctctttctcttgggtttcaagatgtaaccttgaagcaaactacagaagsctgtttcctttagccttaaaatagactccacgtccctccgtttttctccagatatactcccttcttatttatctaactgtacrctagcatctaattatgtgccttctttgaagatttgggggctaatcttgagacagacagaccaagcctggagacccagctgcagagttccagagatggcctcagagggctaatcagcagccccgccactgttgagatgaygccagaccatgtaccaggtggactgggacccaagatagccactggaacaagatgcacaggcatcgtcctcmgcacagttctggcatgcctttcgtatcaagttctccctttttaaactctttccttccccaccaaaatttgaagtagttgctttggatgggaatccaaccacttccccacgactagttttggttaataaagtcactttctttctaacaggcctcacgcttgttaattctactctgcaagcagcgagctttgtgttacataaatgatcacaattcagaatatataaatcataattcagaataagttatacattccctttaaatgaacttatgtaaatgtatttcacgtttgtayaaataagagaaaagtayggaaagatgctagccaaatttttaactaggaaggggtgggtgatggaagtggcattggtagaccagaggatgtgactcattattaaaatgtagaaacctcaatatcacttggrttactagcaaaagcatatatgacccatttaattcacatcactaaaataaaatgagtaaataattttataacaaaagagacagtaaacagaacagacttagtagaagcaagctgggtctagytggaasgttgtcacaacgaggaggtttcaaaggatggaagaactcgaaggtgttatgatcctcaggaaggggaccaatatctatgcatgggagcaytgaaagtctgcagacgacagagagccagaaagatctccaaatcagctcctgggcctgcctgtgcacgagaggcagtgtcctccttggggagcttgcatgaaaaaaggtggaagcttgcatgcacagagtgagggctgggaggtcttagtttttgaggtaagcctgcatttcagttttaggatcacccattggaatgagtgattcagtccaaggcttggaactcattttctgtttggaatctacccaaatatataagacattctaaaaatggaaaatggagcacccagaaagtgaaaaatgtaattgtaaataaaattaagagatgattttgagaaatgtgggcatttaaaggacagtttttaagrtattctgtatgtctggcaattaagatttcaatgaaacacttctgttgccttttactgactgttgatagctttattaatgacagggggtgacacacagatattaaaaatgcagaggagaattactggggagcaaagggaagagccccagggggttttgtttgtttttaggttacgcagagttttttgagaatagtttcacagccacaggaacctaaattttctataaatatttttaaaggaatggatggataatgtatgtctgcataataagtgttatcattcatgatttcctgattgattttactgaaagagctagtgagattcctttaatgctttctttcaatagaattgataatatttttctttccctggtaggrcattttgyagtaaagtaaggacactctgaaaggaatatttcagtgccccaaayactgtaaaatgatattgcccccatgaagacgttttgctctctctagtgacagacttaaggatgtctgtctacacctggcccatcaggatagtaattcggatgctgtgacaacttcrctgctccattatcttcattctgcagatgacagctggagcaagaggagctaagctggattacaaagccaattaatgtcagggcttagctgtaaatcttcttgtgtaagtcttggatatgttttctgtagccatraattctttttcacgagtgctgagtgtttattctgtagcagtatggaagcatgtagagtaaaacccaagttacttaacattatgcaggagatcatagtaagcaataatttgggatatggrttttcctggaaaatttaactcattcagcatgacagactgaaggccaccttcagaacctacgtggacattcaaagacacatttgggacaggtgagacagtacmtaaagggggtaatagagggccagagctcaagtctaggtgccaggatgcaggctggatgggtaatgagatgggggatagtcaaagatacactaattgttcaatcctaggtttgcatctggaatgtctgtttgkttttttttccaaatttgtctaagcatttctgtgctctcaggtcatctgtacctttattatacttgcttttgaatgtattggtctcagataacatgacagggyaatgagtctcacatttgtggtttaatattttattgatagtgcagttacttatctgcattttcctagttctcttcatatttctcttgctgtttatcctgtatgccacctctgggctctttcctcgttgagcatatgttgcctgcctcctagctccatgccaggcttctccctgaagtgccagctcaggcaccttgctcctggctccctcaacttggacaycccacgggtactttacatccagctaaaatcttcattgctgcccctaaatcaatggctgttttctcgtgtggggaagtcacatctacccagtcctccatactagagttttctgttttatcccttctcactgagtgcctacattcaaccaatcacaaattttatctgccaaaagtttgtcaaagcagttttaatttttttgcctaactattgcctctgatcagtcctgaatcatcttttcactagattatcttttttaattattatttttgtgggtacatagtatgcgtgtatatttataggatacataaggtgctttttttcatttgttttgcttttttttttttttttgaaatgagtttttctctgttgcccaggctggagtgcaatggcacgatctcggctcactgcaacctctgcctcctgagttcaagcgattctcctgtctcagcctcccaagtagctgagattacaggtatccaccaccacgcccatctaatttttgtatttttagtagagacaggggtttcactatgttggctrggctggccttgaactcctgacctcaggtgatccacctgcctcagcctcctaaagtactagcattataggcatgagccactgtgcccrgccatgagatattttgatacaggcatgcaatgtgaaatartcacaacatggaaaatggagtatccatcccctcaagcatttatcctttgagttacaaacaatccaattacactctttaagttattttaaaatacacaattaagttattattgactgtggtcaccctgttatgctatcaaatagtaggtcttattcattctatttttttcyctcccatcctccctctaccttcccaacctctgataactattctcctactctctatgtccatgggttcaactgttttgatwactagattccacaaataagtgagaacatgtgatgtttstctttctctgcctggcttatttaatagtttccaattctatccaggttgttgcaaatgactggctctcactcttttttatggctgaatagtactccattgtacatgtgtaccacgttttccttatgcattattcatctgttgatggatgcttaggttgcttccaaatcttaactatkatatacagagctttagcaaacataggagtgcagatatrtcttgtatacactgatttcctttcttktggatatatacccagcagtggtattgcaggatcaaatagtagcttaatttttagtttttgaggaacctcaaaactaaaaaataatcttctccatagtggttgtagtaatttacattttcaccaacagtatatgagggttcccttttctccacaaccttgacagcatttgttattgcctgtcttttgggatacaagccattttacctggggtgagatratagctcattgtagttttgattcgcctttctctgatgatgagkgatgttgaccaccttttcatatgcctgtttgccatttgtatgtcttcttttgagaaatgtctgttcaaatcttttgcctatttaaaatgatcagattattatatwtttttttcctatagcattgtttgagctccttgtatattctgattattaatcccctggcagggtttgcaaatatgttctcccattattttggttgtctcttcactttgttgattgtatccttttwctgtgcagaagcctttttttcagggctagcygaggttttattttggggggaaaaaaataaaagcarttgagttgttttgtagctgaaggcatgggcaaggtggtccccaggcagtaaactcccccgtgggtgggctgagggctagggctgagcctcaggtgggtctcccattccctgtgctccgctgcacagcagcctccctcccaggctctggggcagccaccagaggggcaggctgggaggggctgtcgcagctgttcacttaggaaggacatcagaggactcggataccagcttcccatcgcaggtcttgatcttcttcacaaccatggccctggtggagctggtgcagctgaaggagctggagcccatgtcagagccaaagctggagcccaggccatagctgaggccagggcttgtgagacccccataggccaagctcagaccatctgcataggcgctggtggtctttgtatggatactcatgttctgcatcccagactccaggtggctctcctcactctccagcagcttcctgtaggtggcaatctcgatgtccagggccagcttcatgttcttcagcttctggtactcatgcagctgccacgccatgtcctgcatggcctgttgcagggcagcctccagcttggacagcttggtgttggcatccttaatggccagctccccacgctgcttgacatctgcgatggtggcctccagggaagccctctggcttttgaggccctcagtctcagcctggggctggctgatgttccagttcatcttggagatctcagtctttgcatctgcagctccttatacttgatctggtacatgctcttagcctcagcccggctgaggttgggtgatctcctcatactacgccttgacctcagcaatgatgctgtccatgtccaggaagtggctgttgtcctggacagcaccatagatgtgtccgagatctgggactgcagctccrrggtctcctcttcatacagctgcctgaggaaattgatctcgtcagccagcccttccagctgagactacagctctaccttgttcacgtaagcatcatccatgtccttcctgatgaggataaattcattctccatctctgtacacttattgatctcatccttgtacttgttcttaaagtcctccaccagcccctgcatgttgccaagctctgcctttagcttcagcttctcctggaccagagtgtccggctgccccctagggttgttgatgtagctcttgaacatgttgcccatgttgctccaagccatcttctgctgctgcaggaggctccacttggtctctagcatgttgttctgctgctccaggaaccgtaccttgcctatgaaggaggcaaacttgttgttgagggtcctgatctgctccttctcctgctcctgcacggcctggatgttggggtccacctccaggttaaggaggctcagcagtctctggttgaccacaacggcggtgatgcctcccatgccgccggccccaccagagcctccacccaggccacccccggaagctgctgctgcccwtagaggtggacaccttataggacttctgggtcaccctgatggacatggtggaggcaggagtagaggcaagtggrttgaaccaggcagagattccagaaggagcagagaagctgcttcttggtcactgtgcagaagctttttgacttgatatgatcccctttgtccatttttgctttggttgcttgtgcttgtggggtattgctcaagaaatttttacccagacagaccagtgtcctggagagtttccccaatgttttcttgaagtaatttcatagtttgaggttttctatttaatttttaaatcgattttgctttgatttttatatatggtgagagatagaagtctagtttcattcttctgcctattgatatcctgtcttctcagcaccacttactgaagaaactctttttcccagtgtatgttcttggcacttttgtcaaaaatgagtttgctgtaggtgtgtggatttgtttcttggctctctgttctgtttcattgctctgtgtgtctgtttttatgccagtaccatgctgttttgcttacaatagctctgtagtataatttgaagtcaagtaatgtgattccttcagttttgttccttttgcttaggataactttggctattctgggtcttttgtggtgccatgtaacttttaggattcttttttctatttcccagaagaatgtcattggcattttgatagagattgcactgaaactgtagattgctttgtgtagtatggacattttaacaatattggattttatccatgaacatggaatatttttccttttttggcattctctttgatttatttcattagtgttttatagttttcattatagagatcttttgcttctttgggtaattcctaagaatttaattttatgtgtggctattgtaaatggaatttttaaaaatttcttttatttatttcacattgttctctgttggcatttagaaatgctactgatttttgtatgtagattttgtgtcctgcaactctactgaatttgggtatcagttctaatggtttcttgtggaatcttaaggtttttccaaatataagatcatatcatctgcagacaaggataatttgacttcttcctttacaatttggatgccttttatttctttctcttttctgattgctctagctaggacttccagtactatgttgaataacagtggtgacatcaggcatccttgtcatgttcccgatcttagaagaaaggctttcagtttttcccmrtgtagtatgatactacctgtgggtctgtcatttatggcttttaataaaagccatatgttgagatgtgttccttttatccccagtattttgagaatttttatcatgaaggatgttgaattttattaaatgctttttcagcatcaattgaaatcatcatatgatttttatctttcattctgttgatatgatgtatcacattgattgacttgaatattttgaatcatccttgcatcccagggataaatcccactttctgatgtaatgttgaattcagtttgctagtattttgttgaggatttttgcatcaatattcatcagaaatattggcctgtagttttctttttttgatgtgtctstggttttggtatcagagtaatactggcctygtagaacaagtttggaagtattccctcctcctctgtcttttggaatagtttgagtagggttggtattagttcttctttaaatgtttggtagaattcagcagtgaagccatcaggtcctgggcttttctttactggaagattttttattatggctttaatcttgttacttgttattggtctgtttgggttttggatttttttgcctggttcaataatggtaggttgtatktatctaggaatttgtccayttcttctagactttccaatatattgacatatagttgctcatagtagccactaatgatcctttgaacttttgcagtatcagttgcaatgtttcgtttttcatttatggttttatttggatcttctctctttttttctttgttagcctggctaaagatttgtctattttgtttgacttttcaagaaaccaactttttgttttattgatcttttgtatttttttcatttcartttatttatttcygctctgatctttattattattttcttctactaattcttggcatatagaaatgctgctgatttttgggctatcatgaagattaagtctgatgtttctttgttgattttctatttgaagacctgtccagttctgaaagtggggtactgaagtctctagttattattgtattgaggcttatctctctctttggctctaataccatgtgctttatcttaatatatctgggtgctccagtgttgggtgcatatatatttaaagttcttatatcgtcttgctgaattgacccctttatcattatatagtgacctttttatatcttcttatagtttttgtcttgaaatctattttttctgatataagtatagcaactcctgccattttttgttttccattagcatagaatatcttcttccatccctttattttcaatctatgtggatctttatagtgaagtgtgtttcttktaggcaacatataaatgagtcttgtttttttcatccattcacccagtctgtgtctttttgttgcagagtttagtccctttacattcattatatgtatgtatgdatgtatgtatgtatgtatgtatgtatgtatttattttgagactgagtttcactcttgtcacccaggctggagtgcaatggcacgatctcagctcactgcaacctctgcctgtcaggttcaagcaattatcttgcctcagcctttggagtggctgggattacaggcacacaccaccacgcctggttaatttttgtatttttagtagagayrgggtttcaccatgtttgccaggcttgtctccaactcctgacmtcccaggcaggtgacccgcccacctcagccttccaaagtgccgggattatacacattgagccaccgctcccggccaatgttattatttataagtaaggacttactcctccattttgttatttgttttctcgttgttttgttgtcttctcttccttctttcttttcttcctatcttcctctagcagaggtgattttctctggtgatacgttttagtttcttgctttttcttttttgtgtctccactgtgtgttgttttggtttgatattatcattttaacctcataacaacttaacaccaattgcataaacaaagagacaaaaagaaaactaataaaaactctataccttaactttatcccctggcattttaactttttattgtgtctatttatatcttattgtactcactatgccttgaaaagttatttcagttattatttttgattcgttcattgtttagtctttttacttagggtaagagtagtttacacaccacagttacactgttataatattctaggttttcctgtgtacttactattaccagtgagttttgtaccttcaggtgattatttattgctcattaatttttttttttttttttctgattgaagtactccttttagcatttcctgtaggacaggtctgctattggtgaaattctccagcttttgtttgtctgggaaagtctttatttctccttcatgtttaaaggatagttttgccagatacactattataagataaaagatttttccttcagcactttaaatatgtcatgccattctctcctagcctgtaaggtttccactgaaaagtctgctgccagatgttttggagctccattgtatgttatttatttctttccttttgctgcctttaggatcctttctttatccttgacctttgggagtttgattattaaatgccttgakgtagttttctttgcattaaatctccttggtgttctrtaaccttgttgtagttgtatattgatatctttctctaggtttgggaagttctctgttattatccctttaaatacattttctacccctatcttgtcctttattttctctttaaggccaataggccaattactgttttttttgtttttgttcttttttttttgagatggagtcttgctctattgccaggctggagtgcagtggtgttatctcagctcactgcaacctctgcctccctgattcaagcgattcttctgccttagcctcccaactagctgggattacaggcacccaccaccacacctggctaatttytgtattttttgtagagacggggtttcaccatgttggccaggatggtctcgatctcctgaytctgtgatccacccacctcggcctcccaaagtgctgggattacaggcatgagccaccgcacccagcccaattactcttagatttacccttttaaggctattttatagatcctgtaggcaaggcataatttattgtggtttttttttttgtctcctcagactctgtattttcaaatagtctgtattcaagcttactaattcttacttctccttgatcagttcagctattaaaagactctgatacattcttcagtatgccaattgtgtttttcagctccagaatttctgcttgattctttttaattatttcattctctttgttaaatgtatctgataggattatgagttgcttctctgtgttatcatgaattttctttgtgttttcttagcacagctattttgaattctctgtctgaaaggtcacatagctctatttatccaggattggtccctggtgccttatttagttcatttgatgagatcatgttttcctggatggtgttgatgctagcagatgttctttggtgtctgggcattgaagagttgggtacttattttagtcttcactgtctgggcttatttgtagccatctttctcagaaaggctttctagatatttaacaggacttgggtattgtgatctaagctgtatctactttagggggaaccccaagcccagtaatgctgtggttcttgcagactcatagaggtgctgctttgatggtcttggacaagatctgtgataattctcttgattaccagacagagagtcttgttctcttctcttgctttctctttttttgtttttttttttttgttttttgttttttaagatggagtctcgctctgtcgccgaagctggagtgcagtggcgcgatctcrgctcactgcaagctccgcctcctggrttcacgccattctcctgcctcagcctcccgagtagctgggactacaggcgcccaccactacgtctggctaatttttttgtattccttagtaragacagggtttcactgctttagccaagatggtcttgatctcctgacttcatgatccgcccgcctcggcctcccagagtgctgggattacaggcgtgagccactgcgcccggctctcttgctttctcttaaacaaagagtttctctctctctgttctgagccacctaaagcttgaggtggagtgacacaagcacccctgtggccaccaccactatgactttgttgagtcagacatgaagccaacaaagggctgagtctcacccaagtcctgctgtaaccactccctggctactgcctatgttcactcaaggccctggggttttrtaatcagtaggtgataaaggcctgttttttccccttcagggcagtgaggtctgccaggctctctgggtaggtccagaggtgccatctgggggtcaggaactagagtcaaaagtcttagacatcaacctggtattgctgctgagctgacactcaaaacacaaaatacagtccttcccagttttctctcccctttccaaaggcagaggagcctcaccctgtaatcaccactaccccagaccatgaggagtactgccagactagccctgatgttcccttaaggcccaaaggctcttaagtcagcttgtagtgaatgccacctggtctgggactcacccttcagagcagtggacttcccactggcccagggcaggtccagaaatgccatccaagggtcaagtcctggaactggggaccccaagagcacacttggcattttggaccccagtagctgtgctggtacctgaagccagcatgtcccagagcctcacccaaggccctcgacgtggtacctggatattgctgctggttattcgtgacccaagggctcatcagttaacaggtgatgaatgctgctggcaccagctcctttctttcaaggcagtgggttcccttgtgggccagagtgtgtctagaaatgttgtctggtagctggggcctagaacagaggcctcacaaytcagtctgttgccctttcctgctgtggctaagctagtatmcaagatacaaaacaaagtcctccctactcctccatctcctctcctcaagtggaaggaaggggtcttttctggagctgagaactgtgcagcctgggattaggggagcagtgatgccagcactcccttgtctgtcccagctagtgtctcagtatgtcacgtgccctcccacccccagttcactgtctctgggcctagttcagcactaggactttcctaatagttgtagtccttatggcctagactgcctttcacattgacctggagactcagagtgctgtagccctctgtggcaaggtttgcaggcactcaagttccgaccacagggatctgcattccccctggcatgggcaggcatcagctgagtttggtctggttttcctttctgctgtaacaggacaacactgaatttaatgcctcacaattgctgtgttctccctcccctagtgcccagagatgctcttcgcccccagtaagggaggcgtggtgtcagcagattcaggacgggttttttttgtttttgtttttgtttttttaaatcacttcagtgcctctttcagggatatgaagtggaaatcaagtaccatgagtgctcacctgatttttggttcttaagaaggtgtttttcctatgtagattagctgttaacttggtgtccttgcggggtcgggggacgaacggtggagctttctattctaccatcttgtctgcatctcactagattatcttttaaaaactagatagtcattggctttcttctttcgctcagtctttctcttcaatatctactccactgctataagcatgttcttttacaatgaaaaatgtgaccatggcattcctgtgcttgaaactgtttagtaaatatcattgcccaaagaataaagcccaagccccttaatacttaaggctctccgcaacctggagacctcagctttatcttcatcactccatgcgcttgggactgcagcatctcacaccagactgactgtagttggacacgctccatggrtttctccccgtcgccctgctcctttgatcgcctaggctgcaaatcgtctttccttcctcagtcccatctggtcaaatactcctcagttacggctcaactcagacatgacccttttataaagtcttttctgttacctggaaatgatctctgttatcaccctcatacccagtgggcatctttataacttcacagattttcatgttttataatgacctgggttttttttttttttttttttttttttgcctctctctctctgggctttaattgaaagccttctttccatcttagtaaagtttctggagaaagaagacactcattaagtatacactgattgacttgaatgaatatatgttggcaatggatatttttgccacattttgcaaatttgttaacacaatctgtaatttatacttcagagaaatatcaattgtaaacatgattagggtagtgcattttaatgaaaaggacaccagaagggtgttatgacattagttcaaatttatgtttttactatatgggatgtattaaaaatcacttcatttctkaagtgtattaaaaataacttgatttttccatgtttacacttgtaaaatataagacattgatccaggcaacacttagaagatgcatttggcctctgcatgtctttgaccttctggacattgattatgacctgactttgattactctgtttctaatttgtaattgttatgtgttgacagttataaacttataggtaattgatgtctgctcttttgaactaatcatgaatatattgttaggctgatttttaacctaagcataaagcatgtgtattatttctacttatgaagctaacatagtcaaatagaaacttctaasgtttttattgcacttatatgcaaatagttgtatctgaatgaaatcaccttaatgaaatgctgtctttgaaacctaattataacctctttattaacgaatgtagtaggggaaagaagtcatattaatgtcgttgataagttatgtttatccccttctgtcatcatattaactgagaatgaaatacatataaatagaaaaagtttaataataatggtatcagatgttaattgagcttactgtttgttagacaactcattttatatggaagaaagctgagacaagagaatttagccatggtcacagattaggtsgcactagtttgaaaaatttaggaccttagagacatcattttcattccataamtttcctttctcgtatgtgaagaagaattagccacctatttaatttctatctccatcaacaaaatatcagtaggatatgtgttgcttattggtaaggaatactggtgaggaataagaggctaaggtacaggtggagatgtttttaaaagtaattactaatgtataggagaagacacaaaatggatagtttatctgtttaagctttgtggtggccattgctttttatgtagcctctataactgaaagtctttaagagacaaggctttcccttttaccagtgattccaacaagataaatgcctcagctgggatgaattggggcttttcacaagtgacccgtagctttcttgtagaaatgcttctcagtttctttatgtaacacaattccagggacaaggtgaacctacatgataactatgggctgtcttcctatatgtcagttacatccacaaatgggatgttaggggctggggaagggtgtgtgatgggatggcaggggctggggaaggctgtgtgtgtgtccatgtggtttttaaggttttgatagaacaaaaattttacctgcaaatcagcctagtggcctgtcgcagtctgtgtcatagtattatttacaaatagtcgtagttttcattctctctatagtgaatttcctggtaacacaaaaatgtttgagtttcaaaatgttcatacaacttaccaattgcctttttttttttttttttttgagacggaatcttgctctgtcgcccaggcaggagtgcagtggcacgatcttggctcactayaagctccgcctcctgggttcacgccattctcctgcctcagcctcccaagtagctgggactacaggcacctggcaccatgcccagctaattttttgtattttttagtagagaagaggtttcaccaattgcctttttaaagtagaaaagttggctgggcgcggtggctcatgctgtaatcctagcacttcgggaggctgaggtgggcagatcacttgagctccggaacttgagaccagcctgggcaacatggcaaaactccatctctaccacaaatacaaaaattagctgggtgtgtggcacatacctgtggcacatcccaggtacagaggaggctgaggcagaagaatcgcttgagccttggaggcagagactgtgatgggctaagatcactccactgcactccagcctgagtgatagaatgagaccccatctmagaaattaaaaaaaaaaaagtagaaaattgctgggcacagtggctcatgcctgtaatcccagcactttgggaggctgaggcaggcagatcacctgaaatcgggagttcaagaccagcctgaccaacatggagaaaccccatctctactaaaaatacaaaattagccaggtgtggtggcgcrtgccwgtaatcccagctacctgggaggctgaggcaggagaatcgcttgaacccrggaggcggaggttgcagtgagccgagatggcgccattgcactccagcctgggcaagaagagcgaaactccgtctcagaaaaaaaaaaaaaaaaagggaaaattaaagcatttgcttaaaagtcagtgaaaatatgtaaaataatatggggaatccggaatagtttgaagtaatgaaggctataacatgaatgccactttctttgagattcctgataatatacttgttagtaaagatgatggcataatagtcaccataaagaaaagtgattttttttatcakcaaatcaccaaataaaacctttgtcataaggagcagccatctaaagagtatatttaaaaggagagatatagatacttgtgtgtagatattaatatataggttctcaccatggtgatyatgcctaagagtcaaaactttattttcttgtagggcaactgggcaaaaattacaagttttgctgctcttgaagcttcccccatgatctgattcttgagctgaaactcatgtaacaagagaagaatttggtaaagcctgatgcagtagcatctttgaggtggtcagaagaagccctatattgtcaaggatagatactgttgttaacagcaccatccgccgagcatagtggctcacgcctgtaatcccagcactytgggaggccgaggcaggtggatcacttgaggtcaggagttcgagaccagccaggccaacatggtgaaacctcatctctactaaaaatacaaaaattagctgggtgtgatggcgggcgcctgataatcccagctactcgggaggctgaggcataagaattacttgaacctgggaagtggaggttgtagtgagatcatgccactgcattccagcctgggagacagagcaagactctatctcaaaaaaacaaacaaacagaaaacagaaaacaaaaaaacaccaccatcattcagtgccttttatggtcaacgcctgaagagctggtgctgattacagattggggttcagggcaagaccacgtgggcacacccagtgaggccacagcaaagtgccctgggggkaatggtgttgggactaggctcagggaagctggtggcatgaggaaggactctggcctctgactccagcgtgtttgttcgactaccaagcagcaatgactgtggggtggtgtattataacagctggcccagccagaatacaggggattaagtgtggcagttcatagcatttattatgaatttgaaaggccttcagaagtcttccaaactggagccttattggagatgttcacattgggcaaaaggaattgttcagctttctgttgtcctggcttctgtgctggcaacatcggggtttcctgagtatgggtagtaacacttgtcataaggtagaggtggtgcctttctgtacaatattgcttggatataaaagmtacacatctaattgtttaaatgtattatcttttatctgctttatttcatcaaatggggcaggtgctcagtttcctttgtctgatatcctgtgaaggtagcatcaggagaatgactcatgccctgtgctgccttgccctctgctgggctggcttgagtcctcaggttccctcacagatgcaattcctgataataatcacttgcattctcctgttctaagctacagcttccttttctcttttttttttttttttttgagatggagtctcgctctgtcacctggttggagtgcagtggtgcaatctcggctcacagcaacctctgcttcccgggttcaggcgattctcctgcctcagcctcctgagtagctgggactacaggtgcacgccactgcatctggctaatttctgtatttttagtagagaaggggtttcactgtgttggttaggatgatctcgatctcctgatttcgtgatccccccgcctcggcctcccaaagtgctgggattacaggtgtgaaccactgcgcccggcattagctacagtttcaacatgatgcactagaggggaaaaaaaaagaaggcgtctgccaaactgacacacacacacacacacacacacacacacacacacacacacacacacacacacacacacaccagctgagtagttactgcttggtttcttctgcccgccttcagttgcctctgatcaaagctgttctcaacttgggtttccaaaacatttcgcagagagcttacaatggtaaataacttcttgtgcaacaggtttgagattttttccgagttataatatgtcttacttacctgtttctgcatgacaaatagtgacaaacttaggggcttcacacagtacggatgtattgcctgtttctgcagcaggagatcaggcccagctagctgcctccctgctttcagggtctgctctaagctgccatttccttctcactcaatcaagttatgttctccaatgttttctcacttttttttttttttttttgagatggagtttcgctcttgttgcccaggctggagccatttcggcacaccgcaacctccacctcccaggttcaagcgattctcctgcctcgccttcccaagtaactgggattacaggcatacaccaccacacccagctagtttttgtatttttagtagagactgggttttatcatgttggccaggctggcctcaagcttctgacctcaggtgatccacctgcctcggcctcccaaagtgctgggattacagccgtgagccaccggccttgaattcattctttagaaactttaattatgaaatgtcaatggaataatatttatagatgaaacttaaattttttttttgtatttttttcacacagtgtaacgctgacatcatttattgaaacatgacatatcttgagtgtatttaaaaaccaagagggtgagttatctcagcaacagtgtttttgttaaatgtagttgatacctattactgatgaaaagcaatagaaaagaaagcttctatttgggtaatgttttaagyttttctttacccaatggattagtgtaatttgctctctcattttcattaattttattgatgactgaaattgctcattactcaaaaagctrgaatttttttaacttttaaatttggcatcctagtaaaatcttggttcaaagaatattttactggttgggttagaaatgaatccattttgtttaatatactttgaaatactattatcatgattgttaacatctattatattactctagacatgattttaaattcctccttctatatattcctctttgtataaatgcctccatatataatatmtatagccattattgacttttgccagtcatttaccatgtgtttgcattggggtatcacatactgacctgtgcaccaacctatgggcccttcctacttggttttttgttgcatgtggctgaaaagtctgttagaagcatagtccattgcatataaaaggaactgaataagtgacttttgagttagatatataataggtgtagcacagaattcctcctttctataaagccccccaaataagtatatttcatcatttttcttgatagttgatacactctgcttttggaatttttcccacaatcacaaaccccattrttaaattctcagtctcattttagaacatttctgtggtgacctggccttggctgggtctttcgccttctctggaggccgtcccaatgtaygcctggctccggcaaggccatgagatgcttcctcctcaacaccagccaagctgccattcccatggctctagtaaaagcccctgatcttcatgccattgcgctgcgctgtgctccccccaccccgtgttgccactgtcatctgttaacctcctgccycccgccacctcactgaggatgtttatctgtcctgtcygccacccccagttctccaaattytgtccgttttcttttcttttttatttatttatttagagatggagttttgctcttgctgcccaggctggaatgcaayggggcgatctcggctcactgcaaactctgcctccygagttcaagtgrttctcctgcctcagcctcccaagtagctgggattacaggcattaccaccacgcccggctaattttgtatttttagtagaaatggggtttctcgatgttggtcaggctggtcatgaactcccgacctcaggtgatccgcccgcctcagcctcccaaagtgctgggattacaggcgtgagccactgcgccyggccattctgtccgttttcttggcaactcattatttacatgaatggtcccctcagtatcctgtatcttcattcattgatctgctcatctkcagtgacattttcttctactctattctcatcgaacactctcagtgtaacagagtcgaactagatgttacttcacctccaaaataacaaaatgaagcattcgcgtctccagcgacagctgcggtgcttgcagagcccttgctgtgttaacctccacgggagtccctcgccgctttctctccttccccagccctcctgccatgactcctgtctttatccacctgagattccaaagttcatcatttcactcatgttctttcagctgccttttccccactcacttttaccytttttttttttttttttttttttttttttttttttttttttttttttgagatggattcttgctctgttgcccatactggagtacagtgatgcaatctcgtctcactgcaacctccgcctccaagttcaagagattctcctgcctcagccttctgagtagctgagattacaggtgcccaccaccacgcccagttacccacacgctttttattgcacttcctgagcaaatgcatagctttaaatgactgtggtggtctgtgttttagtttctttcccttgaagctttagggtgtttttttttttttttggtagtaaacatttgggtaaaccgaggacactgtaagttcacatcagcagatggctcttccctccttgtcagtacccggtttcctgaggtatgagctcccactctctacagcaccccccctatayctatcccttgcttctaataagacctcccactcctcccaccctcccctgcctctttctttccggctgctcactttgccttatatgttactgcaatttaagaaggtgacaccaagagcactcactttcttgtcttccatttcttgagaaaaagcgtcctttctcctcttagatgcaaaggcctcyacttgtgctggacacccacctctgcctcatcaaagaggttgttcctttggctggtcccctctctcctttattgtcttctctcatttccccaatgcacatcgtgttgtaagagcgtctgcctcttaaagaacttacctggaccccactcacttcacttcttgccccattttcccttcccatttaatctttcctcccctgagacagcatcaccaacagctttgggcaatgccaagcccagttagatgctcctctcgtttgttcttacgcagcctctctccagcactgggcactgtggaccaccccctctggttgaaactctgctttcgtggcttctgagacctggtttttctcctacatctaygattctttctgcttagcgttttgagccttttctggcttgaacctgaacaacttctgaaggttgaaggtcctcagagcttggccccacgtcctctctatcttctccttgagttatattcccatggctttagaaaccatctatatgctaatgactcccaaatttatatctccagctcggctctcctctcagcactcccgtctcatttatycaaattacttacctgacaactccacgyggatgtttctcaaacatctgaaatgtaatatgttcaaaactaaactcttgctttttttcatggaaacttatttctccatgaatcttctccatctcagtgaatgacaactcattccacataattgccgaagtaaaaagacttgatggattttgattctgcacctcccacactcccacatccaatccatccacagaaatggttgatatacctccagagtacatcttccattgccaccgcgataacctgccggcaccttgctttgtctctcgccacccgctcatacagtgttcaaggtactcttattaaaacgtagatcggtcccttcactttcctgctaaaaccccgttttttccccctacattgcacttagcactttaagtcactctcctggccagtatagccatgactggcctggtctctgtctttgctgtccgactcacacctatggccaccaacgcctagtcacctgattttccatttgtgcaacaagccggatttgtgtactttgttcacagtgttccctttgtttggaatgtgttttccttctctcttctcatggctgtgttctttttattcaagtttctatctaaatctcatctctgatttatttctctaaccattttttctaggtaggatacctagttattcttgaccacagtatcagttttatttcctccctagcattttgtattttatagtgaacactttgtatatttgcttctgtattacctgtgtcttccactagactccaagtctcatcatcacacactgactgctgagcacatagtagggattaataattgttaatgaatgaataacttgatctgtcaatctccaaaacaaatgaaatattcaaggattgtggaggacaagagaagaaatggtctgtttcttcaagtagctcacaaatacatgttacaacgatgaggccggagcttctgtatgaacttactctgccctcaacagaaaccaaaccatcttctgggtggttcttacacaggtttctttgctttataaaaactcaaccatgtacttaggagttgtgtatgtttttatatatggttgcacctcaataaaacggcatatccaaaagaaaaaggaaaagggaaaaatgctaagaagtacttgcctaattttctgcaacaagactttatttttataatcaggaagactgacaacaattctctaagaacaaaagaaatctctgaataactgtatatttagagaaaaggagttattctcattatttgtttatgatattcttttgtagctcttatrttgtaagtttataacactttaacgaacctccttaaattccatttaacttgttatggactggaaattgggtatagttttcagacgttggtctggtgggtgagatttatacctggtggaattagtacatagttttgggatttgtatgcccaagtrcgtgttctctatcaaatttgctacttgggctgtttcactggcagacctgttaatagaatctcgtttgtatgtgtgtctcacagactactttgaagtgaggaatattcacgaaggcctattacaagcatcagatcactagatcactaagagagatgataagaagggtcttgaaattacatacagaagaaaatttgctgttatgcttagtcatacatacattctctgtttcaatcctagagatctgtcaggtgggtatgcgtaggatatgagcagccaccagccagccagatgcctcctagcaatagtcttctcaccaggacctgaagtcaatgtcattacctcacacgccactccagtgggctgcgtgacatggcaccgtcgcagcatgacacacagggaagtgtttctagtttccagaacatttctgaaacccacatcttccttctacatctttgtaagaacttaaatatggtgtgatgttattgcacatccaccagagacttgacgctttctgtttaaaacctaacatatgcttagatattaataaaatagactctagaaccaactcctctgaaatgggcctgtaacagatgctgtactgctcagaaactttaccaagtagctgtagagcccagcctcgcctggtgacttacatacccctaggagagtctttaaccaaagactgacaaggwtgggggtgtttacttcagctcctccttctcccaacyctcatcatctgcccatcccccaaacgggacaactctgagaagtgtctctagagttctcttgtagcaatgagccaaaataacccttcataagaatttacctaatgacacacccttgttgggcttccttcctttccctgtctagcccccagacgctctatttctttctcccttgggacagcccttcctaataattcacttccacttagtgtctgcttctaggaaatcctacctaagacaggcttcgttccacctaaaggccgaagctactgtgatattttacaatccttgacttttagctacatactcattattattatcattcttactttatcctttacactaccttgatcactggagtaaccttaacctatctgcacatagatctttattttctattgtgaaggtgatattattaggaaccaccaactgaaattttaccacctctataaaacaccagacaaacggtgagacatatttagcttcatcatccactgtgtggctttttctttttgttttacattaatccctattaaagagattattggctgggtgcggtggctcacgcctgcaatcccagcactttgggaggcygaggcagatgatcacctgagggcaggagttggagacagcctggccaacrtggtgaaacctcgtctctactaaaagtacaaaaattagccaggcatggtgtcatatgcctgtagtcccagctacttgggaggctgaggcaggagaatcacttgaactcaggaggcagcggttgcagtgagtcgagattgcaccactgcacttcarcctgggccacagagcaagactcggtcaaaaaaaaaaaaaaaaaagattatcgcattctattactattagttttgtctttctacctcccctgctaggctgttatctactcaatggtagggctctgattttatccgtctttgcaaacgtgtgtagaaactaatcgctaataataaaagttaagtaaataaattcaaaattctagaagcacatcagtttgtccagagataacatgtcgagggtgctgttgacataatttttataatgtctgagaaatgataaccaatagcagaactaccaagcatttttctgtttctcaaaacaaacttcatagaaacctgtgttttggtcagtttgggcttctgtaacaaattaccatagacggcttataaacagcagaactgtatttctcacactgctggaggctggaagtcaggctggaagtcaggtgtccgcaagttctgggtttgaaggagggccgtcttctgggttgaagatggccgtcttctgggggtgtcctcacactgaggaaggaggcagagctagcttctgggatctctaatcccactcatgagggttctacccttgtgccctaataaccctccgaatgccytacctcctaataccatcatcttgggggggcaggatttcaacatataaatktgaggggaagattgagtccataacagcctcagatggaacgatatgatgggaaatccctttayctcaaaggaccaagaattcccacctcctgtggaggataccctttaccttccttagtcagcaggaagatamggggagtgagcggrccagtgaaaaaagcacccgagagttatttacccaatgccatttctaaaatgtcamgttatttaacttgagatgattgccacaggaaataatccatgaaatagctcttggtctttttgaaattttgtgtcattattagactcgttcatcaagaaatttgcacctgagctcattrcagctcaagctcaaatggctttcaaatgaaaatgtcttttagcttaaataggaaggatagccatccttccaaaggaaatggacaattgtattaatgtctctttggtttgtattacaatccatctaactagtatttacaaacgaaatgaagcattatttgaatgtcagttgtttctagagagataaatgggattatgtgcttaattaggagaattcctgttcctgggtccagatttaagactgatctttgcgtttgatgttgaggcatgattttctctcaggaaatataggcagaaacctaagtatgcattcacatttttctgaatgtttaaaaaactatcagagagaggaccrggcacggtggctcacgcctgtaatttcagcgctttgggaggctgaggcaggcggatcatgaggtcaagagattgagatcatcctggccaacatggtgaaacccatctctactaaaaatacaaaaattagctgggcgtagtggcgtgcacctgtagtcctagctactcaggaggctgaggcaggagaatcacttgaacctgggaggtggaggttgcagtgagccaaaattgcgccactgcacacgagcctggtgacagagcgagactccgtctcaacaaaaacaaaaacaaaaacaaaaaactcagagaggaagtaggggccaccttccagtgtcaggagggaggttaatggtgtctcgatccctgctgactttgtgtccttggcacagcctaatgaggaatagtgggagaccagtggatgtgaggttcaaggcaacttcttatcggatcttggccctgttaataactgttggccaggcacggtggctcatgcctataatcccagcagtttgggagrctaaagtggatgtatctcctgaggtcaggagttcaagaccaccctggccaacatgttgaaacccccgtctctactaaaaatacaaaaattagcccattgtggtggtgtgtgcctgtaatcccagctacttgggaggctgaggcaggagaatcgcctgaacccaggaggcagaggttgcagtgagctgagattgtgccattgcactccagcctgggcaacaagagtgaaactccttctcaaaaaataatataataataataactaactgtgacattgggagcgctgcttaatttatctgggcttcatttatctcctctattaagtgggagaaagaattgctgcctacttcaatygacgggtttttgtaaatatccaattaggtaaaagttctgaaagtcctttgmaataaataatacaaagaactatatggawgtaaaatattgttattttcaactttgataaaatttggctgtaacatgagaaacaagacttagtaaatcttgccatgccctcagtaaatgctgctagtgtaactaatttcgtatgtgacatatagatgataaacgaagagaggatttattatggttttgttgtagtttgttttgttcttctggtttattctagttcttggaagtagatggggaaaaattctgtaatgatgtgtaccagaaacataataggcaagactcattaaaccagaaagttcctgactggatctggcgtctgggaaattcagcatatgctaccagttgaatgttgtgattggcatatgtttggcatttgtcatatggagacacccgaagctctaagcaatagtagaatagcaagccccttggtggaaacaaatgaaaaatgtttcattattaacccaaggaaataaacctctgataaaacctatgaataatgcaaataaaggtatgtgagaaaaaaagtcagaatcaagggaaaagtgctgttttcctgatcagtgccttggttgtttggtggtggttgtttcagtctgacacactgactgtctttcaattaggcgtgtattttgcttctgttaggtgaaaggagacatcaagttaatgtaagaaatagtgtgtgttgggccaggcgcggtggctcacgcctgtaatcccagtattttgggaggccgaggagggtggatcacctgaggtcaggagttcgagaccatcctggccagcatggtgaaaccccatctcwactaaaamtacaaaaattagccgggcgtggtggcacactcctgtaatcccagctacttgggaagatgaggcaggagaatagcttgaacccaagagggggaggttgcagtgagccgagatcgcaccagggtgtcaagagtgaaactcagtcttaaaaaaaaaaaagagtttgtttcaaatggctaaattttccttggtcaaataacaaggtcaaaactgcacaccgacctggtgctgtagctcatgcctgtaatcccagcactttgggagaccgaggcaggcggatcacttgaggtcaagagttcgagaccagcctggccaacatggtaaaaccctgtttctactaaaaatacaaatttagctgggcctggtggygcacgcctataatgccaggtacttgggagactggggcaggagcatcgcttgaacccaggaaacagaggttgcagtgagctgagatcacgccactgcactccagcctgagcaacagagtgagactctgtctcaaaaaaaaaaaaaaaaaaaaactgcatacacttttacatggtaattgcttttggctcaaatttaacttttataacttaagaaattaagataactgaataaccattgcttcttgtgtgccatagaagatatactgatagaatgaacagtgtagactcttaaattctattgatacttcttacctctaggaacaaccctgaactaagtcacctgttacatatcctaaattcttcagtcttgaagcaccatattcatttgctaattgcccacatcttttgttcccccaattaccaattcggaggataaaatttttagacttattttctctattaatttttcctttgttagattataattatcaaacatgtttaaaagttgaagagaacaaagtgatataatctgtgattaattcaaacttaattattttagtgtcatctgacattaatttcctcggagtaataaatgttatataattttttaaaaatactattagaataccattaacataattataacttgaaatgttttcctcatatataaggaaggttaatatgaccgctgtatcaagcatgcttaaaatttaaataaccaaatgcctgatgggaattgggcaaattatatgtagccatggctgctctggcaagcaacttacttgcaccacctaaaatcctggtatgttttatttgccttttccgggaagtggagcaaatttctgtgtaattctrgcagttcacagaaatcaagactggtatctcttcttgacaacttaagcctgatactggatggaataccaggacaattcagatattttttaaatttttttatttttattttctcagacggagtctcactctgttgcccaggctggagtgcagtggcgtgatcttggctcactgcaacctccgcctcctgggttcaagtgattttcctgcctcagcctcccaagtagctgggattacaggctcctgcctctacacccagctcattttttttgtatttttagtagagacrgggtttcaccatgttggccaagctggtctccaactcctgacctcacgattcgtccacctcagcctcccaaagtgctgggattacaggtgtgagccaccatgcccagctgacaattcagattttaaaatgaacttgaggccgggcgcggtggctcacacctgtaatcccagcgctttgggaggctgaggtgggtggatcacctgaggtcaggagttggagaccagcctggccaacctggtgaaaccctgtctatactaaaaatacaaaaatatccaggcgtggtggcacatgcctgtaatcccagctactcaggaggccgaggcaggagaatggcttcaacccgggaggcggaggttgccgtgagtcgacatcgcgccactgctctccagcttgggtgacagagcgagactctgtctcaaaaaaaaaaaaaaaaaaaaaatcaacaataaagtaaataaaaaataaaataaatgtgagatcgcataggagagaacattctgtgcatacatttaaagtgagaagatraaaatgcaagatcactgattatctggcaaagtaaataaatgacactgagatggatgaaattttratacctacaactgcttctgtggtcactaaaagtctgcaacgtcaaataaagcttttctagtctcctgtgctgtataattaactttcattgtcacttaaataacataaacatccctttttcctggctgccccctcacatgacttagaatctctatttaattctgtgctatgagcattcctctgttgctgtgtaacatgattttgcagccaggtttgstcgtgtgggagtgctaaagactattagactcagtgcagtgatgttacctggcatctctgtgtgtcctcagggttgtgttattttatgagcatcttatatgsttatgtatccattatgtactgcctgttttatatkcatctatgtatttatccatgcaacaaaagttttccttggttagtttcttctcaacatttttgtccatgatcctcataaagtcataccacattcayagaaggtacaaatccgaaaaggagagctagtagagtacaagagataacagaagcaaaaatgaaatgattgcaataagctgcaagaagaattttgattttgctaaaccaaaattggacttacctgggatgaaagtaaaggtttcatagtcagaaacctttcagagggtccagggcctaggacggctctcttctcattggcccctttgctgggcctgcaccttgccatgtttttttgtttgtttagctttccaaaacatgactgtatgcaataacaggattgaggctatcyattggcctgggsaggagttaagatgatgaaagctctaggactcagggttgaccacaagctcagggtcagccagcggtatgaagtacaggtataataatggtcttaggctgagttacttaaagtgtgacagggtctgartaattacaagtattacagaactctctcctcctctacytaataaggagagctggtttgggggaaggtccttttgttttgccgagctgactggctgactggggaggygaggaacttagaacacacttatacaaatttagaacaaaggctacctgggtttaggattgggctgggaagaggagattcctgaagagatgaaacagaggctgagggagggcctcggagggaaaaaagggaggaggaaagatktgagcagctgctgtgaggggtggaactgggaggagaagtgggcgggaattttttgccgatgtgactgctctgggccaaggcgctaagattagccaagaagcctgggattatcaaggtgagttttctagattagcctatgtaatagtccaatcatattcttggcttaatatgtcaatctcaatttttgkccctggtcctggcattaaaggacacagaaaaactagagttttcccagcagaggaaaattaggatactgtgttgttcggaaattgtgatcagagggacttctgactgaagtggacatgtttaatttagagaaagaaagaccaggggacaccaactgactgtcttcagttattagtggcactgtcactaggaaagagcagtcagtttgctcagtgttgcctcagagaagcagtcctggggggagtcgaccattgggtcagtaggaggaagaaccctcagaggggctggaggtrtccatcagtggttagggcactcggcggagcagtgagccccccgctacagaagcccaagcccaaccgagatgaccctctaccctctgttgggggtttgcgcgagtgctgtgctctgtgccccgggtggaggtggaggtggaggtgatggtcagtgtttgcttccaagtcagtagggaaggaattagtatctatgctatgtgctatatgccccatgcattgcacttattttctcacttaaatttctgagagacataatrttctctatgaatgaaggtttgggggctcaggcctattaagtcatttgctattcagtggtcaaatgatttgagccycagatctgttttgctccaaaactagtgttcctcatgcatcacgctgtctctgataattaaccagcatctcaatattaagctctcttgtggaaatgcygtatgtaaaacatttatggcaagtatgtttcttatagatttaaggagcagtatattttagtggttaagacatgggtgttggattaatcagacataggttagagtctcaattctgcctgttaatagccctgtgactcttgggcaagtaacatctctgggctttggttaacccatacagtagttacctcacagggctattttaggattaaataaaataatgtagagagaatgcacctgatgtcagttgttttcattgctgcaatatytaatacctatctagacatcaaaggaaaagagatgaaatactaagtaatatccctaaaagaagcacttgaactgaaaatatttaggatcattggactacttytttgcacctgtaatccctgtcatctgaattytcttaccttccgcaacctgggaacttgggtatctgtaatatcacttctgcagtcaatatttgacttgaccttcaccttaacaaactcaccaaacacaacagccttgcgttttagtcaacccaagggcrcaggaatcattagtcaaatcaatgaccaggatagtcataggacgcccatactcatagaattcaaccatttgtcagttacaagccaatcactgaatgtcagcaaagctcagaagatattggggccagactctcttgctagacaaaaactaagtggcttcgtttttaactcttatayttaggrtattccttcttatcatctctctcctagttgtttaacgctaaacggctgcaaaatgatggctgcttgttgtagagggcagctgaccaaaaataaggaaatagaggagggatgccaaactatcagggattcagaaatgtgtttctgagaatgctctttgggccactctcagctgaactacctgcaaactaagaaatcttaatccctgggcctcaaacctactgaatcagaagtccagattgagaggcctggggattttcattttaacagtcaccttgggtgattggcttatgtttcttctgcaagaactccccagggccatccatcccagcagcagtagagtccagagcctaggatggcccttttctcactggcctctttgctggcccctggccctgtgcccctgcctttgccctccctgtctggatggctctccccagttatctgcatgatgcatgcctcaamttttaggccttcctgaaatgtcaccttatcttgaggccttcctgatcaccctatatgaaatgatgcaccacgcactcatcaccatcctaacagattgygtggcttactcagcctcgtgtctgtctccccayatgagggcaagggttttggcagctttatacaccattgtactgcctgagcccagaacaacctctggcacctaggagggactccgtgtttgaaaaccctaaggaagaatcagggaagagaggcctccatcgtacagggagttgtgaaattgatgtgaggatttctgaatcctcacctctttctattctaatcctacattgcccttttaacttggattgtaatttaaaagtattaagatgtcaaaaatggtgaaaagtttagacatgtagacatcaatgactttagagattgttttctgtatagtgagaatgacacgtgacagatacttggacagatatgtccagaaattctaaggtctttagtatcatttttaatttttttttttttttttgagccagagtttcactcttgtcacccaggctggagtgcaatggcgcaatctcggctcactgcaacctctgcctcctgggttcaagtgattctcgtgcctcagcctccagagtagctgggattacaggcacccaccaccatgcccagctaatttttatatttttagtagaggcggggtttaaccatgttggccaggctggtctcgaactcctgacctcaggtgatcacctgcctcagcctccctgagtgctgggcttacggacatgagccaccacgcccagccagttaatatactcttataattttaacttggggaaactgagttgacttacattgtttcaacttttggcacctttttcaggattgtattctgcctacctatattattggggttgtaataaacattaatgggatctttgaatttatttaaattcatggccgggcatggtggcttaggaggctgaggcaggagaattgcttgaacccgtgaggcagagattgcagcgagctgagatcacaccaytgcacttcagcctgggtgacagagcaagactctatctcaaaaartaaaaaataaaaaataaaataaattcagctgggtgcagtggctcacgcctgtaatcccagcactttgggaggccaaggcgggtggatcacctgaggtcaggagttcgagagcagcttggccaacctggtgaaaccccgtctgtactaaaaatacaaaaattagctgggcatggtggtgggcgcctataatcccagctactcgggaggttgaggtaggagaaccacttgaacctggaggttgcagtgagctgagatcaggccattgcactctagcctgggcgacagagggagactccatctcaaaacaaaacaaaataaaataaattcgcaacaatttttttttgagaaataactctttaggtaggtgggaaattatgactgtggtatttctgatattttgggtttaatttacatcttttgcatgtgtctttataatctttcactgtttaatttgagagtttactaatcagcattaaatttcgcatagctgcaaaattcagtgtcagcagcccagtattttctctacgtagatgtgaatagggattttcttctgttattggggcactatcaggatctagttcctaaacaattaagctgcgattcaagcagcctacatttttttgtctgatgtttaatgcatttccatgagactcctggaatatgagtgtaaaacaaaggaatgtgtccctggtattcagatagtcgatgatgtaaatcctccaactgatgctgctgatctcttaatattttttcctgtagacaaagaagctgtaggtgcaatagagaggagaaaaaatgacaaggacatttgaaactgaaattaatcttagtataggagaaatggaaggcaaattgacatatcagggacatgaacaattatgaaatatcattggtcaggtttccaaatgctaatttacccatgtgtctaattttcttgatgagatgaaaattatagcatcccaattttcctttgagaaatgtttttctccagaaatatacaaatgttattttgcaattgtattcctatacattcattctcgttaattaaaaaaaaaatstttacatggagaaasactcaatataaatacattttacagctctagccaaagccacagtcttaaggtattgttcattgtgttaatatgtcccctggtttctattttactgatgctcctgtttagaattaaggcgatccttcttcatgtgtcctcacagccctgctgtaattgacctggcaggccgccacattgtgggcccccacggtaatcacttggagaggacatcctgcctctctaatttgactgacaggacaagccctgttttaaaattgctgtcatgtgctttttatcagtaaataacacccatgctaccaagcatgtgtacactgaaatagacagctgtgtctttttaatgtgccttttccccagcagaggaaagtggctgaaaacaaccagagcttcatctggctgtaaaggtcctttctgctgacgacagtgctttttgaaatcttttctcacctctttacaagagagccatgtgcatactctgtagatcggttgatctcaagttaaataggctgrcttcccacacgcggtcgttgcctcagagattctgtctggatttaatattttcagctatgagaaaatacaaaaacatggaatcagtctgggcaggactgactactggatgaatttctgcaccacatagcacaccaaactttctgccacttgtttttcatgaagacatgtaattttagtatgatgaataatgatggttttttaagttgtgttgcctttaggtatttagatacttcttttcttttttttaattttatttatttatttagagacagagtttggctctgtcacccaggctgcagtgcagtgacacaatctcagctcagtgcaacctcctcatcccaggttcaagctattctcctgcctcagtctcctttgtagcttggattacaggcctgtgccatcatgtcagctaatttttgtatttttggtagagcaggttttcaccatgttggccaggctggtctgaaactcctgacctcaagtgatccacccrccttggcctctcaaagtgctgggattacaggcgtgagccaccgcacccgccgaggtatttgggtatttccaactttgacttttgaaattatattttgctcttacatgaatttttatggaagagatatattcagttgagaagatgactatatttataccagtatcaaaacaaaacaataatgtcgtagctgtccactgggtgtttggggtaatgtagtttaagaagagaatccacaaatgtagacttaagagagaaggcaagcccttgaataaatcccacaatgaacctgatgacttgtgttttcaccaacacaagtcttcctataaatattaaagcatcccacatacacrtaagtgacaagggccttgggaagggaacagttgacatggagatggacactgctggtggagagaacaggagatgggaaagaggaaacatctacaggaagctgatgtagaaatagggacaggacaagattgcrggagtcatctatttcacacattctgtctgattctgtttgcctgcaatatagggtcccagaaaggggaacatggagacagaagtacagagacagggagatccctgccggcagattgccttggaggaggtggcagtgggaaagatgcgatcacacgtgcactgtggagagatcccccaggctgcagggaggaaactgtgggcctaaagtgggaagacagttcaagaccattatgccaggtgacagggaacacgaggaagaaacaggcataaaatataggtgatgcggaaacccctggcaactcactgggcctgagcaaagaagcgggaacatgtggtgatacttgttggaagctttaggctacggagtgaggtgctagtgagatggcagagtatgctctgtaggcattttgggaaatatgggattggatatagggtggaagggaaaacagagaaatttccgtgtattgattagctactgtgtgtcagatattttgctgtttaatagttttgaaagctccccaggtgactgtgatgtgcagccagggctagaaactgctgtcatctcagccttctctgtacctagttcaggcaactggagtttgaagccagccttstaagccttctctgggagatttatgagaatcttttcgaagtaaatttttaaaagttataaaatatctaatataattgttagaaaactctttaaaaacrtacaattggtcaacaaccatctatttcttaaactttggtgtacatatatatgtatgcatatatgtatagacttacatatgttacatgtgatttggagaaagaaatcaatgcatctttgcatgctgtgttatacttcagcttttcctacagcatctttgaagtgctgtaattgaacataggcttcaaaaaaatgtgtttattcatatttcttgcagttctttaaaagtaaactcatgacactccacatatgaatgtcatggaccaagctgagcttgagcttttctgctcaggtagcagagaccttcatcattaaggaaactcactgacagcaaggcctagccataaagaagtttgccggtatcacascatcgatgcaatgagaggagtaggtaggtaggtgagatagcacagtggaatccctacagacaagcagrgaagatggctcgaaggagatgcagcaagaaacttcactttctctactgagttccatgtgttgtctttattttttttaaagcaggtgaccttaatacataactcagagctaaaatgacaccaggtacccaaaggaactggaaacattgtgagtagaagattatattggtctgtgcagaatacttccttagtcacaatgaaagcacattcttttgttctggacccttagaatagaaaataacaccttctgcttgtcatttttatgcatccagaaacacagattttcaacatcttatagtgaaggcattgctgagtgaagtatagcacacatgttttacagtagttcattatagtttgttagtaaagcagcatgactggaaataggctgaaaccattttagtgcaggagaaccacggctctttggtttggccttaagttgtaagcagaaagctttgggaacagtcctaccatcttcatggaacagtcagatgttgtacttgtcattgatgtttttgctatagtttgatgtgtaaataaggtacttaattgttgttggagagagaagtttaggagatggttttcagtacatcagaccagtgctgaccaggctcagaccaaattctttttttttttttttgagacagggtctcattctgtcacccaggttggagtgcagtggtgcgatcttggttcattgcaacctctgcctcccaggctcaagcaatcctcctactcagtctcctgagtagctgggattataggcatgtaccaccgtgcccggctaattttttctatttttggtaaaaagggagtttctccatgttgccaggctggtctcaaactcctgagctcaagagatctgcccacctcggcctcccaaagtgctgggattacaggcatgaggcagtgagcctggtcctcatgccatattttaactttgattctggaatgctagagaaatattattatttatgaatatggatgattgagtgggataaatacaaaacagtcatttgatttatatatatatagacacacacacaccatctattcatatataggaaatgggtactctgagagacagatgatcttgcatgaggtcattatatatgtgtgtattttcaggtatatatgtacatatatatgcatatatatgatgaagaaagacattggacaaaatattaagtattataataggaaccagggactctaaaagttatctgaactcaaactgagaactgtctaacaaggcaggaccagggcagatggggagactggagtttgcagaaaggtcccaacccattaggattggtagtccagccatcccctctgagctgcagaaagaccgagcaagtgatagcttggggaacatgaacacagccaactccgactggcactgctgtgaaggactctggtgagatatagatcttggagaccctgggcttccctttagccagcacctgttaagagttttttctcatacccccaggaagaggactggggatggaagaggactggggatggaagaggactggggatggaagaggactggggaaggaagagaactggggaaggaagactggtcattgaagaagtagtgttcttaggtaaggatgcttctcctctgatgggaaggcagggggtcaaggcagagtttagaaattgggccctgcctggtagctggcaggagtgctctctgtcctcatttgggaagcggaaagtgcacaggcaggaccttacagatgcagtctgcatggctcttctccacacagcctctactggagctgcaggcagctggaggggcagatctggtggaaacatgtttagcaattagccagaaagtggctcgggaaaggggcaacttgagtgcagttgtctgaggctggagatggtgtacattctataaatgtatgtgtagactaaatttactttggctgatttaattactccctgaagttttaaaatatattcagtcagygtatattgaataactactctgtgcaaaaaataaagccatataaacttcaaggagtgtgcggtctaatgaagaaaatgaaacttgtaatcaagtgattacattgcmaagcaccgtgccaagttgtaaaagaactaccgtaaagaggcacagcatgctttcgatgttcaaagaagggaaaaagaaaagtaacttctcagtggaatcatgaaagggtcatggcagatggagtcctgagagatggggacagaggtaccagcaggaagaagcttctggaagtggagagacatgaagtagcttagagagtacgcctaccccggttcaactggagtagagctgtgggggaagacaaagacatcaacctgctagcgtaagatggcgaagaatcacataagatctgaacatcatgtcaagacatttgccttttcttcaataggcaactcctttttggtttgttttgcatgccccaaatattcaaagacttaggcagatgatgtatgactaacatctgggatttcatgatgtgggcctgtgtgaaatattttatgtacatttgtcttattaatcctccttcatatctcttttttttttttttttttgagatggagtctggctctgtcacccagtccagagtgcattggtgcaatctcggctcactgcaacctctgcctcctgggttcaagtgattctccagcctcagcctcccaagtaactgggattacagatgtgtgccactgtgtttggctaatttttgtatttttagtggagatggggttttaccatgttggccaggctgatctcgaactcctgacctcaggtgatccgcccgcctcrgcctcccaaagtgttgggattacaggtgtgtgctcggcatatatctcyttttataagatagaaaatacatgctcagacaaagtattttgggcaagatcactgagttggtaaagtgtaaaacccrcatttgaagccagcctgttttcactcatcccctttgtaatgcaccacattgcctctattgaagatggattttttgtctttttttgagacggagtctcactgtgtcacccaggcttgagtgcagtggtgcgatcttggctcactgcaacctccacctcctgggttcaaacaattctcctgtctcagctccccaagtagctgggattacaggcccctgccaccatgccctgctaacttttttttgtatttatagtagagacagggtttcactatgtcagccatgctggtctcgaactcctgacctcaactgacccacccaccttggcctcccaaagtgctgggattataggcgtgagccaccgcgcccagccataaatgtatttactttaaaactgattcacccagagaacaatagcattgtaactgggtaaaacatgagtgctcagtcttgagagactgtccttcctctgttgttgctgcttacaataatgggttggaattagctaagcagatacaagaatttgagagccacaggccttccctcattttaccaacattataaaatgtgaagcacgtcagtacagccgataagcacctagggccagaagatgtagtttaggttgtcagtgtttgggaactgacattgccaagacattattgcatcttttctgctttattaaaggcgacttagaatgatgacttccagttcctgcttctggcaacagtattgagtgctggctactgagtttacwgtatccccccagggagagaaacagactttttcagtgamgtctacagtaggagaggtgtagctatttcytttgttccttgtacaaaacaccatactcagttttgcttccgatacagataagaaatctttgttcaatctagtctgtgttcagaatccagatttacactgaccttttgtgtggaagagatagattattttttatcacaagtggtttacatttcttattaattcagacggaagttaattcactcaacatttgtagggaacagagtgggcagggtgctaggacacagagataaaaacattagcaccctcgaggacatcttgagccattgagctttcagtcagacatcataaagactgagtaagaaatatcaaacctgagcacaaaaaagatactacccaagggactcttaaagtgcaagagatgaagcaaagataaaaccaagcccctgcctgtcagcccctggggggatgtgtaacgatgtgcactatgagatgtgtgctcacgtctccgtgatgtagacttagctctgtaaggtgacaggaatatgcttgtgtgcgtgcatatatcataagtgcatattttcactaatagcagtaaagatgtttgtggaaagctaggttgctagttttatagtccataaaagcagctcttgggagtctagggacatacttggatttgtgctatctggagagaggagttggggggagataccttaaaaacacaattcaggggaaacttcttccatttgggtaaataggggaaatatattttgctgtaggccaaagtgaagatgtggttgacgctaagaacctgtcgttgccttaggtgctgttgtaaagaatgttagaaggtttacaacactgtggccaaatgtagataaagtaagttttgttacattttttttttttttttttggagtcagagtctggctgtgttgcccagactggagtgcagtggcacaatctcggctcactgcagcctctgcctcctgggttcaagtgaaaccacctttgcaaaattatgacttagacagtttatcaagattgtaacatccctttcccaaagcagacctccttcttgcctggggactagattgcctttgtaggactaccattagcgacaagattagaaattacggtttaggagtcatgcagctggagcctacaagattctgaccctccctaaactgcctctaagatcagtgcttgagatatttgcagaccctgcacttgatggatcagctggccccacccagatggattaactggctyatctgatcttgtgctcccacctaggaactgactgaatgcaggaagacagctccgggtcctatgatttcatctctggccaatcagcactcctggctcactggcttcccccyacccaccaagttatccttaaacactctgctccctgaatgcttggggagactgatttgagtaattataaaactcaggtctcccgcacagccggctctgcgtgaattactctttctctattgcaattccgcaattcccctgttgtgatgaatcggctctgtctaggcagcgagcaaggtgaaccccttgacggttacacaagagattctcctgcctcagcctcccgagtagctgggattacaggcatgyaccaccacccccagctaatttttgtatgtttagtagagatggggtttggccaggctgctctgaaactactgacctcaggtgatccacccacctyggtttcccaaagtgctgggattacaggcgtgaaccaccacgcctggcctgtacattttttttttttttttttttttttggagatggagtcttgctctgttacccaggccggagtgcagtggygtgatcttggtttactgcaatctccgcctcccgggttcaagcaattctcctgcctcaggctaccaagtaactgggaccacaggcacacgcggccatgccctkctaattwtttgtattttartagagacagggtttcaccatgttgcacaggctggtctcaaattcctgagctcaggcattccacccacctcggcttcccaaagtaccaggattatgggcgtgagccactgcgccaggcttatactttttaacttacttttctttaaattttaggatgcgagtctctgtcatttgaattgagaacatatattccattaaacatgctgctaatagcgatccctcatgcatkacttggacttcataagacgctttccagtgcttttctcactgcattctcacagcaaccctaagtggtagatgtatttctgctcccagggaggcagactgtgttcttcattstgcagacgaggaaactgagactggagatttaaatattcacccaaggaaatggctggtaatggtgggtctcggactttaacccggaacttctcacttcagattctttgtctttcaactaggccacactgttttatggcagtctgtttaatttcaatgtggctttgacttctgactatgagccattaagcggcagttctctaaatctagcccctaagtgagtcttcaaagtctaacctgagtacccagctgcctacagcaagttttcactcagctattcctcaagtgatacaaaygaagataattctccgccccatcccacttccatttccaggcaaatccatcttggatgctaatcatgttaactaataattaactcctgggaatgcctctacttttttactttttttttttttttttattgagactgagttagtttcgctcttgttgcccaggctggagtgcaatggcgtgatcttggctcactgcaacctccacctcccaggttcaagcaattctcccacctcagcctcctgagtagctgggattacagacatgtgccatcacgcccggctaattttgtatttgtagtagagacgggggtttctccatgttggtaaggatggtcttgaactcccgacctcgggtgatctgcctgcctcggcctcccaaagtgctgggattacaggcatgagccaccacrcccagyttaagatttttactttatctactgttgctataaatcctggccttaggtcaaaacaaccttgaccataaaccctgcccttacataggttgatgtagcattcttgcctttccctagggatggacttcagttgtcctacacattcctttcctagggtatataagccctgggtgtggtgggtagcagcacaggaatccactatctggcctcactgctgcctgagacatggcttctgtccgtaagtccctattaaatgtttcttttcgagagactggatgggtcagctcagcttcctcgaacttggcgggtgggttgcatagacctgcctgctsyagaacacagaggtgtttgggccatctttctatacmttttaagaaactcagaatgaatgaatattaagaactwtcatagtatatcgtctttataattttccattgtaatatcaatattctgtyttggcaggggaatttggagagtgtggaggagaaaaagaaatttagaatatataggcatgcttttctagttcccttcaggtgtaaggatattttaaatgtaatgaataattgtaactattgaatgaagtggtatttttatacattcattcccaactactaatttttttcccatcaagttagaattaaactaatcagtataaatgtatcactaaaaaaagctaagtatggaccggcacagtggctcatgccagtaatcccaacacttgaggagaccgaggtgggcagattgcttgaggacaggaattcgagaccagccaggccaacatggtgaaaccccatctctactgaaaatacaaaaattagctcggtgtgatggtgcatgacagtccagcttcttgggaggctaaggcactagaattgcttgaacccaggaggtggaggttgcagtgagccgagatcacgccactgcactccagcctgggcgacacatcaagactccgtctccaaaaaaaataaataagtaaaaagctgagaaagctgagtatggtgctgttactctcttctaggtttttgttttgttttgttttaattagagacaggatctcactcygtcatccaggctggagttcagtggcgctgtgggatcatagttcactgtaacctcaaacttcaggactcatagaatcaatctgactgcctcagccttgccaccgtgccccatcttctaggttattttactyccttttcatatcaactctttgcatttaattagtaatgtcttagcttccagacagtatcttttctgtggtgttgcgtacatgatactttaaatttacactaaataagacaatactaaccttcaagaagttaaaatattttgtgaatagaatcttctaagtaatttatatcttggcttgaatgcagtttaatgactattttctgtaaattatgtaactattatttatatttatttcttactgatctttgctcttctattataacttgtcttgagtcctgccttgtacttcctgtttggtttatctgagtaaattttttttttttttcttttgagacggagtttcacttcacccaggctggagtgcagaggtacaatctcggctcactgcaacctccacctcccgggttcaagcgattctcctgcctcagcctcccragtagctgggattacaggcacccaccaccacgcctggctaattttttgtatttttagtagaaacagggtttcaccgtgttagccaggctggtcttgaagtcctgacctcaggtgacccgccgccccgcaccctcccgcccccccgccctcccccgacctcccaaagtgctgggattacaatcatgagccaccacacctggccctgagtaaatattaaattcagttgattgttcctgaagactgagctgtctctttgggccatgcctctgagattggtggtggaaggaggcccaggctggatccagcagaaccagccattgtcacttgttaatgtggccttgggcaggtggcttaactgtaatgtcctaattctccttcccagggtggatatgagattaaaaggagygactgtatgtaaagcgcctgatgggaagaaagtgctgatgagagctatattgctttctcctattccctcctcactccttttaaaaattaaaacacacatggaccatgtctacatgtactgagcctttgttaaagttagtatttatcagctgatagcagatttgttttttattcgatcagttttaaccagtcgtaacgaagaaactggtttgacctttatacrtgacccagttagtaaactgttcatctagaaacctagaaacctatatgctgatagttctagttgaataattcttgttaattttatttaccaaagaaccagagatttatattcccagtatgaagtgattttcacttagataattttttattcaacctttgtaactattttattttgtggaaaaaaaaatcctcgaatgtacttattttggattttcctgttggtgaaaacggkttttgcataccttcgaagactgttatgtgcgaatttaaaatgcagattagctctatcatacactcactgtaactatgcgtcttgcttgtcggtcttgctctgagctgtggatactcagttatgttttatccyggtttcakatcagaaacagtgctcatccttgctagaaactgccctytgaagcaaagttcaagttctcagggagagagccaatcaccctggctcctcctaccttcgattaagcagagaacaagccttagtatatgcaaatgtgagctttgttttgtagagtaaatcctgtttatttgtgttgtgggctttgtttttatttttttatcttgttttctctcttagaaaagctcaagcctcacacaggttattttcccctggtrcttgatggtctacacagtttcatttcatcatgtcatacttagggartgacccatctttcaatgtgtcttaaagggctaacctaggaattattagccacgtgccatacatcaacaaggtacactttgatagactttttattgcttaagtccacagcttctgaaaatctaatcctctgtgttttcctctgtctccaggcctctctgggcctgttgttattctcttatgcagcttttctttttcttccatctagctatcttctaccaggctatgggctggacttttattactttggtccagaggtcacagctctggtttaatccacaaaccttcagtacttttttttttttttaaagcgcgatctcggctcactgcaacctccgcctcccgggttcaaatgattctcctgcctcagcctccygagtagctgggactgcaggcatgcgccaccaggcccggctagtttttgtatttttagtagagatgggtttttactatgttggccaggctggagttgaacttctgacctcatgatctgcccgcctcggcctcccaaagtgctgggattacaggcgtgacccaccgtgcccggccacctttggttcatttttaagcttttgactgttttctgatttttttttttttttacttctaatgataccaagtattttgtagtagttgtttttttttttyccttagccttgtggaggttctgcattatagttcttataactaatttctatttaattatttttaccttgactccgatagtttgtcatctacattttatttcatgaacagaatgttaaaataaattaaaaggctgggtgcagtggctcatgcctgtaatccctgcactttgggaggccaaggcaggcggatcgcttgagcctcagaaattttgaccaacctaggcaacatagtgaaaccccagctttacaagaaatataaaaattagctgggtgtggttttgcacstgtagtmygaagctgagaggtgggagaatcacctgagcctgggaggkcrgggctgcagtgggccgtgattgcaccattgcactccagcctgggcaatggagtgagaccctgtctccaaaraataataataaattaacaatttaaaaataaatagtgaatcatatgttttacagcttagcgatttaaccgatgacatctcattcatttgacaaccttgtggagargagtcattcatttatttattccacagatttttttaagcattactacatgccagacactatactggatcctaaaaatatgaagtgaacaaaattggccraaatctctgactcgtggggctgcatttaattaaggaaggaagagaacacacagtcgttaaatagtgtattggccataagtgctaaggagaaatgtaaggcagaatgggaaattggaattgtgggagggagtcgaggagatggagccaatttctgactttagatgaggccacgcctcacggggcaggtgggrtttggatcaagcctggcctctctgagggagtgagcgatgtggccagcctgggcccagcatttcagggggaggaaagaagtacagaggcccttcaggctcaggggaggttgggtgggaggaccgggcagcaggaaggcccgtgagtctggagtgagctgaacccaggggacagcagctggagatgaagtcagagagcacctggcaagaggttattgttcctcttttacagagagaacaaatacacacacacagagggtcagagtggtcttggtggagggagttcctcagggtcacagagctagaaaggggcagagctaggactaagcaggactaactggcgcttggagcccaggygtgggctgggkcctcccactcaggtgtcatccttgatcgaagtagttgacattttatttctcactttgctcatcttcctgtctttggagagtaggaaagcatatttgtttctggaattctctgaggaaagatcagtcacttacattttaacctccattttgaagaatcagtgatatttcacatggaaaagtgtacatggggccagtatacatcacatagttttgacttcagtcttataaccttgrgagagtttggaacacaagaattctttttagaggacacaaaaaccttcataaaatgattatactgtctgcttaaaagagaagttctactaaaaatttggaaagcagtttttgatgtagtatcaaaaagtgggttgttttagtttgcaaacttacctcaaactagttagtcttcctaagctagccctttaagtcactgcagttccatagtttaggtgctggtaaatgaattgtatgtagctaagacaatgcatcagttgtttttgactttgtaaagaattcacataaaaatgaaagttgctcaagagaagagaattatggatgaatacrccctaaagtaaattgctcttctccaaaccaaggtccatgcattatattttatagaattcacagactgttgttaccatgacaggtcactcttagtccttgaacaattttctcacccaagactattaccaaaatcagaattatcaacagtctgaagtaattccaaggccaataaataaataaaatgactcctccaaatgataagaattctctttcaacacagagacgtttattaaaagtgcaatcccagatgcttgttgaatatttattggatgtggtcatcctgaagcaggacgccttaggtatattgtagcataaaatatgttgattaaaaatatccagggttacaatagctcctacacagaraatcaaattttagggctaaaagatttttaaattcactaataatgtgattttagtacttcataagcatatttgtttttcatttaatcctcaaaagaaccataggatatagggttgttaaccccatttctttttttttaaacatctgagktataacgggggcacagaaaggttaagtaacttctccaargtcaccagcaaagcccgtattctggatttgctttgaaatctagccgttgtgcttattcacactcacactatccttactcttccttttctttatccttatagttttgatcctcatarttttttgttttttaaacataatttctttttagagatggggtggtgctatgttgcccaggctggtcttgaactcctagcctgaagcaatcctcccacctcagcctcccgaagtgctgggattatacgcatgagccactaygcccagccaaacttcatagattttttgaccccataaacaaatctgttgtaataaccaatggattttttcttttttctttttgagacagtcttactctgtcacccaggctggaatacagtggtgcgatctcagctcactgcaacctctgcctctgggtttaagtgattctcatgcctcagcctcccaagtagctgggattacaggtgtgcgccaccacacccagctaatttttgtatttttagtagagacggagtttcaccatgttggccaggctggtctcagaaactcctgacctcaggtgatccacccacttcggcctcccaaagagctgggattataggcatgagccactgtacctagcccaatggagtttttctttcttggtttcttttatactatttctactttccatcgcttccattgagactttcagctcgtcacatctaatatctaaacaacaagccatgaactcatctcsttgtccttggtctcccttgactcccactgtcctgtgaattcccactctcctgtgaattcccactgcctcatctgtaatttcgtcatcaagagtcattcctaatttgatgaattctaaattgctcctctgatcactttataagcactcaacttaggtaacagcagaaatggagaggagggaacacagttgagccattgggctttagagcttcttggatgtgactgtatcaggaaggcatgagccatgactccaaggtttcgatgctggtaatagaatcaacagaaaatagaagaggaaggaaaatttgaggagcaagagttgattggggttatttgctggaayggtcagggttgaaggtaaatcatttacatttttcaaggctctatggtccaactgaaatgccttctttttgttgttgtttagtctgaagttataactctgtaaacattgattttttttttttttctgatcagttcatctgactcacagtgttataggacagaggactatttattgtgtaacagatgtagtacttctggttagtgttagaaagactttagagcatgggagaaaaacccagtgatgttgttaggtgtgtctcacctaatagctcttggagtaaggtgttcacctgccccatcatggtttgtgctgaccagcagcctacgtagcaaattcattggaatgggtgacttaaaacaaaacttgctcactttattagaaacagtttaacaaagcaaacaaaagccaaatattctttaatctgctttatcatgatggtatagaccaatagccattgttgtgtttactgttgactagtgtcatcaaaatcaaattgtaaggctgggtgcagtggctcacgccactaatcccagcactttgggaggccgaggcgggcgaatcactgaagctcacaagttcgagaccagcctgggcaccatggcaaaaccccatctctacaaaaaatacaaaaattagccgggcatggttgtctgagcctgtagtcccagctacttgggaggctgagtttggaggatggcttgagcctgggaggcagaggttgcagtcagcagagattgccccactacactctagcctgggtgatagagccagagcttgtctcaaaaaaacaaaataaaataaaattgtaattgatcatacaartattaatattctagcactaaataattcttactcaaagaaaactatcaggttgaggataataagcattaactggggacatcgaataaaaagtgagttacatctttataagtaatctcactaagtgtttcttagtttgatattccattgcgtcaaacctcctatgatttgaaaacaataatactgagtcaaaataaagatgttaaattaaaattctattcatgcttacttgcccctaatatttatgatcaatttgcttaggttttcttaatcttttattaagtaagctgtgattttttaacaatttgaaccatataatattttgtgcttaaaccatattccttaaacagtaagtatttggttgacaaaactataaatatacactataaatacatataatacatacattatatatatgtacgttatacacatacacacatatataatatgcttataatgtaaatatatggaattactatatggagtttgtgtgtgtatagaatagtaatatgttttttccaacaaactgagttttttaacatcgtgtgtccaagaaggggttataatacatttaagctctgctagtttttcttctaaagaccaaaatggatgtaatcatgaggaatatatgtttaagttttcacagtagtttgaataagccatggtgaaatatttaaggttatccagagggagaaaagcaccctttagtttayagacaattaaatttaaatgcagccataacttacaaggataaatttgaaccatccatcctttgctttactagctagagtctgccctctcatgttggcagttctttacaaagaagagaggatttcatgtgcttgcttatagttttggaaaatgtgatgagtttaatgatgtatttttcatttgtgaaatgagtgtagatagaaatcaaaatgatgaatagaagatgtgagtgatagtgacaattctgattgaaatgacagtgagaatgcaaaaatgaaatcaattttctatttaaattattacagcagcattcattaaggccctttcttaaatagagctggatattgcaaactggaaaaaaatattaatcatggatttgccctagatttttctgcattagtctggcatgaatgtttatatttaagctgcaaatagtagttttctaggtattcagaagttaagaacaatttagattaaggatgtttaaagctcatttgtaaaatgctcatactatttgagctgttttaaaaagatttgcttagcgaaagtcattggatcagaataattctgacactcttaatctttttttttttaaactaagrgccttagacattttctttccatttaaaaatttgaatgacaaaaccaagtaagtaattacttgaaatagtgaagtaaataccaaatttgtgcccagggaagaaaatacactaaatcttaaggaacacagaggcaattgtaagacaatacagtctctcttgcccatctttgtgtttgaacagattttgtaaattcattggtttgtartaatatttggcaagaggttcagaagtagtgatgtagcagccagttgtaaatagagaataaatttcacaggctaaatgattatgagtgaccaagagaatagcagcacttgggcaagagggaactggtggacagagaggagttgggaggggagatctgagatgctacaaacaaacagcaaaagaaaaatgtttccctgaattcatctcaatgctaaattatgtcaagtcaccatttacaatgcttagagttcattataagtgctactgatttttagtgcaactggttcttatactaaaaacatcagctaataaaatgaaatttatgttaattttttaaactaaaatagtagccagtgaagtgtaccatagtgtagatgtcttagaaatgtctgattcttctttggaaggtaaatgatcagtggctttcattaactgatttgcaaatccaaaaatgtgttcttccacactaagccatatttaaaaatatatatatatttttgtagagatgagggtctcrctatgttgtccaggctggtctcaaactcctggtctcaagcartcctcctgccttggccttccaaagcattgggattacaggcatgagccactgtgctcaaccatcagccgtattttttaacatgagtgaatatattttgatatcttcaattattttattgattcacagaatgcaatttgtgaatcatgaatgaatctaaatcatgaatagtttttagatttccttcatatatgaaattacagcaaaaacaatgtaaaatcctttaaaacataggatctcttcttcttacccaaggaagacagtttatttcctgagtccatttggtcatgggttaagcatcagatatattaaaaataaatgcatttggactaagkgccatttattcagtgggaaatagaataaatgagatgggtttgtttcatgtgggcctctttatttataattccatggcctcagaaagaagtcagtattatatcagtctgaactatgtttatgcatacacacacatacaaaatctcacatatgttaatatcaaaactattaataatacattatcacttcatctaagcatcacctaagaatagggcctgtttctcaaagtgtttgtggctggggcacctcctgaccacacaaagcccaaaataaagctatccaagagccctcataggctaatactagtaactggcccagagccctgaatgctcaattgatttgacacactagcgctcaagctacctttggaacatggaaggcagcacagagccttaattcgctggcatctgtactccgacarcatgcctactcttgtactagtttaagttattccgtattttaaatgagtcacttcgtaaatactgaccctcccttattgccagtaggtttttgtttgtttgttttttgagacggagtttcgctcttgttgcccaggctggagtgcaatggtgcgatctcggttcactgcaacttccgcctcccgggttcaagcgattctcctgcctcagcctcccaagtagctgggactacaggcatgcgtcaccacacctggttaatttttatattttcctaaagtgctaggattaaaggcatgagcccccgagccagtaagttttaaatgaggcatagctgaaagtccatgctatgaaggcagaatttaaaacatgaaataacgtaagtaacaatggtgctttgtgaaactactccatgtgtagtatacacatacatggcaaatttagtaatttctttgttgtgatgaagtgttgtgaataattcaaattatgtagctgtgttttctagggtactaaacttacatgtctatgtcttgtgagtttagagttagaatgaaacatgctaaatgcaatagttactattagaggactatttgcttctcattatttaaatttgctggccgggtattgtggctccctcctgcagtctcagcagtttggtatcccaaggtgggcggatcacttgaggtcaggagttcgagaccagcctggccaacatggtaaaaccctgtctctactacaaaaacaaaaattagccatacgtggtggcacccgcccgtaataccagctaactcaggaggctgaggcacgagaatcacttgaacctgggaggcagaggttgcagtgagccgagattgcgccacagcactccaacctgggcagcagttgagattctgtctcaaaaaatatatcaataaatatgctaacctactgttaaataattataaatagcagtgaggtaaatgtatgcatttgtgtgtacataagtgtggatgtctgtgtgtgtatatagaactacttaatgtaatgataagtgcttatattaatgttacattttaattttctattattttgttaatgaaaattcttgtaatttttatgtagtaagactgttaactgattagctcaccatgtgagtgttccataaatgtgttgttttatcttctcaaactaatgaatagtctgtttcatggagaatgcattgtaagctcttgacctatgaaaacaagtttttaaaacaactaccacacatttttcacagttgtgcataaacttagttttatcacttttactaattgtattcacttatagcatccagctaagtgtattaataaataaatggctctgtttaaaatgacaattgaggaaagaataactaccgtacatttttttcatggtatacataaatctattcataactacagcttctactattaaagtctaaaagattgttggttaatataatatatgatgtagacaatttttgagataacataaaacccagtttttttgtccattttagtttaccagaatgattccttcattcasttttttaaattcaatgccaaaatcacataagaacatgtagtaggcatggtgcttgccaggctcttgaactaagattagtgtaagattattttatcaaggacgcaatgatctagttcactggttctcaggctttgctgctcgatggaataatttttaatttagggaattaaaaaaatatattggccgggcgcagtcgctcacgcctgtaatcccagcactttgggaggccgaagtgggcagatcacaaggtcargagatcgagaccatcctggctaacgtggtgaaaccccgtctctactaaaaatacaaaaaaaaaaacaaattagtcgggcctggtggcgggtgcctgtagtcccagctactccggcggctgaggcaagagaatggcttgaacccgggagacagaccttgcagtgagccgagattgtgtcactgcactccagcctgggcgacagagcgggactccgtctcaaaaaaaaaaaaaaaatgcctgggttctaccccagccctcccccaccccaccccgagagattctgatttaactgctttgggatgcagcttggacatcaagagttttaaagctccccacaagagtctaaaatgcagcaatttgtataaactgttgatgtaagccaggaagatatctgtattcttgagagcctccttggcatcccctccatccttaaccttgccattaaggaggaattacctcctgttttcactgcatttccaccataggacattctcttttatccatttatttacacttctgcctcactttttagatagtcactgccttgcttactcctcaagggcaagtgtatatctgagcaatttctttaactactatgctcagcagaattccagctatatagtaggcatcaaataaatgtcattcactgaatgcaagtgaggaatgtttcaataagaaatgtttcttttttcttttcttttctttctttttttttttttcatggtagagtctcgctctgttgcccaggctggagtgcagtggcgccatctcggctcactgcaagctccacctcccgaactcaagtgattctcatgccacaacctcctgagtagcctcctgagtagctgggattataggctgcaccaccatgctcagctaatttttgtatttttagtagagacagtgtttcaccatgttggccagcctggtcttgaactcctgacctcaagtgatccgcccacctcggcctcccaaagtgctgggattactggcgtgagccaccacacctggccagaaatgttttcaaataatataatataaccgagtagtgatacaggaatctagctaagtctgatgtaagagactactgttctgtccagtggaagtgggtgggacttaatctgcttcattggataggtgtgcagatgtgtatggtgcaacatctggggccacagcaaggcactcagcagaggagttagggagaaggagctgggagttcaagggtagtgggataagtggacacctggccagatggcagatattgaactttcatgcaagattacattgagttgagggaccacacgtcaaagatgaattcagtcatcagctgtgaaggagggaaggatcagagaaggatcagagagaacatgcagtgcaaagacggaactggcgactgggagggagggctgccctcaggcacagcaatcgctgcattagcgcaaagaagcagcttactggggtaagaaacaccctccactgctaagtttccgcaggaacaagtggtaccaaacagctgcattttaattgatacttcagggcgttcctgggactcctcttatagagaccctttttgacagtcacatgcggccctagcctattagtagtacagacatagctcctttaggaactttctagtacttttcaggaagaaagaagaactcagtcttctttatcccctagggtcaagggctcccagagagtttgtttatttgtttaataactccatgaacagaaaagaacatttagacataattagagatgggggataggaagagaaagctgattcaagtaaaaaaaaaaatttraataagtaaaaccagaatctacaatgtacccgataaccaactcatttcaaagactgttgcttttcttaacattgaagttagaaattagttttaccaatacttaccaatactttgccaatacttatattaccaacacttacatctaccaatacttatataccctttcttgattatcaactttatatttcttctgattttatgagcatattaacatgactatatggctttttatttctaaaatacttactaatataatttgaattctcccaaaccattagaagtaacaataagttgtcaccaggtgcggtggctcatgcctataatcccaccactctggaaggctgaggcaggcggatcacctgaggtcaggagttcaagaccagcctggccaacatggtgaaatcccgtttctactaaaaatacaaaaattagctgggcgtggtagtgcatgcttgtaatcccaggtactcaggaggctgagacaggagaatcactttaacctgggaggtggaggttgcagtgatccragattacaccattgcactccagtctgggtgacaagagtgaaactccatctcaaaaaaaaaaaaaaagtaaaaatagttgtcaaaggcctcctaaataggatattcaataccatgcttttaaattttaaatataggagagtctctagttgtctagaataattccttttttttgtatatcactcttgcaattttgcaattttaaacatcaatctaatgtctgcaatataatattacaaatcagaaatactttctattaaccacttatactacatgaatagatttaattaaagaaaaattatagttttagtctaattttagtctaaaatatagtctcatttttgatggttttagtcatcaggactgaaaagtttttgttttttcttttatagagatgggtctcactctgctgcccaggctggtctcatactcctgggcttaagtgatcctcccatcttggcctcccaaagtgctgggattataggcatgaaccaccatgcctggccagaactgagaactcttgttctgtatattctcctcctgtgcaatactggcatttatctttttgtgctgtgttcaaggaaacttgagccatcacggccagacttttgcttcttaaaatcaccaagtgaggagaagaggacagagagaaagaccatgtggatatcttctgattacattaaaagctagccagttgtgttgagggtttctggaaggaacggatgcattgagcctgtcatttatcatacagggcgactcactttttctaacctttccccacaactgccctacgtgaccttattatctgtctttgaaaataaattggtagcattaagcttagcctgaatttgattcagtttactttttcagaaaaaaaaaaagtcaatttcaacaagatggaaggtaaaaactaaccaaccaagagggtttgaaagagaagaaattagtcttaagaaatgtttccctattttacttactattttcatattttatatttttttgtctactgcaaaatttataattagtttggggaattattataaacacaattgttcttcctggtattttagtttttaggttaattttctttttctttttctttttttttgagatggagtctcgctgtgtcgcccaagctagagtgcagtggtgcaatcttggcttactgcaacctccacctcacaggttcaagggattctcctgcctcagcctcccrcgtagctgggactacaggcacgcatcaccawattttttgtatttttagtagagatggggtttcaccatgttagccaggctggtctcgagctcctgacttcaagtggtccacctgcctcagcctcccaaagtgctgggattacaggcatgagccactgtgcccagcgaggttaattttcaaaagaatgaggacagttttactacctgatgcctaaaattgtcaacatttgccttgtctcycaattcataattgctattccatcctctaagtctggtttatgtccagttaccttctccagtcactcgtcttgaactttgacagtccagtcatgaaaagctatcacttggcttcccgcccatggtatgcctttttccttccttctttctctgtctctctcttccttctctttctctctctctttccttctttctctctttctttccctcttttcttttcttttcttttcttcagaatctcactctgttgcccaggctggagtgcagtggtgttagctcactgcaacctctccctcctgggttcaagtgactctcccacctcagcctccggagtacctgggattacatgcacccacyaccatgcctggctagtttttgtattyttagtagaggtgaagttttaccrtgttggccaggctggtctagaactcctcacctcaagtgatctgcctgcctcgacctcccaaagtgctgggcttataggcatgagctaccacgcccagctggaatgcctttttttgtctccttgccttggtcatgctgcttcctctgccaaggatataatttccacctttcctttcaggctctcgttttaataactgcttcaggtataattttccctgagaagcattcttcatcttcaatggttagtgagccaagtagcccatgtcagtgctactgtgctctatatgagaaacatatttaaaagtttaggatttgtgccagccctaacagactggaaatacctcgaaggcaaagattacgtctgaccaacagttagtactgttgtgcatagcaccgtatgctagactgatcttttatcactataattgaataattgcartgttttctcatttttcaggaaaaataagtaaatggataatatattccaaatttaaagtttttatcctataattgtttttaaacctacctttgttaataaagtgtagctaggaattagcaagcaagcagatagcacacacgaatatcacagtacagcatagaggcagccagtcatacttagatcagttgcttactgcttttgtggatgtgcatgctcataattttgatttttgtaataacattgttgccacttaygcatgacaaaattagtaacacctatgacggacactaggtataacaataactgcaaagaacattgtgactcccaggtattctgatgcttaamtaaggctgagaacctattcataatataaggggaattctcccttgttgttatttcagttattgatttagctgaaaatgtgagttgcatgctggtaattgagactagcattaattatttctagaatatgcagttagcagtgcaacataagcaccaagcaatcttcatgctaaaatgttttccccccttttgtgagtaaaggtatactttgtgctaaattccatagttaatgcttgatttccacccctcccatgaccatattagcagatccccatcaagaaaatcttttgttgtrataagaaatgacacaacccatttttagtaaggagaagctgtaaggaaagtgatgatagtaacattttcattcttccactttaatttgttacatattgctgtgctagatagattcgtctaagaatcctaatccatttacacacttcctgtgatgtttggcttattggcatgcagtgaacacttttcatcaacctttctgtgctatttcactaacacagcataaatataaggtgttgtgcttcaaataactctccattgtatacaactccatgtgagttgtattagctgaggcttattttcattgagacatcatcattttcagtgtaatctccattacttttaaattattaaaaattaaaatctctttatgtgaagtgcagttttcaagaaacagtgctcactagaattgtgtccttttttctatacaaagctgtagatcacgtatcatggggggctggttagactcaggtgcagggatgccaatttggagtcttaatacaagaatgagatggtggtctttagagtggtctggggtgagtactagtcccttactctccccagaccatgggctttattagtatgatctctttagtcgtatacatgtattattaatagtccatgaacaatatagagaacctaaatgatggcttagattctgatttcctattcccttttaattatctacattttctacagttgcagaatttacatataagacatttaatgtctaaatcacatgaaaactgtgagaaaggaaaacactgtagacatttttttttgtattctgtayagttctgtgtacatgtctgtgttcctgtttcacagtttttctagcaggtaaaacaaactgcactttaaggcaatatggtacatgtacatctagaatgtctataagtaggcataattgcatttcatgttgccatttcaatttgagctaatgtatctcagtaagtgctacaaacacaattagtaagtaataccaaagagtggtagcttccaggcctgataagaaaaaaaaaagtaatattaaattagkcagacacaaagaaaacatataaaaggggacataattaaaatgtaaaattactgggttattttctatagaaaaactttaagatctcaatcatgaaaaaatattagtggaaaacagtatgctattggtctttataaatggttgtttcattaaaatttcctttatgaaacctacttttcttcccaaatgtaggaaaattttattgttcagtgggwatatatatatgtatatatgttttgtttttttatttgtttgtttgtttttgagactgagtctcgctctattgcccagggtggagtgcagtggcgcaatctcggctcaccgcaacctctgctttctgggatcaagcgattctcctgcctcagcctcccgagtagctggaattacaggcgcataccaccacacctggctaattttttgcatttttagtagatacagggtttcactacgttggacaggctggtcttgaactcttgacctcaagtgatctgctcgcccggcctcccaaagtgctgggattacaggtgtgagccattgtgcatgacctgcagtataaataagttttaaggtgatatgagaaagtactttgcattgaaaagggaacagaggctgtttttctattataaataggccctggagggctsagagctggatgtcttcaccctgctccccagagagcagtccctgcttcctcggtgcagctggccaaggaggccactaaacaagggctgcatgccaagaaaatacagagatttgatcgtggccagacttacctaggagtgtcgccctctcacacgtgagaaagcacctgccatcatcatatggaaaatgcattccaaattctgaacaagttctgtggcatgaattcattcctcagaaaggcaagttccagtttttattcaaccaacagaatttcaattacaattgcaaaagaggaaaatactcaactttatctaactgctttggaccactctggttttggattaagtaaataaaaacgtctatttagtgaacgtagaggtgtcggtgttgggtgccgactgttgttttggcagattccaagctgtaatgttacatcggagaaaatgctttctgtcaagacactcttcactgaagaaagcaaagcctttctgggctgacctaaatcactgtgttccttcattaggccctttcagtactgctgtggagatttgttgcatgtgaagtgagctctcgggcataaaagaatgacatgccaaatgggagttgcctattttcttttgtatattaactagttgtataattcaccaggagggatagttcacgcaagcaggaacagcagggccatccagtcctcagctagcttccagcaggagtgggaattgcctttcaaattcagaataatttaatgatttacaccatttttattaaaaataaataaacagaacgatgtaataaaacaactaatgacttttttatacagcagtgtctgcgtaaaatactgctctggggatagcaaaggtacatcctttgtaatgtaagacatttgctatctctgtaacttttctatcccaggatggtatttgactattgtcactttcaaactmatttattttttaatgatttgagatgcatggatgtgtatataatgttttgggaaaaatctatgaattatgcatgatttacctgagagaatgttctaagataggcttgtttttaagatcagctaaatttagcatattgacattttttcaaatcctctttttgttgaggcttttcatttaaatattcagggaatatggcaacataaaatatacaaatttggtcatatatactggattgcctgtaagaaatgttcttatagtaaaatcttaatcagtatgtatagaatgggctgtctgtgccaaaccaaacaaaagggtccctaatggataccaggttggaaaggaacaactcagtgatggtagtaaatgttttaaaattgtgttttaaaattttgaggcaaactcggggtttaatggatatgtttgtagaaatacccacttaaaaaatagaagggctgtgacattaaagctgctgggttaaattttatttgttattggccacaacaatgatatctgcaaagcatcatgagtatttatttgaagtttaatgacttgtcactgaggtcagtggtgtttcctcattcttagattcttagttattttgataatggatttgtgctcatgagaagatctgagcattctcacttgaatagcaaatatctctatgaagtcttctctgcctctttttgtaaagaaactttatcttcctttattttgtttgttttttgtttgttttttgttttttgttttttgagacagggtcttgctgtgtcacccaggckggagtgaagtggtgcaatcacggctcactgcagcctcaacctcccgggcttatatagcttctgtcttatttctagtattagatagaggcttctgagatgctgctgggtaaaaatgcttaggcttgaaagtccttaaagagtctgagaggccttaaagagagcccctaaccctggggcctcatggcttacaaacactgggtctttagagagatggcaggtgactgacattgtttgctttatgtgggatgcctctcagaaaatgaaatggcagatgctgttgctttcttcaaccctgaggacttttagtgtgtcagaaaacaaattgactctaagttccatgtaattgttagtcatcacagcttatgataatgggacactacagcgttttcatttgcttttgcagatcatgttatgtcatttgctaaacaagataaataaggcttagaaagataatgtgacataagcaagtgatattgtttggctctgtgtgcccacccaaatctcatcttgatttgtactcctgtaattcccatgtgttgtgggagggacctggtgggagataatttgaatcatgggggcagtttcccccatactgttctcacagtagtgagtaagtctcaggaggtctaatgggtttatcagggatttccgcttttgcatcttcctcattttctcttgccgctgccatgtaagaagtgccttttgcctcctgccatgattctgaggctttcccagccatgtggaactgttaagtccaattaaaccactttcttttgtaaattgcccagtcttgggtatatctttatcagcagcatgaaaattgactaatatagcaagtctcatactttcttaatcatagagtttggactgcagtccttcatcctgcctgggactctgcccaagccttttctgttctacttcgttgagtattcagtaatttaactaacatttattcrgtaatccatccagtattgactgagcccctacagcatgtcggatctgtgcagaatgccaaggataatcctgtgaataaagtagatagaggtgatcttcgtcttgttgaagctcacactccaacaggggagacagacatagatcaaatgatcactcaaataatataattaaaaatcagtcttttagaggaaaagtagagtataggctttcataaatcctatacataccttgtaaatgtgttcctatcagttaatttacctagttcacacttaacagtgatttaatttgtgtagtagatctttttgttacttaagttttataaaaacatttattcttcaaaatcattgaatagaatttgaggctgtcaatatggtgctggcaaaaggagcgaactgggtatttttaaccttaaggaatatgcgtatatatatataattttttttcttttctttttttgagagacaggaagaactcttgattgtcatcttttctgcttcccagggtccatctttggatttcattctaggacagtgagaagccattggatggttttaagcataggagtgaaatcatacgatttgcgtttcaaagaagttactctggcttctagggagaatgagtcttagggagccagcatagtggaaatgagaatagttactgctactgtcttgttctgggtgagaaatcatagcatgaagaactagaggggaaagaggaatggatggaaattcagtatattttggaggtggctctagcatatcttccagatcattgtatgttgagataatgcaaatattggagtgcttgccttctcattcttcactttcagaagaacccaggtcttttttaccctctcctgttctgccatcaggctacttgaaataactatgctcactcattatataaaatatttttgtccctaatttcctcaaaatatgggatggtgattctttgaccttttcttagcaaaccccattttccattctccagtgccaaccttgtctcttctcctcggccccttaagtccactgtgatgcgcttaagggcatgaaggcacctgtgatgtgctcttgcctccaagctggtgctggatggarctatttgctccttgaactttcctaaactcatctcgtcatctcttcccactgtrttgatatctccyccttacctcttctcccgaagcaagaattcctcatctttcccaaagctgaccctttcacccgggatcatgattccatttttatcccacctcttcctaaactttaatcaccagttactgcccctgtgtttatgttttgtctcagaacatcttagaaggtaagtccatatttgctgttgccaattccatatcgcacatttaatctttcaaataatgaaatagactttctccaagatctcttataaaataagcatttcagggggctggagggaggactgtaataatcaaattctcttcctagtatcacatgtctcttctcagtctttagcttgctagacatttctctaccacatgatcctttccattgtaaaactctcttgacttcagtagaaattcttttgcttccttttttcttcctacctctaaaggcattcctttttttttttttttttttttgcttcytctttattttcccaagggttctgttgtcagtgatattttcatcttgccttaccaccatttgctgtctctattatcaaataccaactattgaatgaggacatacattttcttctcagattcagatttcattccatatagctgcacattttggaatcttctttggctgccccttttcttcactcccagcaccaaatggaggatcaagtcctagaaaactgagacctcagttaaagyycccttcctttgctgggtaactgaagcaatataggaacttgttgcccctgcctcccatctctcctgccttacaccttcccttacaatgtggttatcctacagaaacactgacttggctgtgccagtatgcttgtgaaatattcaaaactaactgaaaaatgcagagaataatctagcagacacctctatacttatcacgctgatgtgacaaatactcacagttttccagatctgcttcatatcattttgtcaagtaaatcacatattatgggtacatttgaaatcctctcccttctatttctattaccccttcatccctcctaaagttggcatatatcctttctgtccatatattacttatggtcttaagatttatgttaattgtattgtatagttgcttttgtggctcagattttggttttgaagcttatccatgtggacacaggtaaatccagtataactgctctcaacctgacatgggggaagggagcttgttaaaacacggattgctgcgtcccactgccagcatttcggattcagtagctcttgagtggggtctgcgaatttacattttaatacgtttccaggtgatgctgattctgctattcctgaacaacattttgagaaaaattgctctagtatgcttattttaataggggcatgccatgcctttttatgacactaccacaatgcatgtaatcattgtcctgttgataaacattttgtatgttgccaaattttttgcaattacaaataaggctgcattaaaaatccttgtacgtgtttacttgaacatatgaaaatagtgcccctagaacataggtacgaagttgctaggtccagtgaaatgtgaatactaaaccttagtagctctttacacatttctctctatctggtcatacaaataaactcctacgtggccactggcagtttatggaagtgctcattgctctgcattttccyctcccttagtatcttcggaatcttagatttttccacaataaaatggctataagatggggcagccttgccatgttcctcagcgttccctgattcatgctgaggtggagcatcttccttacggccagtggttcttcaggttacctcctctgtgccctgcctagttctgtctttcctcaatttttcccttgggcctttttttgaattttcatattgatttctacagttttcttactcattttggatactaatcttttatcagtggtgtcttcttccagtttgtggcttgtcttcacttgggttatagtttgtctaaacgtgcagatgctttaaatagagtggggacaaatgtatcagttctttttttcatgaacttttaaaataaagccttcctatactaatgttacaaagcattctcctatatttctctcttaaatgttaacactttgcttttcacatttaggtctcatttatataggactctatccttccctactaatacagaatgctgtatctgtcgtacaccaagatgtcatatctatgtagggcttctattccagtccattgatctattatctgttccctatgccartatgtcactgttttagttactacttttattataacrttttttgtgtgtttttatcctcccagagccctgggcttcattgccacttatttgggtgaagttttgtaaaccccttttccaagtgtgtcttccagggtcatggcttatgcacagattctcagatctagctttctgcctcttgcaggccctaaaacacrtgtctcgtattagcaagtatgctcagctccatccttcagccttgacagcagggtctgggaccaggaccctaggctgatgcggagtcagctggtgttctcaccactccgggttggccttccctctgcctttccaacccctggagtttcccrtcagcctgccttcctctctgcctttgtgatctctctctctctctctgtgtcctctctgtctctctttccagtagttctgcctggagcaggaagaagagcccttctcaattcagtcagctgtgttgccaaraagtccttctctgcttcttaaaaaattctgatgtgctctttttgtcatctaaaaataattcagatttcttttgcacggcattgaarcrctttgtaatctgacttagaattagcatgatgttccagccttgtccttcttcacttgccccatcaccctcctgtttacccacattgggtaagtttaggttatgtcttctctcctttcaatatctgaaagctgttcggatcctccgagttcagctgtatcaacattcacattgtaggtattttcccacttaatttacgtttagataatggtaaatataattggattttctctgttgaccaaaggttaaaaggcttttatattcaaatggtttaaatactaaactatcttcctattgcttggttatacttttattagattatgttttaaattatgttatcatggcctgtaattttcctacattttggaattttcttcaaggtttctatgtagtcaagtcattcaaatatgaatgtttctttgaaaggaaggaacataggccaggcacggtggctcatgcctgtaatcccggcactctgggaggctgaggcaggaagatctcctgaggtcgggggttgatgaccagcctgcccaacatggcgaaaccccgtctctactcaaaataccaaaaattagccaggcatagtggtgggcgcctgtaatcccacctactcaggaggctgaggcgggagaattgcttgaacccgggaggcagaggttgcagtgagccgagatcatgccattgcactccagcctgggtgacagagcaagactctgtctaaaaaaacaccccccggccaacaaaaaaaaaaaaaaaaaaaaaaagaaatgaagactattttctgtagggtgccaaattcgccattgaggaataataatacatgatccatagttattaatacataaatttgatgcttcaaaaacagtccaccaaatacaatacaagatattctattttattttaatattaagaaagataatatacgaaactatttctatatttagatcctttaactttaaaatgtagtttgccaaataaatataaaattatgtaacacagaatattgttctggaaacactgggttggggatccagagacactggttctgctggatttattccaaactagttggataaaattgaaatatcatttagactcttgagtatcttatgtatttgtgaaatgaggatattggatttgatcatcacccaaatattttccaattctataaaatgctgggatcacgcttttcctgaggaaaagcgtgtgttattttaactttaaagtcagtttttcattttatgtgatcatctcatttataattttaaatgaaaatattaatgataagaaatgagccataatgaattgtaattattcaactgaaagaaatattattaggcatgataatttgctttagacatatcgcatgactatttccctgttgtaatgctgccctttagtgaagcctgcccacaccttgcttcatctcaggaggtactgttcagccaggcaaggtggctcacagctgtaatcccagcattttgggaggcgttggggaaatggcctgagcccaggagtttcagaccagcctgggcaagatagtgagacctcatctttacaaaaaatgtaaaaagtagctgtgtgtggtggtgcacacctctggtctcagctacttcagaggttgagacaggagggtcgcttgagcccaaaaggtcaaggttgcagtgagacatgatcgcaccactggactccagcttgggcaacagaagagaccttgtctcaaaaaagaggggcgtgggatgcctctcatcagtttcagtatctgaaatatcctaatgatgatgtttgcttaatttgaggaagtgtacatatattttaactgcaccttttaagatgttgcttaacaaacaaaatggtgcattttgcccacccaccctggtcttcctctttgccattctttctagatagatgacctattaaaataatttttaaaattacttaattcgtctttttcccacattacatcaatatatcatgtgtctccttctccagacaagtggagcctgaagaggtttgctgcacatttatctgtgtggcctaagggtgaatacttggtgcgagctgtcattttgtttcttatcttcaagggtgccactccggcaaggcaactagtgccccagcaattctattaatgtaagcgttggttctgccctctgacatcattttgagatggcctgcagtgtcctcaatcttgagcttccttgtaaacatattccagagtcacaggttagagttttaggagcatggccgggcgcggtggctcacacctgtaatcccagcactttgggaggccaaggagggcggatcacttgaggtcaggagtttgaaaccagcctggccaatgtggtgaaacctcgtctctactaataaaaaaaaaaaaaaaaaattaaccaggcgtggtggcacatgcctgtaatcccagatattcgggaggctgaggcactagaatygcttgaaccagggaggtrgaggctgcagtgagccgagattacaccacagcactccagcctgggtgacagagttaaactgtgtctcaaaaaaaaaaaaaggaaaaaagggatttagaaacataatgaagtttaaagatatggatttcacgaggcctggcctgaagtgaaaagactgctatatttacatttttccccatcaaccctcactgatccaaactccactagtttagaatttatcttttggagcttgggggaggagggatattaaaacaccttttattactattattattagagatagagtcttgccstgttgcccaggctggactacagaggtgtgatcatartttgaactcctggattcaagcaatcgtctcgccacaacctccctgagttgttggtactacaggcattcaacaccatgcctggctagtttttcaaattttttgtaaggatggggtctggctatattgcccaagctgttctcaaactcccggcctcaagcagtccttctgcctcagcctcccaaagtgttgggattacaggcatgaaccactgcacccaacctaaaacatctttattatgtaagtaataaaattaatagtatttaagaaataatattaaatatacctagagaaacatagtttttgaggtacatttaaggcccttctttcaatacattcaagttatatacagatagcatatcaattacatattgtgtattcattaagaaaaagataaggattcaccagccaatctatttgttagcatgccttatttagttctttgtgtctgaaagcacttaagccattgtaagaaaagagactctactgacttaggtcattcttctattgttcaaattactaaggtttcacagcctatgaaaatctgttatctgttgagaatactcattccgtccrtcttcctgagaaatggagttaactccaccatatagacgtgcagtaagaatggctgtttgggccgggcgcagtggctcacgcctgtaatcccagcactttrggagtctgaggcgggtggatcacctgaggtcgggagttcaagaccagcctggccaacatgtaaaacaccgtctctactaaaaatacaaaaaattagctgggcgtggtggcgggcgcctgtgatcccagctactcaggaggctgaggcacaagaatcgcttgaacccaggaggtggaggttgcagtgagccgatatcatgcactgcactccagcctgggtaacagagtgaaactctgtcaccaaaaaaaaaaaaaaaaagaagaaaagagaaaggctgtttrtggctgtttggtgtgatgggaggagatgtgcacctgagctgagaagggcagggtagggatgacaggaacccacctttgctaatatgagtgccatgagccatgaaccattggatggctttccaattgtcatgaccaagtccttgttctagatggcatccttaactagaaaagaaaataaatggtcagtttattaattcagatattgtctatagatatattgtcaaggcarccttwtttttggtaaggttttctttttattaaaacctagaaaagatgatatatttgacactccatacattgtatcagagacctgtcataagtagtctgaaattaagatacagaatrtctccctaagcaaacaaataatgtttttaagtgccaactgtaactgttcctctcggctagagacacattagaactttgtcacttttagaaaatgtcaggtagccacagagctaaggaatgctttggacaaccaccttagctaatgccaggagttgcacaaaaagattaattttccaaaagtctttcaacctttgaagacagtgtccgggtctcctgaattccagttaattgtctgttctctttgtcatagttgccccagtctccacatttattcagtcgtcagtaaatatgtattggttgcctacaatttgctgggtaccatgctaggcactgggcatgcagataagagtatcatacggcctgcaagagtctagtggacaagagagataaagaaacaratttgaagaggtgtgacaaatgctatgacaaaggaaagcccaggatgctgtgggtacctagaggakgaacagctgctctagatttgaataatatgaaagatttaccagggcacagagttgcctcaggtaagtctttaaggtcatataggagttaggagagagaagaaaactattccttgcagagacaagatttacagaggcatggagggtgtgaaacaagacagtarcaataaagggtggaagtaggggcgtgatgagagataagacagggaaacagggagaggccagatcaggaaagaacttacgtatcccgcagaagacctggacttactcccagagacaacagggagccactgaagtctttttaagttgaacatgttagaatctaatttctctttggcagcaacacaaacatgttgctgaaatgattaaaatatttgtttaataaatggatgagcaaacgaatgaatgaacatgcttgttttttcagtcatacctagacaatgatcattttcagtagcatcttgcctatacatgaaggataaataataaaacagcagttaacggctactgtccaattctcataaacctcattttaccttacagaataatacaatttctttctcatatacacattattacatgttatttactgtaatactttcatggatacacattaggttttttgacacttatttccaggattcagtcacttaaaggcggcagtttatggactgttctaaaaagaagcctgaccaacatggagaaaccccatctctactaaaaatacaaaattagccaggcgtggtggtgcacacctgtaatcccagctactcaggaggctgaggcaggacaatcgcttgaamccaggaggcagaggttgcagtcaaccgagatcgcaccattgcactccagcctgggcaacaagagcgaaactccatctcaaaaaaaaaaaaaaaaaaaaaaagaaaaaggaaagaaactccatctcaaaaaaaaaaaaaaaaaaaaaaggaaagaaagaaaaaaaatgattctgctggaagagatagttacgtagactagatagacatcaaatgttgagtgttgcctgtgtcaggaaggacaggacaaagctccgttcttcagggagcttacaatttatagagttgggtataaggataagatgtacaggagacttgtacacaatagactgaacaccaggtagagtcaagtaagtagcaataagcacaaatcccttgttctgagggttcaaaggtggaactgaacacaactggtttagagatctcatcaatgtaaaggatgtatacattctttttatgttgttttctatttaaatggtgtttttttccttttttaaatagacatataacaattgtacttatttatgggtacatgtgatattttgttacatgcatacaacatgtaatgaccaaatcagggcatttagaatatccaccacttcaaacatttataatttctttgtgttgggaacatttcaaatcttctagctattttgaaatatacaataaatgattgttaactataggaattctgctgtgctattgaaaactagaacatattccttctatctatactcacttccattaaccaacctcttttcctcctccccccttatgcttttcrtagaagatggaatactgtgtacatttggttgtgtttttcaaactgtgtcattcgcatggcatgtaagaagtggaggcgcctagactcagcaaagacacggctcaacattgcagagctttattcaggcacaacagataattcatggcctccctctgctgcacaaaatgagctgctctgcaaaatgattctaagtgttttgaattaatgaaaatgcagcacaaagggcgtttgagtccaacagtgcagagccatagttcttttgtaaaaattgtagagccaatttgctcatatgcaaaggcatgggaatttatctctgggctcacattttgacaatcacaatttggagaattatgtttttctagacttctaacacctgatactttatgtaatctttagttcttttacctatttccggaagcgtagttaggtgttttgttaagtttagttacttaaaataatttctttctctttgactacttgccaagtttaaattcactgaatattcactgagcatctactatgcacaaagcagtgacagtatagtgaaatttattatagtcaaattacatggggcacaaagggaggttaatggttatgccacamcctataaaggagatttccattggctgaagagttgatatatgaactgagttaaaaggaaaagtgaggctgattcagaatttatacaattagccattacaacatcactaagataaatctaaaaatatactgttacatatacaataaaaatatgtatttataagttatttcccattggattccacctaaaggaggtttcgaaacatggcagcctctttcttcattataaggtgattttgctgtaaaccargacagtggcagatagacattcaaatacaagtgtagccttgaaggaataaacaacatggaaaatgggcttatagttacaagtatttcatatacataattatggctacaatttatcaattgcgtctaaagtgtctcttttctgctaggcacttattatgtctaatttaatcttctctacagctttgtcacatagatatcattgcttccatttttagaaggagaaaaaccaaggcttaaatggaaaataacacactcaggatcattgmgaggagccagaatttgcacgcatgtktatragcctttcctattctgtatgtgtttaaggagagagagagagatttgtttcatctgagacatttattatctactgaggagtcaacttttctaaatgaatctaagtttatatatttgatatttgggaaaaggactttttttccatgtaagaagtaaaccaagtttcatttcagccctaacagtgataaagagttagctgtatatccagctgcttgagtgggcctattactgtcacaaaatacctgctcctattatgtaaaatccattacaaagaatgtagaagttactcatgcaagtataaatttacttttctaccagcagaattctctacaatcaatcattttaatctatactgtttttttctttcttttttttcccccgagactgagtctcgctctattgcccaggttggaatgcaattatgtgatcttggctcactgcaacatccacctttggggttcaagctgttttcctgcctcagcctcctgagtagctgggattacaggtgctcgccaccatgcctgactatttttgtatttttaatagagacagggtttcaccatgttggccaggctggtctcaaactcctgacctcaagtgatccacccaccttggccttccaaagtgctgtgagccaccgcacctggccacattaaaggtttatatagtgaaagatagtatagtgaagtgtatgtgggaggggactagatcatatgtgaatgaatgtatggaaagggggcaggagttggtgaccccggaccggctgtgtcacaggctgtccaggtgtgggatggtgagaacctggtgaggaggctggaggcacagtggagatgtgtctggaagcacctgtggacgtcggtgatggtgctgagtgccatcagggaaagatgaacaacacttggcggcagtgttttaaaattgagtgacagtgagaaagaaagatgacactggcagagaatctgcaagggctcatggctctgaggaccaagatgacgtttgctctttaggtatcacactgagatctggctttgaagtgtgtgtgtgccaggtggctcacacggcacactggaggtgagacagtcagtgggctgtgggtgtcrgcttggacatcagaatagagtgggaaacaatggttccccaagctcttggcattcaggtctcacctccctcccccagccactggcccactgtgtcatttggacacaacttaataccatttcaaaatatttgagactgaaataaaaagaccaaaaagtgctgtacagatcagaaagcctgaggtttcttgatggacttaaatttaattctctgatgagaaaaactctaattttgtatacttagatctttttggaacacgatatgtattaagtagtttaaaaaagtaagaagtatggttttgatatttaagtccatctcaaatacttctttgaataacttttttcattagtaagagctgaaagaggaaaatttatgtattaggctttcagttcaccaagtactctacccaaatagctctattgtatgatgtctctcgattaactgtcttttaatgtggatatcaaactccaccattaaaatgatgttttccttcagtgacagtgaaatatcttactgaaatcaatggtttccagtttggtatcgttctttttggcttcgccatcatttccttggagggagaggttaagtacttgttagctactatgttctggtctctaataaaaataggattagattctcttargtttagagtggagccagggttctgttagcttagtccctggtacgacataggcaaaatgcctacttcgcttgattctacagctatgaaaaaatgagagagattttctcagcagggtaactgggatttttagttaataataacacagtatttactgtgcattccatgccaactttacattcactatctcccttaaaccacccagtgatcctatgagatcttcacaattacaatccccatttaagaggtttattcaaggttccaacccacatatgtctgatcatatatacaagcagctttgttatagggatttgaccttctgcaattgtgagggctgatcaagcagtgtttataaggctgttgtctcacattggatgctggagcttgaagtccacatggcaggctctggagaagagaaggttgatatgaagtgggggagagcaagaaaatctcaaccctgatgctggaacttgtgtcactgttgttgcctctgggcttactggggtcttgcagaagccagggttccccaccagggtgctaaacaagcacacctggccctgggtcagagatgttgaggaaaggccaggggacacagcacagctgcaggcccagctgttgcctgatgccaacgcccaggctgtagatgacaacagcctgtgtaagctgcagaatgaagggtggctgcttcagcccatcttccagatcccacctaagaacctctcttatttatrgtgcaccacaatgggagacatggagagaatgggattctgggaaatgtagtccagacagccacagtggcacattgcagcatctccacaatgaggcaggaaagacgaaatagatggacagtaacagtaaggaggggattgggtaaaggccatgtaatcatccatcatgcgattcagtcaccacattgcagagtggraagaggatatagaggtcattgagttttctccctcatctcacaaatggrgaagtccagtcaaagcctaggaggctggttttcctgaagacactggatgaggccagctggtgagaggtggaaagccccttcttctccatctttatttagcttcgttgagatggtgtggggttatcagtggataatctaggctctgtgtgtaccagggcttccttatggaaggagtggtcatgcatggacgctttcgtcaaaggatgaaataacacaattcttattttcttatcaccagcttaaatatgcaaattcaaaaaactttcagtattccccatttatcttcttcactgctcatatttcttgagtctgtcttcttagttataagctgattattcttctctttgaaatatgtagtttcttagacccaagagataaatctttttatatctaaaatatgaaccttttctctgagtaccttatagtcacctgataactctatttgtggaattaagtactgctgatggcattgctgagtgtccttggctcattgctgcctgattttcattcttgtaaccaaccgcatctgaaaagttctttcaagtccataatatccctctttgcctctacaaacccagcaaagtttccttttactgtctccaacctttggccttcaggaaggataaagggagaagtcacctttggtccttcctcttcgcarttctcccttttccattttaaattgcctctctcttcctctacataaagggatggtggttctgagaagcagctgcagcaggttggcgatagaaatgtccattgatttttatcctgctggccgaacaagggaagtaagagataggctggtataaaacaaaaaactctggaagaagagattacatgtcttctgcatgagcaccatcctcctcccttgggtgtgggagggggcaggaagcacaagtgtgcatgagacatgttcttctgcttctttttttttttttttttttttgtttgagacaaagtctcgctctgttgcccaggctggagtgcagtggcgggatctcagctcactacaacctccgcctcccrggttcaagcaattctcctgccttagcctcctgggtagctgggactacaggcatgtgtcaccacacctggctaatttttttgtattttttagtagagacagagtttcactgtgttagtcagtatggtctggatctcctgacctcctgatccacccaccttggcctcccaaagtgctgggattacaggcgtgagccaccgcgcccggccccacacctggctaatttttgtattttttagtagagagggggtttcaccatgttggccatgccaggctggtctggacctcctgacctcaggcaatccacctgcctcggcctcccaaagtgctggaattacaagtgtgagccactgcacccggccattcttctgcttctcgactttcaggtgtgtgaggccagacaggacatttctttctttcctcgataaagagcctcagcccagggatgggacctgtgagacaagagaggtggctctcagcacaatctgagctgtgctcccctaggcactgctgtggagctcagcctgcattgaatggttggaagcttcatgcaacccaaactcttctgctacttggatgagccaaggggtgaggataagcaagcgcacccttcaatgcaaattatttccccttcgtctttcaggtgacatttgtcactgtggccttacaggccaatcttttatcatgttagtcatttaggcatctggcttttagttcatgtgagcatggtaagagactagtggaagcttccagaagtacagaagaggagaccaaaagaacttcagacttggggcatgagggcatgaggccgagttcagaagcaggaccatcttgtttccatttcctctgcacccgagacacgtctgccacagtcacacctagaaatccagatggcccagagacagcagaggcaccgaggtactcagtccaggtatcacagcaaactgtccgccatctgttattaatagtagcttctcagcagcagtttatttctcagggaacacgtgatctgctgacaggatacttttgctcaggagtgttctagccactggcatgttatcaagacatggagccatgcccggaagtccctgattgtgcggctggtcacctcaacaagctacccggtgtggaccctgctgcagaccttccaaggagctgtgacgaatgggcctcaaaggcatctgcccaaaagactggttctccctagtcaagcctgaccccctgagccagctgccttgctcccccaggcttgtgtatgagccggatggctaagtcagtctccatgggcgtcccacgagctggcagtgtatgaggcatatgaaggcggaaagtgagtgaggcacggcaactgcagtcaggtgctgtctgggcgcagctgcaggcagtggctggagcatgaaggtggactaaaggttgtagggtgacgtcgtcacgcacacctrgtgcgtcacctctgtctgggccctggagacccagtgaagcatggtgatctcaggttttccttcattgtgttttcaaaatgsttcttatgctgagcaatttgttgtttacaccctacaaagtggtccctggtgccatccttggttggttggtttttttttttttttttgagccrgagtctcattctgttgcccaggctggagtgcagtggtgcaatctcagctcactgcagcctccatctcctgggttcaaatgaatcgtgtgcctcagcctccctagcagctgggactacaggcatgtgtcaccagacctggctaatttttttttttttttctgagacagagtttcactcttgtcacccaggctggagtgcagtgctgcgatctgagatcaccacaacccccgcctcctgggttcaagcgattctcctgcttcagcctccacgcccagctaatttttgtatttttagtagacaccaggttttgccatgttggccagggtggcctcgagcttctggcctcaagtgatccaccctccttggcttcccaaagtgctgggattacaggcatgagccactgcacctggcccctcgtgccgtccttttgaagggctcagtgtgagggcagtgctgaggtctggatgctgctctcaacgcttttcctgaacgatccatctttccatttaaactttgtaggcattgagagtgtggatatgtgaaagttgtccattcacgaaatgtgattatggttgcatttttcttaatgaatatagaccagcttcctttttggcttagtctattattaaaatcatttattagaaatatcaaataagcatgaaattcgttttgttttcttaaagaaaaaaggtagaatactttgtttagagtcttaaagggattacaggaaactatgggaaaaaattcctggattctggaattaagtgttgtcatctccattttctgatctattagtgagtgttattttttgttgcactgactaggaaaatatagatgactgtattcatgatcttctgtatatcaaaacaaatttaaaggtataacagttagtgaaatgtttatttcttctgtgaagttaaatgttggttgcttttctttcttttcctggtggtttagaagtaaataaatgtttgcttaaatatttcataaaagggtagactttgaaaagaaaaagcacactttttccccccgacaaatgattgaatttctttttcctcatgaggcaataacccagaaagtaataagggtgtagaggctcctgcaggcagtgttttaagtccttttctcttccctctttatgaaaacctgtcacatcgcttccaaggactctgcagggagccatgagagagtatgctgtcactgtcactatggtaaggacatcccatctctacaatgggacaatatttagttgctttgaggatgcaaagtgatttgcatctgacctcatgccagcattttcttgctttaaaaagaaacaaggatttaaggtataaagacacttcttagaaatttaccccaaggaaattggggataatgaggaggggttgtgaccctggaacatagagaaaagttactggaagcaaagagactgtgatctgtagcaaagtggagatggccagagtggggtgtttgtgagtgcacggacagcacatccttcagggactgtgaaatctgagacaccacaagggtacaaagtagaaggcaaattggaaataatttttctccaagttgatagtgaccagggggtgggaaagttattcctgcattgctgcccccaacatacttataactcctttgaaatttgaggcttgaagtgtttatttcacaagtagctcatgctgtcgggcaaagtgcggttttgcgtaaaaatagggactcaaaacaaagattgattcatcagccatgatgaactttgttttgttaaatttaaacaaactggtccaaactcatacttttttgtgggatagattttctatctttcctcagtgcaggcagttgaaaaatacagagttttaatattctgtactgaatccctttctaatgttttactttgtgcacttagaagataagtattcttctgtgaaacaagctaaatgtatgctgcttcagcttttcatatgtcgctttggaggagggccagcagaagaattctagaatataatgccatccttgattgtttcatagagattaactgaatttttgtgcattggagtaaatttgaactttgtttaaggtttataccagtacatagattattaggttgttctttaagacactgccttatttagagtaggtgacatttacaatttaggaaaaaggaagaggaaggaaggaaggaaggaagggtgagctccttctccctggaccsctgctcctttctccctgtgccaaattgttaactcctactcatctttaaagtttcaggagtggtggcttatcctggatctccacagacagacccagaccccaggcttcaggaacacctttacccccttcttagtatcacctrtcagagttctaatttcagtttgcatgattattaaatatttgtctttcctgctagagtgtaaactccatgagggcaggaccctttcattgcttgactatggattcctaatgcccaagagcctggcaggggctagtgtcaatcaccagcactatttgtcccttgctatgcgtcggggccttttccaacaccatgtgggcctgctcgtgctgttctcacacaagcagccctatgcagtgagcagtattgttctcatttacagaggaggaagtgatactcagagaggacggtcacccatccagagtgacagaggtagtcagtggctgtctgaccccaccacctgtgttcttcattatcatgctggatagcctctgaggaagtgtgagtagagaggaggaaaggaggaatgctattcagcctgagctctgctgatctcatgaggtatggcgctgcagctggaggcgacccacaccttagtggatgtggggaaatctcctcagtgaagagtggatttgtggagaccatgcatccacactggtggcacttgcttttcaataattttattgtcgtgggacatacatgagtaaaaatggaaattccaaataggatcaggcataggggcgtttccttaatttgacctaaaacatgcatgcctggagattctcattggtttrataagacaaagaaagaaagtcaaagaattattgggaatattcagctaagagtaacaggaattcttccttctatagacagccctgtgatttttgtggtgtttaaactttgtaaaatctggattttatcaggacaagtgaaaaattgcagaggactaattcctaaatattagtgagtgtttaaccctccgccaaaaaaaaamaaaaaaamaaaaaaagggaaatggtggatgtagtgtctgttcttatgtctgggaggctgtmtaggcaaaactcttctttttggtgttaaaatacccattattttaatttaattttattattttttgaaagtagagatgggggtcgcactttgttgcacaggctggtctggaactcttggcctcaagtgatcctcccaccttggcctcccaaagtgttgggattagaggcatgagtcctcatacccagccaggcgttattttataaaacagttttgctaggttatttgtttgagtgaggttttcaaaaatgtttttaaagaacaaataatagttgtttctatgttgaattcttcacttaaaaaaaaaattctggtccatgaaattcaaaggcctgggaaccactgattgtaagaacttaaatctattatgttagtgaagctttttgccaggaagtccttgtgtagattttatgtaattctttgctcgtttttccagttttatgtgtgttcatttcctcagtaaagaaaaggaattactgagaaaatcataaaaagtgatgacagggagcgtaaaaagccccaccacaaatgtgtcctgccacgcgtgcaggctctcctggggacagaggcttgtgcctgggagatacacacagcctcagaaaaccagtcacttggccttccttctcaaggaacaaactagaattggtgtttctatctctatacaaagtcttgccagcctccgttagagaatgaaaacgcagaggctgtctggcaaagtcaactaacaaccactccataaggaagcactttctgcaaagctgaccccaggaataaccctttagacactgggtggtcaaggaggtagagttcatatcttattagattttaaagagttaatcacactttctagaccttcttagtaggtgattatgcgtttttttccttaaaatctacttttcttttctttttttttgagactagagtctcactctattgcccaggctggagtgcaatggtgcgatcttggctcactgcaacctctgcctcctaggttcaaatgattctcctgcctcagcctcccgagtagctgtgattacaggtatgcactaccacgcccggctaatttttgtgtttttagtagagatgggatttcaccatgttggtcaggctggtcttgaactcctgacctcaggtgatccacccacctcggcctcccaatatgctggtattacaggcatgagccaccacgcctggccaaaatctacttttatatgagagtactgatgtgtttatcttgtgacatgctccatatggtgtcttacatgtaatgaggcttttaaaataacttttgaatatgcagccttataaaatagtctttcttgttggtagaatgtcaagtaaaacaaccaccatttgaaaaggcatttgataatacctatcagaaatgcaagtggacatgttctctgacccagaaacttcacttctcatattcggtctctcacaaatagatgagcaagtgtatggtggtacatattcacagatgcattattgttaattatgaaaaacagagacaactggaatggccccccaagggagaatgtttacataaattctgatatgcacgtggtgtggtacaccatgacaccaaaagaaaaaaatgtggtagaactgtagttcctttaacggaaggagttttgtgcattattgagtacaaatggaattgtagaactttttgtatgataccatttttgcttaaacagcaggctagattgatatgtgcatcatatatatcaatcatacatattcatacatacgtacatatacatatgtatgagtagtaatgcagctttaagagcctgcaaagttgtacaccaaaatattaacagcactttcccctggagagtggaattaggagggggttgggtggagaggggagtcactttcatttttaaagtgtatgcacgtttcaaaaataaaagagcaattcattttataatttaagaaaaacaaaagactgaaataaacccctcttaatgtcagatattaatttgttagcgatttgtgtgaatgcaacttaatagccactgacaatcatttgacgtaaaacaggctttgcatatgcgatagaagattatggttctttaggattttctarcaagcctttagctccttcaggttctccagccagactgaagatgcagtgggtgagattccatttctgtcagtgtgactgtggttccctcaaatctcaatcacctgtgtctgtgcactccagtaggcgactaactgagattgaacaggttgctccaaaggktagttaactcagattaatgtgaacagttgttggggtaaagacaagtgtagtgggtgtcagtacaaagcagctgtctccttggtgagttaaaccacgtgtggcatcccagtaccctgctactgcatcaaattgagttactagttgtggagasgaagataaataccagygtgcaggtgggagtcaagtgctaatttactattttgagaaaaaccaatcacatttattttggctttctgctgtaacatttaagtctacttctgacctcaaaggaaataattacctattttataagtcattagttgtgctgagtagcatttaaaaaatagcagtgtctctcatactactttggtgttttctaaaataattgcacaaagtcactgtgcccacatgttttaaaaataagctatgcaaacacaattgttatctctagctgagttttaatgctgtaagtaaaaaataataygtaccattcctctaaagaatccttagttgatcatgagctttgaattgaagaatatccctaaatatccaatttttctaaggaataaagaaaaatcctattactttattaaagatattccagtgggttaactacaaaagtgacgaatgaatgccctcaacacttgtgtaagtactacaaaacttctgaaattatataaaatgtattttttatgttatagaatttacattcacattaataattactgatgagatttgtctttgtttttcctgattatgaaaagaatatatgccacaggccatagaaaaactagtaaatatgaccacataaaaatttagagttcctctagggaaaatgatataaacaatgtaaaagtaaaattgatgaactgaagaaaaccatttaatgtaagtgataaaagggccaattttcttgaatatgctaacagcacttacaaataataaggaacaaaatgcccaataggcaaatgagcaaacatgatgaacagatagtcacagtgttatacatcacaatgaccaggactcctaagaagcatgccccgtctcactgcagctgaagaaccgcaaattaaaagcactgttgatctcagtaggcacgtttatggactccgatgtactgttactctcttgattcggaaggctaacaaacatctctacgttaatgtgtcccaaacagaattcttgtttttgtcttcttacacctgctaagctgtttgtaactcagtcatacccatctcaacagatgccaacattgtttatctggatactcaagccaaaagtcagtccagcctgagtccccttcccccgatccattatatctagttacagtatcaactcctgttggctgcatctttagcatgtatgcagggtctgtcagccccacggagaccccctgttttgctaccaccattcctgaagaggtcttcctgccttgacacttattccctaatgaaccgtattcttcacctaacatttagaatgatctttttcatcttcattaaaatagagtctgcttacctttcaaaacaggtaatatatttacatgattcaaatttcaaaattttccactaggatktacagtgggacatttcccaccaacttctcttgcccaaacagccagttcctttatattaagaggcatctgatgctatcgttgctttcttcttttttagacatactttatgcatagacaaccatatatatctttttaatacagatgatcaaatgatagcatatttttgcaatgtttcattcagtggaaatatctctacatcagtacatatgagcatcagtatttttcaagaatgtatggtattcccttaaatgaatggaacacaaggtatttaacttaacttgtcccctattattgacactgagctgaattttttcagctttagctgttataagcaatcttgcaattagtagttttatagacacatcatcttacatatgtctacatatttctgtcatgtaaatacctaaaagtagaattgctggatcagagggcttgtgcctttctaattttgatagagctgtccaacttgtccttcttggtagccttaccattgtagactgcctccagcaatctgtgagatggcttgtttttcttcaccttttggaacatcatgtgttatcacatatttaaaatcttctttcctttccccgtctccctctctccctctctccctccttccctacgtcccttctttccttccttccccgcccccactgccgccactgcctccttcacagagttgaatctgtatcccagtctgatgcttctcagcttcctacacctccctccaaatttttaaatatatattttctaattttaaaaatttgcatatagttaaattaacttttttggtgcacagttctatgtgtttttacataggcataacttcttttacctccaccacacataagacacaaaacaatcgcaactccccaaagaatccatccccgcttccttcacaggtgtctcacccaataaatttcttgcacatgtcatcagatcttgatgtctgtttctcagagaggacccagactcgaatatcgtgagactgggttttgtgcatatggcagataaattatccttgggataggggttcacattrtgtttgtcttctggtgatgtgactttttacactttgagtagcatatatttatggaggctgtagtaattataatgaggtataatcatatagtcattataatcatagtataatcatagagtcatttctgggtcttaatgtcttcaagtcttacacatccgtcaaaagttgggctgtaacaaatagagctagctgtccaacaatggaatcagtgcataccctcaggccggagtgtttctgctggactgcgtcagtttggtattaggtatgatggataataaatttccacgttggaaggtagattggacaagatgatctctaaggatccttccattagtaagccacacagattttgtgatttaaagagcctatgcatctcattttagagttgggttttggagtagatatttattcttgcttgctttcttttctctgctttcatttatccattttacatagtrtacttggttcatgtatttttctttcgttgtttttaatatgaaggctttaaaaaattatggataaccaatcaacattagatgtcacaaatagttacttttgattccaatattgtgaatatttctgttgccattattgctggttttgtttgtttacgtagcttaacccctgatgcactctcagtcacacagttttatgaagatgtagactcatgtgttttgacatatacataactcgtcagaataggtttcctgggtaaccttggaggttcttgtatgccttcaactggaatttcttcaagtgcacttgcttgtgtaaaagatgtatttatgtgatgatgtattggttggaatactgcacaaagttagttttttgagtagcagctgaacataaaataaaaagttgtgaaagtatgaaaagccacagtgttttaaatatttttgtagtaaagtcagtgccctgtatcaagcatggagatcattgaaaaggatctttaaggagcctggctttttggacataacctaattrtcccaggagataaggttatcacaccacttttcattatctgagtaaacatagttattctgggcagtgagtgttgccatgggtttctataactagaagtttaagcatgctggaaggtaagacccaaagaagaaaaggggcaaaagcaaataggagtccaccatgagacaccaagccccccagattactcctttggtatttttttcagtttgaaataaatgttataataatttcagtctgargattttatgtgtgctaataaatctgaatatttccagaaataataggaaaagcttatgttggcccatataaaggacacaaacacacgcatgtatttcttgttttgacagaacatggtaactggattcatgtttaatttatagttctttgacttttaaggtagtgctctgtcatcagccgtcatttgaaaaaaaaatattttagttaatcaatggtatgatctaaaatggcttaggactaatagattagtggagctgcactcttcattttatgaaaaaatgtttctggcactaatggcacgcagcagcaaataatgttcccttttgcatcccagtgagatgccaaatatcatgctggttaattttaatacaaaatgctcaactcttaagagatagcatctgcctgcccttgaatttccacttaatggaaacattatacgttaacaaaaaaactgcttttttttcccccaccagtagtggtagaatcttagaaagtgagttaactttaagagaaaccttaaaatgtatcagcaaccagtttcagaataattagctaatagtatttacagattttgaagagacttaagtttacctctccatggacatgaggattctgcagataagaatttgtggtctcgttataatttggtatcctgtttgctattataaatctgaagctggctagatcaatagggaatgggttatttttgaaagcttcacttttccatatagctgactacttaattctttatatgagaacattaattctagtagaatgaaaatcagtttaggccaggcgcagtggctcatgcctgtaatcccagcactttgagaggctgaggtrggcagatcacttgaggtcaggagtttgggacaagctggccaacatggcaaaactctgtctttactaaaaatacacacacacacacacacacaaaaattagctgggcttggtggtgcacrcctgtagtgccaggtactcaggaggctgaggcgggagaatcacttgaacccaggaggcggagggtgcagtgaggygagatcgtgccactgcgctccaggctgggtgacagagcaagactctgtcttaaaaaaaaagaraatcagttaaaatacactgtctccttccatactatctaacaaaagggtaatgattgggtttgacttcttctttatgacttggtggcctcatcatttatgggttttggtttttatgatttgctagagtcagggaagcccttgaagatggggtgggcagtgtyctaggctgtttttcccctcrctaacacagcagcagtccccgtccgctggtctctggtgggcttcaccagcagcactcggtcctcctggtcattgtttgggtgactgcttttcagtcatgtcaactggcaaatccatggcacaaagaaggagtctttttcccatgtaagtttttctccttcagaaatagtttctacttacttccatgtcatcttcttcctctcctccctatttttggtcgtcagtaattgtccgtatcattcaaatacagtaaaaaaatgtatacagccatgtgccccatgacatttcagttagtgacagaccacatctgcaagggtggtcccataagattgtcatggagctgaaaagctcctatagcctagtgatgtcttcgccatggtaacatcctagtacaatgcrttcctcgtgtgcgtggtgaccctggggtcaatgagcctactacgataccaattgkgtaaaagtccrgcacatacaattatgtatagtacgtgattagaaaaatgaccatattactggtttrtgtatttatagttattttatagaacttatactattttttttttttttgagacaaaatcttgctctctcacccaggctggagtgcagtggcacaatcttggcccactgcaacctccacctcccgggtttaagcgattgtcctgcctcagcctcccaagtagctgagattacaggcatgcgccaccacgcccagcgaatttttgtattttcagtagagacgaggtttcactatgttggccaggatggtctcaatctcttgacctcgtgatctgcctgcctcgacctcccaaagtgctggattacaggcgtgagccactgcgcctggctcctactaattatttttgagaaaaaaaaacagataactgtaaaacagcctcaggcaggtccttcagcaggtgtccaaaagaaggcattgtgatcacaggagatgacagctctatgtttgttattgtccctgaagaccctccagtgggaccagatgtgagtggaggtgggagacagtgatattgatgatcttgaccctctctaagcccaggctactgtgtgtttatgtcttgctttttaacaaaaatgttttaaagataggccaggcatggtggctcaagcctgttatcccagcagtttgggaggcttaggtgggcaaatcacctgagatacggagttcaagaccagcctggccaacatggtgaaaccccatctctactaaaaatacaaaaaaaattagctggggatgttggcatgcgcctgtaatcccagctactcaggagactgaggcaggagaatctcctgaacctgggatacagaggtttcagtgagccaagatcacaccaccgcactccaacccgggcaacagagcatgacaccrtctcaaaaaaaaagaaaaaagttttaaaggttgtttttttttttaaggtggaaaacagcatatagagtaaggatatgaagaaggaatacttttgtgtagctgtgcaatacatttgtgtgttaaaccggtattattaaaagagtcaaaaagttaaaaagtttataaagtaaaaaaagttacagtaagctaaagttaatttatcacagaggaaaggaaatgtttttttctaactttagcgtagcctgagtgtgcagtgttggtgaagtctgtggtaatggacagtcatgtcctaggycttcccattcactcgccactcgctccctgatcacccagagcaacttccagttctgcaaactccatgtttcctagacgagtgtcccattttttaccttttatactgtgtttttactttacttttttgtgtttatatatacaaatgtttcttgttgtgttacagttgcctaaggcattcagtaaacatgttgtgccggtttgtagccaagagcagcaggctgccccatagagcctaggtgtggagtcgcctgtaccatctgggtttatgtaagtcccttccgtggtgttcccaaaacaaaatcccctaacaacgcaattcttaaaatgtgtcctcgttgttcagtgacccatgactgtacttatctcttggtttcacggttggttactcaggaggtcacagacacctgcttattagaatgctcttgctcttctctctgtctctccaagcctagattgttcactggctgtgcaggagagagaggctcctcaccattgcaagctctgtgttagatgttttgtgaagggtttagttcaaggtcttcctgtgcgtttaatgaacagacatgtgacttctgtggacttgttgttctccctagtgtttaagcggagtttcagccacaacaacattagaaatcacgtctttgatgtttacagccagagtcactttcaacagtgataactgtacttactctttgaagaactctgagccgcagcctgaatcagggaggttatatactaggccagaaagagaatatccaattacaggtcagtatgaaacctcttttctcagagtaagctctacagttgttcataaaattaaacaaatacatgtgaatgtctcctatatgggagactgtggtaggtactaggggaagaagatctcaccgtggataaccatgttcgccctgtgctctaggactctgcgctctaggaccctgtgctctaggaccctgcgctttaggaccctgcactctgggactctgcactgtactgagaaaaacagttgcagaagccgggaaacaggatgaggctgacaaacagtaaaggatcctagtgttgccaaacaacagcaagagatagagcaggatttgtaagacgggtataatttgaatggaccttccacaaggttagcttcctgaatagttagagatgctgtaggggaaaggttatcccagagaacatgcagttatgcaggagaatatgaagcatgacctagaaacaagctccctgtggctggtgtttgtgaagtaggagaggccgcagcagagaggaggaggatgagaaaagagtggatactgaaaggggaaagtatagcaagaaataggtggaaaaagggaatcgtaaaggactgtgaacacctgaagactttgcatcttgttctcaatgaagggagtcaccaaagatggttttgaatgaaaggactggcaaaatgaccctgtgtagcaactgcataactcgactcttataaagccagtagttctggacatattctgttgatataagaggagtatagatgctgtcaaaaatgccaatggaaactcgtgcatcagtgtgtaagtcccacgcgtggaagttctaggaggtaacattcatcagcgaatttattttttgactgcctgtagtatcactgtgagcaagaacagctggcctatacctgctttatttgaaacctgagagatgataatttcctggtacctaccaggatagaagttggtgggcaatgatgaaacacctttgagcattgtaaaaattttaagatagattgtgtgatttcaggaaaatagacaccaaaattttctctggtgtatattctggctttatttcaatttcatttttcttaactccctcaaagagtcaagtgtatttgctcaaaaactgacctcttcattgagcacaatactggaagtagagtaaccatccagcttcagtcagagttgctgcacttcaggtcccaggctagacttcagcttaggcaagagtcagagttttacagccagacaccacaggcaggatttcagaaccagttggccttactcctcagctcctccatttattgctgtatattctggggccaattaaagactctctctcccttccctttgcttatgtacacgatgaggagaactctaggtgttcaggcttcttgtgggtggttaacaattcgaaagcacctggcatgcacctccacatgaatgatgacgatagaatcgtaattattattatcagtgttactcttgtggctggggtatcacgtttgctgatcttctcttgttcatgaggttgaaccaggcaagaccgagcttgcacatcattctgacccattgggcttccctgtgctcgtcctttcctcatgctgtgctgcctgttttcttttccacagttatcattacctattgtttatttctgcccctttgtttcacttaagaaagcctatacaaacgggattgagaagatttactaaacttttgtatgaatttacacagtttatgagtctgcagcatgactgtttaccactttaaagaaatcttgagactaaaaattttacatatacacagttgtgaaccctaccctcaaaaagagtgggctgggcgcggtggctcacacctgtaatcccagcactttgggaggccgaggcgggtggatcacctgaggtcgggagtttgagatcagcctgaccaacatggagaaaccccgtatctactaaaaatacataaataaataaataaaaataagtagggcgtggtggcacatgcctgtaatcccagctactcgggaggctgaggcaggagaatcgtttgaamccgagaggcggaggttgcagtgagctgagatcgtgccattgcactccaacctgggaaacaagagtgaaactccgtctcaaaaaaaaaaaaaaaaagagtggtgttaggccaggtgcggtggctcacgcctgtaatcccagcactttgggaggccaaggcaggcggctcacgaggtgagaacaagaccatcctgtccaacatggtgaaaccctgtctctactaaaaatacaaaaattagctgggcatggtggtgtgcgcctgtaatcccagctacttgggaggctgaggcaggagaatcacttgagcccgggaggcggaggttgcagtgagctgagattgcgccactgcagtgagctgagattgcgacaaagcgagactccgtctcaaaatacataaatagataaatagtgctgttttgtacttccagaggcgtaaataaataaatagtggtgttttgtacttccrgaggcatgacgcagctagccgcattgcacacgcagccctgtgcttgtgtctcttgatttgcacacgtacactcacatgcacactcatgcaaacacacacacactcatgcacacacacactcacatgcatacacatgcacacacatgcatacatgcatgtacctgcgcggttcttacgtctctatcttctcactgcattttttgtcttctccagtaacaacatgtctgctgtttatttgttcctcctccaagtttctctttcttttctcttcctctgttatttctctcgttctttccaagattggaactattaggctggacttggaagtgaaaatccttttctcttgtggcttttggcccacaacacttgacgttgaataattcttagatgtccttatacccaataagccctcaataaataatgaatgggtgccttagccttgttgaccaagatcatttgactgtgccttttcataggctgttttttggttaatagtgagaagcattttgtttttttgaataatttttcttgcctgctctcagggcgtatagactgaaagctattcatcacataatcatttttaatattgctgataaaaagtggcaaattctatgtgaagcatatcagaaggtaaatatgattccttgccttaagtttacttatgtctggaggggaaaataaacaattctcagaagaatttttataattaaaaaatcgatttcattttgaattttattttgacatttgtagaaataatgacagtgtcagcatgtttttgtctcttcatctttttccttcattccttttgctacatyggacytctggtatcaggcctgcctataccccaaagcctaggtccagaccagcacaggaaataggctattttcagtagccttatctctgctttggtttctgatcacttgatattcagagtctcttatctacagatcacaagatcatcatctccyatcgaaacctgttcaaagaatctagcaaatctttgaatcttgtaatatggccttccaagtaaattgttttatgtttgcccttaaagttttctttgaacatagctgttattaatactactttcaacatttacatttaatagaatatttttaaacatgggatttattggcaataattttaataccttttacaacaactttcctgtgatttcctgggaaaccataaatttatactgtaggcttgaatagatccatttttaacaattgacatgggatttggtgggtttatgctaaaaattaagtaacctaacaaagaagtatagtgatttctaaaaaaaagcattcaaatatattttcacaatttagtcattcaacatgtgcaggagagaattaaatacatgtagattactcttcctgacagattctagaagttgggtatttgcaatgtcccagttgtattattggaaaagaagtaagatgtattatgctggcgtatcttccctttgtcgttcttaacattagtttaacgtggatattctgcctatggtactatgttatgtaaatatttctgtactttgttctctcagataataagtcatttgattaatattgttccagcttcatataagtggcaaagggcgtttctgttactagtaaaacaaatcagctatcctggaatcacccacattacctttaattacattctaattaaatttaaatttgctttattatggtaatggatgttgcaccggaaagctggtgggaaatcagttatttttaccccatcattgtaaaagaaaggctaacctacatctataattatggtgacatttttaatagatgaattcatatttgatgtttcaagagtaaagagtctaggtaatctagtagtctgagagtgcaaactgtgctctttccacacttgccatcagtttatggttttcagcttggttctagaattgtctgccaatatagtagccgttagccacatatggacagtcccaactgagttgtgctgtaattacaaaacatacacccaatttcaaaaacttggtacaaaaaaagaatgaccactatcttattaatacctcctatattgattatttgttgaaatcataatattttgcatctacataaaatattaaaattatatctgcatatttttacttttttatcatggccaccagaaaatttaaaattttatatgtggcccacatcggtggctttactagtccttctattgggcagcactgttctagaaactatgttataatagggagcttgatgttggcaaacatagggaaatgcatttggacaaaactgattcaaagtgtgttcaccagatcacacaacttagtgtcattaagtcctcttctctgaagccagtagtttttcctaatgcctttacctaaaataccagtgaagaaggagacatcatttgtttgcaaacagaaataaaactactttcccatctttgcttcacatcatggtgcttccatacttgaaatatccagttgtggtaagcatcctagcaaagggaaaggcttaaaatgacttcagagtagataacatgaccaaggcattagtattttatgaggatacacttgtacaagttaggacttcctgggttggaaaaaataaaattaagcaactatgaaggggagagaataggtttaaccatgttttctttgaaggacctgagtaggaaagactgatataaaaataagtatgagaatattttccttaattgaataaccatggccaagtcaccaaattccaaaacaccacaactataggtttctggagtagctggctataattttcaggccacacacacatttccagtatgttgaattctaccttgttctgaacagcttcggaaatatttgttcaacttctactaagatatatatatataaaataaaagtttggggccgggcgcggtggctcacacctgtaatcccagcactttgggaggccaaggcgggtggatcatgaggtcaggagatcgagaccatcctggctaacaaggtgaaaccccgtctctactaaaaatacaaaaaaaaaattagccgggcgtggtggcgggcgcctgtagtcccagctactcgggaggctgaggcaggagaatggcgtgaacccgggaagcggagcttgcagtgagccgagattgcgccactgcagtccgcagtctggcctgggcgacagagcgagactccgtctcaaaaaataaaataaaataaaataaaataaaataaaataaaagttagagtttggactgcatgttctcactcataggtgggaattgaacaatgagaacacttggacacagagtggggaacatcacacctgtcttggggtggggggtggggggaggggtagcattaggagatatacctaatgtaaatgatgagttaatgggggcagcacacccacatggcacatgtatacatatgtaacaaacctgcatgttgtgcccatgtaccctagaacttaaagtatataaaaaaaaagtttgagtttggaatgtcttcctctataatgtggcagaggttaaagttacaaacaagttttaggtgtatttagatcaataaggattcattaagtgtatcttcctagagttttcctgttattatgtagtcattccatccacaaagcgttccccagtgtcattgacttgatgtgcatcaatcaatctgactgaatgtcaggaaagtatttattctcaatgttcttatggaccaggtgcccagcaaggatgcttattaagtgtcatatgatgattgcactgttagatcttcttcaatcggaggacagaccaaaaagatggctgcaattccaattaggggactttaaaaatcaattccaaaaagactagtgttctaataattttagtactagaataaaatgaaaagctacaaaagtactaccagatttgggataacatatgtctaaatctgtattagtacatatgcatagattattctgtgaaagtaacagaagtagatacatcctttagtttttgcacttctgtataatttatgaattctaataatgaacacttataatgtttactgtggaaagttttaatgtgtaaaaactcagaaaacatatctaatagtttagtaaatggcaaaatatattttattaataattgcagtataagcaattaattgtaaattgttttgcagtggtgaggagtggaagccacaggttagaaaggaaaggagaacatatagcgggaataaaggcaaaaggtctactgcagttattgtaacaaatggctctatctatgataacttccagcttaaaaataaagtgtggaggcgaggtacagtggctcacgcctgtaatcccagcactttggaaggctgaggcaggtgaatcacctgaggtcaggagttcgagaccagcctggccaacatggtgaaaacccatctctactaaaaatacaaaaattagccgggagcggtggcaggtgactgtaatcccagctactcaggaggctgaggcaggagaatcgcttgaacccgggaggtggatgttgcggtgagccaagattgtgccactgcactccagcctgggtgacaagcaaaactctgtcaataaataaataaataaataaaaatgaaaataaataaataaataaaaaatagagtgtgggctgggcgtggtgggtcatgcctgtaatcccagcactttgggtagccgaggctggccgatcacctaaggtcaggagtttgagaccattctggccaacatggtgaaaccgccccaccccatctctactaaaaatacagaaattaggcatggtggcgcacacctgtaataccagttactcaggagactgaggcaggagaatgacttgaaactgggagctggagtttgcagtgagccgagattgcaccactgcattccagcctgggccacagaatgagactccatctcaaaaaaacaaataaataaaatttaaaaataaataaacaaaattaaagtgtgaatgcctcaggtgtagctttgcctcaaactagcaccaagtatcctctcaaacccaaagattggtgttttatgcttgtgtttcattttgtcccaaaccatctagaatgtatgcttcacaagcatacttttttttgagacagagtttcgcagtgttgcctaggctggagtgcagtaatgcaatcttggctcactgcaacctccgcctcccgggttcaagcgattctcctgcctcagcttcccaagtagcgcctgccaccacgcctggctaattgttgtactagtagtggaggcggggtttcactgtgttggccaggctggtcttgaactcctgacctcgtgatctgcctgcctcagcctcccaaaatgctgggattactttgcctaagttagctgctgtgtccacggtgcctaaaacagcgcctagccatagcaagcattggttgagtgaatgaaaatgtatacttccttattttttagttcccttttcattatatcataaaatgtcaaggacatagggtctagaaatctgctgtctatgcagcgtttaagtcctgagtctgatgtctttgtccagaggatgtcccagtggccgtgggagacctgtcattgatagagagctgacttcctcacgagatgcttcactttcgcaggacagcactgatagtcaggcctttttatggtgaatcaaaatctgtcctcatgtagtttcctagtcctgtgccctaggatcgtgtaaaacaggtttactatttcttctgcatacctgctctttgaatacttatggacagttagctccctccttctctaccattcacccacactttctttttttaaattttttatttccataggtttttggggaacaggtgatatttggctacatgtgtaagttctttagtagcgatttgtgagattttggtgaacccatcatccaagcagtatacactgaacccaatttgtagtcttttatccctcacccccttcccatcctttcctgttgagtccccagagtccactgtgtcattcttaggcctttgcatcttcatggcttagctcccacttatgagtgagaacatacgatatttggtttgccattcctgagttacttcacttagaagaatcatctccattcccatccaggttgctgcaaatgccattaattcattccttttaatggctgagtagtatgtgtatgtgtgtgtgtgtgtgtgtgtatacacacacacacacataccacagtttcttgatccactcattgattgatgggcatttgggctggttccgcatttttgcaacctggaactgtgctgctataaacatgcatctgcaagtacctttttgtagaatgacttcctctgtcacccacccccccctgcaacccccccactttcttaacattccacaaattcttcattagtgtcagtgttttagcaacaccattggctgttgcagcaaggatcctcgtgtccatctcgaccgcctcctctgaacttttcttatagtgtggtgcgtgccttcaaacacagtagtcttaagtgtggtctgagcacaggctgattacttccttgtaaatacaccagaaggtgaaactagtttctgtgatcactatatcacaatagatttttatagagtactgtaaattaaaatccctaaggaatgtttatgagtggatacattccatatttcccccattttgtaaatatgtagttggtattttggattcattggtaggacctcatatctgcactaaatttaatttaaagaattcattccagcctttkagatacctatcatctcttggatcctgatttattatttcttctgttttttcccctaaaattmtcatatgattttgatagaagtacattctgtatatatccatccaatatattaatttaaaaataatgtcaatggtacagggcagagatctgaaatgttttacgggaagacttatgcacccttctaggtaagagaccacacttaattattttattactctagcctcaagctcagtacttggctggccggagctgctcaagaaatatttgctgcattgaaagagctgttgaacatgcttaagctgtcttcatctaaccactctctagtaccaaacccatcagctgggctaccatccaatctgcattcctgcatgttaaagacaagatataatgagaaactttgccaaatgccttggtgaaatgtgtgtgtcctatatttatgggattaccgaacagtttagaaatgatatcctctgttctgtgcttgcaagccaaattgccatatgctctttccagcactggacagacactgagtaaatgtcaatcaaatgaattcatttttctctcagtccagttattatatgcaaatattaatgaacaaagatctttctgggtgccactcaggatacaataaaagatttcagttttctcattcacttcaacatttgtagcatgtctcttctgtgycaggcattctaattagtgagacgagggatgccacccaagtgagggagaatgttctatttattgattcggttgttatatatggagcaatttccatgttccacgtattttattagtccctgtgaatatacagaggcaaagtccctgtcctgtcggggcttacatttaacaaagagtaagttaacaaagtggtgataagaaccacggtagcagtaaacaaggtgatgagagagtagttagggaggcygcttaattagggtggtcacaggaagacctgtgcagctggcatttgagatactctctagaggctgtgaatgagtcatggaaagataggaggcaagagtgctccaggcaaagggaacaacaagtaccaaggtgtaaaatccagcaaggggttggcttcttccagacacagcatagcgggagctcggtgggcggcgtagcgggagcgtgacagggggttgaggctggaggacaagtgggagccaggccgtgcagccctgtaggctgcagtaaggagtgtagattttatcctgtgaacaatagaaggccattgaggcctttaaagtaggaagtgacgtgagtttttycttgtgtcaagggattcctctgactgcctttgggagtcctgttctgagagtattgctctgattcaaaagacagataatggtcacgacaatgcagatggagagaggtagagaaatctaataaatattttggagatagaaccaaaggctcaatgatagggataaagggatacactgatgacgaycgctaaatttttatcatgagctattcattcatggtgctgtttcctcattcagtggaggctggatgaggagcgggtggagtgggggcagtcactgatgttaagtaatttaggagagcgcatgataagtgcttgaatgaatacctcccatacttcatccatgtggtatrctacacattcattcttatttattgagcagctagtatgtgccagacattggrgatagagtagtgaacaaaacgaataaatcttgattttcatgatgaattgtgtttgatattgatgaaagctgtggagaaaaaggaagaagggaaaaaggttagggtgtgccgagtgaaaggattgattacgtgtgatttttaaacagcactgttgagaggccttccataagaagtcaacattttagcaaagactcataatactaataaataaacgtaataatagaatccagggaatcataatagttgggctcagtgtatttttcctaaccagatttgttaattttttcgacctatttttcttttagaagttggggataaaactgggagatgacttaccagctgcttatttattgaaacraggtaaccagtgtatataatatatccataaacgtgctcttagttaccttacttagcagtgatgaattacccaaatccacctagcctttaataaatgggtagtgattaaaagaaaaaaaaaaggaaaacaaagagcatagtggtatctgttttattcttcagtagaaacagatgcaacaatggcacattaaaaaaaaagcaaaagtgaaatggatgtggtggctcatgcctgtaattccagcactttgggagaccgatgcaggaggatcctttgagcmcaggcatatgagaccagcctgggcaacatagtgagactcctgtctctaaaaaaaaaacaagaataaaaaaaattgccctgtgtagtggcacatgcctattgtcctgcttactcttgagggtgaggtgggaggattacttgagcctgggaggtcaaggctgcagtgagccatgatggcaacactgcacttcagcctgggtgacagagcgataccctgccccacctccctccaaaaacaagacttgtcagcatctattcaaagttaataatataatgcctgggaatagattaatattaaatgttagcacacaaagcctattctgcaaatgattgcttctgcctcctgaagacaaggccaagtacatttcactccataacacaggttgtaaggaaaaaaagaaaggcaatggaaagtgttattttcttgaagtaatttatcacagctattgcctcctcaatacatgcataaacttccacatcatcaaaaaaggtagtagctgtttctgcaatcaatccagaaataataagctgggcatgtttctttattaacttctgttataaacataaaaatatatatctgcaagtatgtcaaggaaagaaaaatattggtggttctgatattttctttcaacactttgttatttggagttgtcgtcttaagaaataacatgataaaatattgatatacaaaaatacattaagatatattagtcaccatatattcaaggattgcagatagcatgagagtgtgagatgttcttgagataactttgttaaattcttaaatatcacaatataccctcctgaatttaattttagaacatttacaggggcaactgaaacctatcaaagaatttagccaggattatataattatcatataatatattttctaaatgtccatgtcactgtgtgtagatcaaatcagcattcagtttcttccctgccattgtcacttgacattatttctataattaaactaayattaacacttcctattctttcttgaaattkctaaagaaattacatttggctaagtaatacctccagaaaagaattattttgcattttgatgtctttggaacagctagatcatttgtttaatctgcttcttctgacatcctattagaatttcatttctttgatcaacattttcactgacactatttatgtctaacatgaaaacaccacagtatattgcagcttgaaaaatagtgttctctctattaagtgttgtgcatctctcataagaagagaaaatttggtaaagctgaaagtttattctgtaggtggccacaaactgaggttctaaaattgaaggaaaataaagggtaatattataaacagcaacaaaagtcagatgttaaatatagtggtgtaatataagaactagttgagagataagctaaccgccttcctagagttgcatgcaagcttggacagagttgatttcaccacttcactggtttttctttaaaatgttcatagaagtgatgcttggtaagactggttaattgggaacgagcttaaatgttgacatgattgttgaagttttcataagctcagggagttttaggtaaacattctgtctgctgggtgaggtgttgcagaatagggatatgttacatagatgcttgccctgagcacatcacagccatgagatcgccatggctgttgattttcttaaagtgtttttagtggaggagcaaatgcattaatatttattaagaaggaggaggggggctcttaaaacttgtatttatacacaaatttctttctttttctttttttcttcttcttttttttttgagacggaatctcactctgttgcccaggctggagtgcagtggcgcgatctcggctcactgcaagctccgccttctgggttcacgccattctcctgcctcagcctcctgaatagctgggactacaggcgcccgccaccacgcctggctaattttttttttttttttttttgtatttttagtagagatgggttatcactgtgttagccaggatggtcttgatctcctgacctcgtgatccacacgcctcggcctcccaaagtgctaggattacaggcatgagccactgcgcccggccatttgtagacaaatttataatgaaatagaatgtgactttgaaagtttgctccattacatattagtgctatattttaggaaaactttagaatttttaaaatcaaagttcaatttttccttaagaaaataaaagttatcataaatgattaaaaccttagaaaagtgaatgaaatctttatcacttaattacagggcagtggcaaagttcatttatttaattttcatatgttgacatctatttttgtgtaatagcagatccctgattcccatttatagagatatagtcaattttgattaaagaaagacctaagtgtaaaaaaaatagtaatcgccttttaatcagcatctgcaaatttaagtgaaaaagtaaacaatgattgatttcttctaagctggcatataaggcatcaagaattgttagaattttttgttgaaagtacttgttatgtataagcatttacaaagcttaaacgtcacctcatgatctcatctcaaaaaaaggtcagggcagtctttgattaaaataaaataaagactggtattttgatttcagtttaagctttatttttatctttaaaatgtgcttattaagtccccaaaaacaacaacaaaataacagcytcagagagtaagaatgtaatgcctaagtcaaggaaatgatagacagtgtcaggaactgtgaagtatctgagactttatccctcttgcaggctgctcacagtttcatggatgccaatcttgaactcgagatgcctttgtgagaaatcatatacagtcactcagctggtgcccaatctaattaacagcacacacttgtgaaccaaacattggccccaagacatgagattcctgggtcagggagctggatagtttattacttgccccatagcagtagtcacattgtcaacatctccaggccccagtttccacagggcaatgtgaagtgacacctgcacacacagcaggatgtgttaaaaggagaggaacccggagctcagggaacccgaatcttttatgacagacaggaagcacttctgccctttgatccagaggaagacactacctttgtcttataaggatgcttcctatacaaacccccttggaaagctagtccagcatagaggtagtgaggtaagattgcagaaggccggagacccatggagaataatctcctaacagaaagatttgggttttgtttcttattagacagtgttaatgttacagtgattccatgcaaaactttgtgcttggaataatcttgagtataattgtggttgtatttccatggtaagtaatcatttgcaataggttaggaacattctcatcatttaataacagaggaaactacaaggagagttaaatgatttaatacaaactcaagcagaccctttgtatcaaagcaagtactaacatgctcaaagatgacgtggtttttttttcgtttttaatttttaattgttttttttgagacggagtctcactccgtcacccaggtgggagtgcaatggtgcgatctcagctcactgcaacctcccgcctcagcctcccaagtagctgggctttcagtcgcccactaccacacccagctaagttttgtatttttagtagagatgggatgttgccatgttgcccaggctggtctcgaactcctgacctcaggtgatgcacccacctcggcctccaaaactattaggattacagacgtgagccactgcacctagccaaagatgagttttaaacatactgcactaagtaaggttttcattcaactcctaattttgcagttcaagtagatagatttaaaattatctggtggatccgtaatatttttgttcagtttaaaatttgggaagtaagcagccgtctattgaaggatataattatcattatggatggacttgtagaacaatttgtgatgagaaggcaagatacacattagccctcttaacctgaaaatgtagcctcacatttatattgggggagactatacatgtacgcacacatccacacacatccacacatgtatacacaccatacacatacacacacaccttggttataaaagccaggttgaaatgaaataggtctgatgttttgataattccatcaatttacatggttgaactcaagatgcctttgtgagaaaccatatacaatcactctcaatctaattaacagcacacatttgtgaaccaaacattggtctccattgtgcagttcataatcatgaaacaacttttagaatatctttcaattcaaaatataaacatgtagatattttgacattttccttttgaattttgtgatagccaggatatttttgattagttaacatgttgtcttaatattgaaagatgaattatttacgttgtccttttgtaaaatagaaaatttagctcgttaaaagtttcatgggacagctccagagttctcacagttatataagactctgcctgctctctgctcactactgtaaatacctccatcctataatactgacaacctcatggctaatgaaaatacactgttgttgtctaaaagagtaattcctaaactgtgtytttaacctgtagcaataaaaaacaaatctctacctggaaatcccctacttatttttctctatcattcctatattttcccttatctctgaaatattttgaactactccagcttttagccactcttcttcattstctctttttttttttttagacgaagtctcagcctgtcgcccaggctgcagtgcagtggcgtgatcttggctcactgcaacctccacctcccaagttcaagcgattctcctgcctcagccccccgccccgagtagctggggttacaggaacgcaccaccacacctggctaatttttgtatttttaatagagatgagatttcaccatgttggccaggctggtcttgaactcttgacctcaagtgatccacccacctcggcctcccaaagtgctggtctcttctttttttgttttcttttcttttctttttctttctttttttttttttttttttttttttttttgagacactttaactctgtcctccaggctggagtgcagtggcacaatctcagctcactgcagcctccacctcccaggttcaagtgattctcttgcctcagcctcctgagtagctggtattacaggtgtgtgccaccacgtccagctaattattgtatttttagtagagatggggttttgccatgttggccagactggtctccaactcctgacctcaagtgatcctcccgcctcggcctcctaaagttctgggattacaggcgtgagccaccacacccagcctccttttttttctcttcattcttaaaacatttggtgtggtacgcatggcacaagccctaatatagcatgtatcatattcttgtacataattctgttgtaatatctctgtcaccaggctgtgttattcatttttgtaatatcactttctagcactgtgcctagcaaatagttacttattcagtaaatatttgttgacagtaagaattgaatgaattttaatgtcaccagcaattaggtctaaatcttattcatacttactttagagcatatggaaattagaacagtgtgagtaatttgagcaaattatattttctatattaaaggttgaaatataagtctacctttttcataccattagtactatttcaggttcttaaagcacttctaggtacagcaactgtgagatatttaacagaaaaactttgtcacattataaaaacaaactctaaatgtgaaagatgatgtttacaaattttgtaagtttcttctcatgattacagttttctctaatagatgaaaataggggaaaaaacatttaaagtgaagtgaatgcacattcattcatccgcttatcccaaaagtactaagtcacagtgttttgccaagtactttaataagtgatgggtatacagagatttggttggttttattttagggagggacagcggaggagatacagttttactaagatataattcacatactataaaattcacccatttaaaktctaaaattcattgtttgttagtatattcacagagttttgtaaccatcaccacagtcaattttkattttcatcactcccaaaagaaacccacttccctttagcagtaactcctgtttctccccaaacactgtccaccaccaccttaggcaatcactaatgcactctctgtgtctatagatttgccaactctagacattcaatatcaatggaatcatacaacatcttatgactggcttctttcactgagtacaatgttttcaaggttcacccaggttgtggtatgaaccagcacttcatcctttttcattgctgagtaatattccaatgtatggatacaacaaacacatgcatatatcattggttaattgatgagcatttgggtggtttcyaccttttggctattaataataatgctgatagggacattcatgtgcaagtttttatttggacatatttttcatttctatcaagtatatagcctaggagtagaattgcaggatcatatgataactctaggtttgagcatttgagggattgctggactgttttccaaagtggcggtagcattttacattcccacctgcagtgtgtgagattccaccttctccctatctgttgagattttaagagaagattttaacaaatatttccaactagagcttctgaaagtaatgttggtgattactagaaagttccgaatcatttttgaaaatgcggctactttttatttagtagctgctaacatttactgagtgcttactgtatactatgcattaatctaagaattttacatgtagtcagacatttcatacttataacaaytctgtaagatacatgtgaacagtattttacttttgaaggtattaaagcaagaaagttgagaagcagacatttaaactgaggtagtctggcttgagagcctctgtatttgccactggcttaaatctctgctgcgaagttaaaaatacgctcgtaaatgtaattttgtatttaaagattaaggrtaaaattgtattgtgaattttgatctrtgggccaaagacttccttttactgaccatctaactgacaatttcattaaatattaattaataatttttgctaagttaatataagatataaggtggtaatttcttgtactaatattagtaccatcatgtttttggattttaaatattatttataacttctgttttcagttcaggggagtgccattatctacctaataagtgcttactatgcacagtcttccaagcagattgcatgtagtatctctacagtaatatgatgctgcctttggactgtatctgcttcaatatttttaatgcatgaatcagtaatttctgttggctcacaataaaaacgtttatttctggccaggcacggtggctcatgcctgtaatcccagcactttgggaggccaaggagggtggatcacctggggtcaggagttgaagtcctgcctggccaacaaggcgaatcccgtctgtactaaaaaaacaaaaattagccaggtgtggtggtgcatgcctgtagtcccagctactcgggaggctggggcaggagaatcccttgagcctgggaggcagaggttgcatgcagtgagccgatgtcatgcaactatactccagccttagtgacagagtgagaccctgtcttaaaaacaaaacaaaaacatttatttcttcctcttcttttattttactcaatataagtcatttaattttattcattttctttatcctaaaattagtgaaataaatttatcctattgttgcatggaaaatttatggatatttaaaaaaaagagataaagttacaagctgccactgggaaaaaaaaaaaaaaggcaacaaaaagctaggactaattaattttactcacagagccagcaagctgtcccatctctgggaggaaaagacacgtactggaaatatttaacagtggaatatatttatatagtactatcttttccttaaagtaatgctcctgtctgaggaaatatttttcttagatattcttacaaacctctattaatttaaaaaaaattttttttttttttttttgagatggagtctcgctcttatcacccagactggagtgcagtggtgcgatcttggcttactgcaacctctgcttcctgggttcaagtgattctcctgtctcagactcctgagtagctgggattacaggcacgtgccaccacacccaggtaatttttttttttttttttttttgagatagagtctcactctatcacccaggctggagtgcagtggagcgatcttggctcactgcaacctctacctcccaggttcaagcaattctccctgtctcagcctcctaagtagctggggattacaggtgtgtgccaccacgcctggctaatttttgtaattttagtagagactgggtttaaccgtgttggccaggctggtctcaaactcctgacctcgtgatccacccacctcagcctctcaaagagcttggattacaggcacgagccactgcacccagcctaatttttgtgtttttattagagacggggttttgtcatgttggccagactggctgtaattcctcacctcaagtgatctgcccacctcggcctcccaaagtgctgggattacagatgagagccaccacrcccggccacaaacctctttttgattgaagcaactgagaaatataaaattgtttgaaaattgtctatataaaaatgagcaaagcagtatttataaaaaaatacttcatcattattaataagacaaacacaacacactcattacagtgtgagccccagagtttgtgtctgcatcactgaatggctatttggtttcaacgcctgactcttaagtttgggattttgtgtagtttttatttctttgtttgtattaatcagcctcattgtgattttagcttctatttctaaagttagtaatcttgaaattattttgctcatatgtattataaaacaccttgagaaaccatatacttccttgcacatttttaagttgatataaaaattttattataggtttaagtagttgcagtatggtcagattataaatattaaggttaaattatacagcaattgcatcattttaaaaatgttttkgggggatattaaaactgatgatttacccttcagtatcatcttgctaataatacatgtaaaagatgatttttaatagtctgaaatttgatattgtttcttttttacaaactttttcatttctattctactctcctgcataactttatcccaatgtaatatagttaatcttcatttttcacgggttccatatttgcaaattcaccaacatggtaaaattattccttgccccaaaatcagtactggaagcttttaaggtcattcacagaaatggcagagttgtgaagatttgagttgctcaataagcatgttctcagttgaggttgagtgttctgctttcttgtttcaactttcgtactgcaaacaaatgccctctttgaggtctatgtagtgtcatgtttttcatattttggtgctttttattggtgatttcattgttcgaaatggccccaagcatagtactgaagtrctggctagtgttcctgagtttaagtaggtggtgatgtcygttgtggagaaatacacattatagaaacctagttaaggcattagttatagtgatattggctatgagtgcaatgttaatgaatcaataaaatgtaataaacaagctgtctttaaacagaaacacacataaaacaakgttatgtattgactggtggatgaaaatgttgtaaccagaggctcaaaggaacctaaccctgtatttttcccctaggaacaatgctttagtattcagcagtttactgttcgtggtgactttacagactacaactatagcctatagaaaataacaagaatcaactattttttgttttaaatatctttacacatcatctcaaaatatatctttgcaacaaaaacatgtataagaattaaagtttatgatatatttttaaattctcttgtaccataagccttagtattaatttctagtgaatcatgatgtgtcatgctatttttagtatacaaatcacttaaaaatataaatatatatttgggtgaatggtttcttggtatttttgacaaataattactaagcataaaaatattagaaataaatcccttaattagatgaatgggcttatttttatgcatggtaacctgtctgtggatgaatcttacttattgctggaatgaaatggattcagcatcattttgttcttccttttcattgttatgggtgtaagcccrtgttctaactaataagtttattggaatagaagagattttattatagcaacttcattcttttaatgtcttcaaaattgtaacaaaaatttattagtaatatttgtcataattactccagtgatctgtcaatttataacccaattgaatccatctttaattttgttgaaaataaagaatttgaagctaattacttggacaaaattatatagagacattcacctattcaatttctaggaaatgtatcaaatatattttataaagttttttttaactcacttaatttttcttgccattctatcatttagaggtattttgttcaatctgacaaattttgaaacattgggaaaaattgaaatgttcttcagtttaatacacttttgtcaatacaatatttataataaaattattttatttaacattttttaaatcaaaaccttggagctgcatattccatttgtggaaagtgaccgccttttgacatgatgtaaaaccaatctttttcaaatcagacagccaataggagttaatttttcagaaaaaaatgggcccccatagccatcttatatctgtcaagcaccacatagtaacatttcagtcaatgagggaccacatatatgatggtggtcccttaagattatagtaccatatttttactgtacctttgctatgcttagagacacaaacactactgtattataattgcctacagtattcagtgcagtagcatgctgtacacgttgccttggggcaatatactatatcatatagcctaggtgtgtaataggctatataatctaggtttgcataaatacactccatgatgtttgcacaatgatgaaattgcstaaggatgcatttctcaaaacgcataactatactacagaggagtaggtggatggatgggtggatggctggctatgtggatgtgtggatgaatgggcagatggacagatggatggttaggtaagagatggaactttgccagcagtttgtctcctgggtgatataagataccgtcatcttcagtattatagacaacaatcttagctctgatcttctgagaacttccctgaggaggaattacttctttggcaataccaaggggtagaagagctatgagagttaaatgaacatcaccatctctcttgtccctctttactgtgtatctgtattcataccagcctaactcaacccacgtgctgaaaacacagtccgaaatggctaaaaaatacatcatcgttcctaatgccaacctttaccttactctgaaagaaataaagctctactgtgagttaacgggttgggttaaaagaggctccccgttcccagttgttcaaggcatgctcctttaacaccctgtggtggtgcaccagagccascgtgggggagattgagtgtattcctttgttttgtgaagtgggagaatgttgatttcgaagggaagctgggacaaaatgatccatcatgaaacagccataaatgtgtttccagacatatctgtttgaaggarcggtgtgtgaggaataggagaactttccattggcacgtcccatataccctcagggtaacatacagtccagtgtgaaagccactgacacagaggagggagtttaggacccaagattcwttttcctgcttctttccttgtgaagtttgggcaagccacttttattctttgtgcatctgtttctttattttaaaaataggaatagtaaatggtctcccaattatctttyagtgctattgtgaagattaactgagataatgtctgtaaaagcactttgaaaattgagagctctatttaaacagaagatatcactatcagtatactaacgacactttagaccaattacaatttactataaagtgtagtggaatagarctccattgggaacacttttcttatttaaagaaaataaatggtacatttttaaaaccaaacattaatatggcacaactgacgtgataattacaataatttttacactatatgttggacctgaagttaagagtcaataattgctgaaacttaaaatgtgcctaggcactcttctaaatacctttcttatattgatttattaaattctcacaacaactttaggaggtagatactatgattattatttttgatgaggtacaaagtatactgagaacgtataccttataagacacaaaccctctctagttatcatccagtctttcttctcctttctttgtcatctccttccccaaagagttttgcccttattattatgtccactttctcatcgtttttttttggagacacagtctcactcttgtcgcccaggctggagtgccatggcgcgatctcagttcactgcaacctccacctcctgggttcatgtgattctcctgtctcagcctcctgagtagctgggattacaggtgtgcgccaccacgcccagctaattttgatatttttagtagagatggggtttcaccatgttggccaggctggtctcgaactcctgacctcaggtgatctgcccacttcagcctcccaaacttctgggattacaggtgtgagccaccgtgtctggccagatactattattattgcctattttgttggtaataaattgagagagagaaactgtgtgacatgcttacatagttggttaggatgggacagagctagtctgtgaacccacacagagggttctaacatccatggtcttagccacagtatacacgtcttattatatagattttcagttgcctttttcctacctctcattctccatctcccttaatgtggtttctactaaataattttaaaagtggaagaattaatcaaagaataaaaaaagagtatgttggggagagagagaaggaaaaagagagagaggagggaattctactggagatacaccctcgtcaaagaaccaaagctgtttccttgaggctatgcgcgatgtcctcatcagttgctatgttctaagaccagggtctcttactccctgaggagggtaggaagtcctcattctgtttccagccggggaacctggaagtggcaggagaccttgacattcccagtctggcccratgcagtacygggcacctcttccacctcaaggagggaaggagtgggaaggcttgggctatgattcttgagccttgcgatccaccttttcaagtggtggcagcatagtcttaagtttctctctttttgttttttcaaaatagttttgcctttgaatctattttttgtgatattaataatattgtcatccctgccttcttatgattacattttacttggcgtatyttttattcatttattttgaaaccatttgtgtctttatatctaaaatgcagccctgtagacagagtatagctggacccacttccctctgtccacgtagtccctgccttttaattggagtgtttacttcattaaaatttaatgtaattattgatgtggtgagttctggtcaccagtttattgtatttttctatctacctctctatttttcttccattcttcattatctcctgccctttttggaaggattatttcaatattttttggaattccattatgatttttgcttgctttttgggtcaatatttttattcattttgatttttactataagaaatataatgtctgtccttaacttcttagtttcttcattgttaatattgctccacttcataaaataaataaaagacccatatttaccccgcacctattatgccatacttggcatacatattatatgttctaaactccccatggaatagaatttctgctttacccagtcatctgcattaaataaattatgttgaataaagcaaaaaaattcctacctaattatcttctgtatttagcacttatgatgcttttactgtttcttgtggatttgaatctctgtcttgtaccatttcacttcagcctgaagagtttatttgatatttcttgtgatatgagtctgcttgtgataaattatcttaattttatttaatcttaaaatatctttattttattctcatttttaaaagatattttcactggatataaacttctgcattgacaagcattttttgctttttgttttcttcctgaactgtaatattgtgccgtcacttctggactccattgtttctgaccagaagttaacccttaattacatcattttaaccctgtatgtgacagacaaacttttcttgttgttttcaaagcttgttccttgtctttggctttccatagtttgactatgctatgatttgccttgacacaagcacgttcatatttatcctgcttgacatttgttgaacatcttgaatatgtaaatttatttatttcatcacatattaaaatttgagggcattattttttgaaaaatttttctgccccattctttcattttttctttgtgactccaacaacatatatattagatcatttgatattatctaatatgtccctaacatctattcatttaaaaacaattctttattcttcactaatgctttcctctttaatctccatttgggtattaaatttatttaacagatttttattccaggcaattgtagttttagttctagaatttctatttgattctctctctctctctttttttcttttttttaaaatagagctaaggtctcactgtattgctcaggttgatctcaaactcctgggctcaagtgatctgcccgtgtgggcctcccaaaaaattgctaggagtgagccaccatgcccggcctgattcctttttataatttctatttctctgattatctgtcatatctttccactcattgcaatttttttttttttttttttactcctttaaggacagtaatactactagctcctttaaaattttgtttcctagtttcaaaattagagtcatttcagggttttgtctcacttgattttcttttctccgagaatggtttactttcatggttctttgaaatgttagatacttttaaaattatatcgcagacattataaacgtaattactggagacactgaattctgtaattttttctccagtgacccttggttctttgtttgtttgttttggaagacatttattttggttgatcttgaaaagaaaatctgttctttgtgtgcaagtctgatctccatctagatctttttctttaatatatatgaacatttattttacaacagttttagttttacagaaaaagatgcaaaaatagtacagggagttcccatgtaccccacacccagtttccctattttaaacttcttacattgttatactacatctgttatcattaatgaaagaatgctgatacattcttattaactaaaattcaaactgtatttggatattcttagttttaccgaatgtctcttttcttttccaggattccatccaggctaccacattgcatttactcatctccttaggcccttagactctaacagtttctaaagactgttcttgttttggatgaccttgaaaggtttgcgcagtgctggccaggtgttttttacaacgtccctcaattgcgttttgtgcgatgttttcgtgaagattagactgggcttatgtgtttttgagagaaagcccacagagataaattgcccattgcatcacactgtgtcaagggtaaacatgatcaagatgacttaccactgttgatgttgaccttgatcacctggctgcggtagcgcctgtcaggtttctccactgtgaggttgtttttgttcccctttccatgctgtattcttcaggaggaagacaatcacaggggtgttacaatcataggggcgtttacattcacagggggattacaatcacaggggcgtttacattcacagggggattacaatcacaggggcgtttacattcacgggcgttcatattcacaggggtgttacactcaaaggggcatttacagtcataggggcgtttacattcacaggggatttactgtcacaggggcattatacttcacctccttgagcacatccttcctttagctgagcaactttgagtctgataacrcaccttcatcattcaggggttagccagagacgtggrtagatagaaatttgggtttctctttctgactcattttcttctgtgtctcctcggaggcaggtgtcccagtcttggtgttttgcttcttcagccagaaaaactgtggctttgcaaccaaagtgccygctggcccacatgccatgtgcacggactgcacctggcttcaagcctaaagctgtgagaatgggcactccctttacgtaactgtacttctcctgatgtggaccccctaactagaaatcttcattttttttgttcactcttctatggcttttcaagaatctgctttctttagtgaagtcccaattttatagtagtttttttgcaggagggttgatccgatagcatttaataattcattataaaaggcaaaaatcctggcctctatgtataagtggggagatgaaatgaggcttcctgtcacaaagatcttcaaagacagaaataaagaattatgaaacaagctactagaggatggtatcatacagcatatactcaagtgctaaatgagtatgcaggtaatagttataaaaataaaaataaataataaaatataaaacataaaaatagcaattaaaaaataaaaaacgagctataaaaatgcttgtagctagtaataatgcagatccttataacaacccaatgaagatgaaattgcacatgcaaggtcacttaacattgagctatgagtccaaagatgcagttctagagatttgtgttccaccacaaattattgggtagggaaatagattgctgtagatgagattaggttagaaatgaaggactaccgttaacaaaatttattgatggatcaaagagggtaggaataaggcaaagcactaagacaggtgtaggaagagaatgtttattttatttatctactggacatccgtgtagatatcaaatgctagtagatgcaattatctgaagttccagtgagggccaggtgtggtggctcatgcctgtaataccagcacttagggaggctgaggcgaattgatcacctgaggtcaggagttcgagaccagcctggccaacatgaggaaaccccttctctactaaaaatacaaaaattgctgggtgtggtggtgggcatctgtaatcgcaggtactcgggaggctgaggcaggagaattgcttgaacctgcgaggcggaggttgcagtgagctgagatcgtgccactgcactctatagtgggagacagagtgagatgagagagagagagagagaggaagggagagagagagagaggaaaagaaagaaataaaggagggagggaggaagggaaggagggagggagggaggaagagaaagaaagagaaagagaaagaaaggtccagggagatggcaagtctggaaataaggatttgggagttgatgacatatccattgcattacagccacgggattagaggaggtcacctgggagaatacacagattcagactcctgggatgctccaaaatctgcagggccaataaagggagagaatccagaagaggaagctacaaaagtatgtcctcttttgtaggggaaaccagaagggtttctctggcgggtgccaagagaagaaaggatgatgagaacagaagccaactatattgaatgtccctggaaggtcaacctgataagaactgaaatgtgatgacaggattgaagtgtagagctcattgctttaccaagagcagtcttcaagtgttggctcacggaagagtataaaataaagaaatggagaccagggtgataagaaattctcaatgaaaatttctatatagaaaaatggggtagtaatcgcaggagggtgtgaggacaggttggttggtttgytaaagttagggaatactagatttagtgatagttctcaaaggtgcagaagaaacttcccaggcaagggacatttggaaacatgtggagttacttttgtgttgccgcaattaaccggggcgtgcctctgatacttaytgggctgcaggtggagccgaacatcccacggagcttaggaaaccctctcatgaggaagaattgcctgccttcagtgcactgagtccatttttgtgctcatgttaatgktctrtcttgggctgtgattttctttgggtctctcagcaaaactgtctraggcatcacatgatgttatttgccatctaaaaggacttcaccgaacctttgacagttctggatatgactttgattagtccaccttatgtcacctgtattctgcagaatcaatcactggaacaaggggagtgccaggcacagattggcttgcatcatccctgaaccaatcatttgaccaatgacaaggaggatggggctgtgctgatgaatgacatygctcttctcagtgcaggaggcggaatggctgcttgaggagcagccagaatcatttaagaatcattaattattgatattgactactatatttatgaagtttataccctggtcagacttggtaaataaaattgtcttaaaagaaatataagggcccatccaccaataaccctttcccctcttcccacccattcacttccttactctctgggacttctcaaccctggttagggatatcataaaaaaggaatctggatatatctcattatgttttttgttatcagtgcattatgatgttgattgataatacacatgattgataatgtttactggtatgttgtttgtttctgatactatattatacgtcatcaaaacaattattaaaacaatgcatttccaagcttttcatatgtaattaaaccttagaaagtagaggtgagccatattctctatcatatctcttggtctctggaagttttctgtccaccaagaggagcagaatccagaaaaattggctactttatttagtatttacccacatcctatctaatctcccttagttaccatgcaagcaaaggacactgctttcattagctctacctcctctaggtgcctagaatagggaactatttttggagcacacacttgcccagcactaggaggataggccctgtactagtctctttctgagattttctaatacatccataatctcaataaatcttgtgtaacagacattggtgttgcatcccttataccgatttattagatcaggaagctaacagtcaaggtggccaggtaacttgtcataaaatyagcaagcgttacaaccagcattcaaatttctctttatgtagctctaaagacgttctgccttctgtgactttaaagaggtagtaggtggggagaactgggtacttccytccactcctgttttggaaatcatggctggagttcaggggctggtacagatgggacatgacatgtttcccacatatgtcagaaaaaggttgagacccactcaaatcacattactgccattcagcactagccatttttcacataatggcacttgattatgaactcagtgagtttcttaagatgttttttcttattcatgcgaatgttttagttggtcaaatattatgtatttggtttatctttccattttaaatttatattgtatgttagatttaytgttaaaaatattcatatccgtagtatttatgatttatctaaatactgtaactttaaatctgtaacttttctattatagaaaaaacttgtatatacttaggatttcagtagttggacagaggtatctttaatattttttgcagtttccctttacaaaaaaactctcatccttgcagtaggagttccatgatttgaacccctggagcaaaatcataaacttaggatctcctggaatttttatctggttttatagcagctttggcacaaattccagccacttcttcccacattccttcctatggtgttttactttaaatctattctcactagtagaaaatgaaatttagaactggggtcatatcttttgtccctatagcccctaacttgtcatgtgtcttttctgatgaattggttgtcttatggtctctgatctgaggatgctgtgaagatacctcagggcttccaatacatttttatttcttcccctctattttcaaaggcgtcaaatgaaattgacttaaaagtgtatcaaaagcaccttttcctccgtaattagtatttttcatgaattttctttatttggagcactttgtcactggtcgtccttcctttttctaaacactttccgtgctggtcagagatgtcaggcctttgttcttgtggtgccatctgggccacctgccctcactggagtgtcacgtctgttttggggcccatgttgttcatggttattgttcacggtcctttgctcttagctcctcactggagcttttatttatttgtactgcacacccatatagggaatatctgatttatgtcataaagccttttgattgttatctttttaatcatgagggatggaaatgtggactttttttttttttttttttttttttttttttttttttagacaaggtctctgtcacccagggtgactgagtgcaatggcacaaccatagctcactgaaacctctaattcctgggcttacacagtcatcccacctcagcctccagagtagctgggactgcaagtgcacgccaccacgccctgctgattgtttaaaaaaattttttgtagagatggggtctcactttgttgcccaggctggtcttgaacttctgggctcaagtcatccttgccccttggcctcccaaagtgttaggattacaggcttgagccattgtgcctggcctggacttttcttctgagatggtttcaggaagcctattttagtagaaatggaatgagctttagagttagattgaaataaatttgaaacccagttccattagaaagtaattaatgtccttagaaaagtgggtcccattccctgggccttcgtttattattctataaaataaggataataatagggacctgaccagatcactgggaggcttagaaaaaccatatgagagcacaatgtctggcacatagtaagtgcctgattattattggcattgtaatgattattataattatgatgaggtgggtcatctcacattggtattgagaaataattagctatagtactacatttaaaggaaacacagcagtaaataaacaatarcacttgcccttgaggagtttgttatcttttaaagaaggcaaaatgtatatcaaaaacagctaaatgtccattatttttaaatgttacaagacgatagttttaaatactataaatattatttaatgaaccgaataatatggtctgtggtttatttatgttttcaagataagggaactgagacctaaagagggaggttaatagattgacccctagcatcctaagccaattaaaggagtctgtggggatttttcataggtcttcctaatgcttcaggatgttcttttaacccrtgtgctatcctgcttccaygaggaatgtggtgaatattaaaagacatayatagtaaatgccactggtgccctgaataaggaagatcaggcttttgcagtagctgatagccagaagcttcttggrggaggtcacatttgaagtgggccatggaggtaggcaggatttcaataggaagaggagaaggagggaggtcatgaataaaagcaagaagttgtgtgcagcagttttttgtgatttttttttttctgggagcatttagtttaaaagagtacacatggagattaatgaagaaaatgctggaatgtaggtttgtgctagatgaaagggatcttggagtctttcctcaccagccgacagtgtgagacttaaaggatttgagtggtgtgacatagctctgtattaataaggctcattttgcagaactatgtagggccttttggaggtgatggcgtggatcaagactccagttgggggctattatgagactctagaaaagatgtgatgagagcgtgacttcaagcagtgagagaaagaatggaaagkaaagggcagtgagagacgctgaagaggtgggacagcaggtgcagtgagaagacggcatgcagacagacagactagaggatgcagcctgggtctcacggggaacagtggcttcaataagacaaatggtgtcactagygtctctgccccctccctgccaaaaagagggcaaataattgtcttcatagacccagtggagcattttggccaggaccacccaagtctagggctctgagccatagccccgagtgggtcttcactctggtctatagagcagcttagattttttccattgctataccttgagtgctaacacatcgcctcctatttttattwagagggtcactgtggagggagtgtgagtgtgtacatgctgtcagagctgagycttttcaataaactcatgggactctttcaattccaatcaagcaagtgtcctgctcaagtctctctgtttcccaggatggatgtcaaagggagaatgcaattttggtttgcaggtcactgacgaatatatgaaagggaaatctcgtgggtaactaactctgtttttcccaaatattgctctatagcattaagttttttgttgtaagtgaaagaaaatatataccattcactgaagggctgcgaggggtaaatcggttgagaaatgttgctatcaccatttaagggcttcgagtgatgctcactttctcttctcccttccaatttccttggtcagtgtttgtcaggttcaactccagccatggtttcccagtggaggtcgattctgacaccagcatcttccagctcaaggaggtggttgctaagygacagggggttccggctgaccagttgcstgtgattttcgcagggaaggagctgaggaatgactggactgtgcaggtgagtctcccttggcggccgttcytgggatgccgccagctccattgctcatgccgcctgcgctgccaatctgacattcatgcctgagatctaatagaataaatagtgcctggggattccttgaactttactccacactgcttcattaattctgaccttcttaattatgcattaaaacagcaagcaggaaagattggaagaacaactgcgagtgagaaagagagagagaaagaacacacgagctaggcttagtgaataaatgtctactgactacaggagcagcaaggcacaatttctgtgtctgttcaatttctaccttacttattccatttgaatcttaacgaagaaggattcgaataaattgttcccaatcaggctgctcagtccctgcactgtgaggaatttgtaacccaattgtgacccctggaggttagtgagggctgctgctatgctgcgctagaggaggtgtgggctccggggcccattggcaactagctttgggcactccttggccaggaccagaatcgcacagttctgcagctgatggggaaggaagcctggagcacaacaacagtatacctttgcatgaatttctccaaggttcagtaacattgtccctggaaataggcccctgcaacgtaataagtgtgaacgatgctctcttctctcctggccccagcagagcttctggcagcccactgctcctagccccatgaaagccctacacacatgtcattcggattggtgatttttgtaggaattagggggactggtgaggtgactgataataccaccatcacctagaactagagacccgtcctttgttggggaaactcgcaaatacaactcaacatttgttgacgytattctttgtgaatgcaagaaagacgaaacgctttctgggaatggtccctgtgactgtgaaggaccctgcagatgtatgttccccttttcttaaccagcatcaattaattgcactcaggtttacagctgtgtgggtatcactgctccgcgcaggggggctcctgggtcagagtacacaaagtccgtccttgtatctgcatcctttccctgtctcttgtgggtaacgatatttatggctttgtaaaatgctctcagaatttgggtatacaaagaagctacagaaatgcaaattgttcctgtcattctgcattgcatctcctgctgatggtgttgaggcacatactcgttgtgcacaaactgctggcctctgctttcaggcaatttggttttataagggaagtgcatgtgctaaaaagggttttgattttttttttttctatttcagtcaactaaaaagattttcactgtatctgccaacctctaaatccaaggatgtttccttcacaaataaataattttaaaacagytccttgaatcaaaacattttatattgccaaaaccttcaggttctaaactgccatttgtgctgattcataaaacaattagcgatttcatatgtagttagactaattgcttcagatgattgactttgcaaacatatatgcctaagacatgtgttgatttatgagtctattttgacaaacacttcttaagcacttccaatgtcctaggcttctcaggggatccaaaagagagacctaactcagcccctgttttcatggagactgctctttatttatgagccctaaaaccgagagaaatattagattgaaccatatgggattgccatttttacaggttcaacaatttcatgttgttcaacctaatagctataatataagaatatgaaacataactgccgtatcgcacctgaaaatattatgaagttttaaaggtggagaaaacacatctggttggaagtcaccaggaagaacttcttggatgaattgagttgaggtaggattctgtagatggaggaataggggaatgagcatagagaatgcttgccaaaaaggatgggttcttgttcttctagaacctgaagagagatgttgaagattggacaaaaaataaaatatgggctatatttcacataaccttgactaacttggcattgaagtttcattggtggggaactagagaaaaatgkcatgccatagaaggaaatgggaagtctgaagacccggtttggttgggggaaggatgctgcattgttccaacatgaygggagttgatgccagctgagtacgtgtgtttggagatgcctagctggctgttgagaacttgtgtctgaggacactgaaaaagaaaggttcatacttatggaacttctattaaatcacagttaaatgatttaggtgccgagaagttggcaaactttgttcatagaagagtttcactgtaaagactaggaagttacacatgtaattgcaaattgatggctatgttttctttaagtgtacaactggcagaattttagcatcctagatattcttgtataatcttagaacatatgtttacaactatttagtcaatatcatttagttacccattatcattacaggtgctatatttcacagtataagcacaaaatatctaataataagttgctgctgagaaaaagaagatggaccttccatatgagctacttaatgcttccattaatgaatgttaaatatacaccttggtgtcctgaagagaagaagagatggctggggtggtgtctatgcttgctgggtgtcttcctcctggtttcgtattctttatcataggtgatatgaacatatatattagcttatcatgcaaaatgagatattgtgagtataaaagaagaccctgtcaataattattccaggacaaaattatatgttgggagtgtcctaggaaaactgaggcaatggtcaccccacatactgagcagtatctctcacacttagtttcaccttctttgaggaggaaattagttttagtgcctcacctcaggtactttggggaactatagcttgagaccacagtcttatgaaatgtcataattttaaaaagcgagtttgtctatttaactggcaaagggtatttgtaagattataatagaattgatgtcacatctaaaaaattttcatagaattttcagttctgggagagcatatccacaggccacttagagaagcactgttagagtatagttattttcattacacactcatctgttcagttttgttattggcaagactttaagaactttaaaaaattaaaggaaaatggaaaaaatatagacattgaaaacgaatgatctggcacagattttgcttctgggaagctggagtaggcatacttttccctcttcctcccagcaactacactaaaaagcctagacattgcatattgtacagttgactcgtggagtcatggagttaggggtgccaaccgctatgtagacaaaactcatgtatacttttatctcccctcacactttaccagtagtctgctattgacgggaagccttaytgataccatgaacagttgattaatacatatttttcatatgtaatatgtactgtatgcttataataaaaaaactagagaaaacattaacagcattacaaaaaggagagaggatacttactattcattaagtagaagtggatcatcaagattttcattgtctttgtcttcatgttgagtaggctaaagaggaagaggaagagggggagttagtctcactgtctcaggggtggcagaggcagaagaaaatctgcatataaatggacccatgcagtttmaacccatgttattcaagggtccgctgtacaagcttaggaagattctgaaagtagtgagaagaatgtggacagagtagggattttagaacccaaggaagaatccagaggtgaatttcttgagttttctttttgctacgttacctcagatgtggaactgaagaagctggcaaccaggaaatgtcaacatatatagacaaaaagaaaagagaagaraaaagaagcagagaggaagggaggggcagagagagagagagagagagagagaagggaggggtaaaggaagggggaagggaagggaaaaggaagaaaggaaggaaggaagaaatccccaacaatggcctgttttttatccagaggactcagaaaggggctgcctagcaacatagaaaacatttagacaataaccagtctactccagccaaatgcaacagaaaaactgcggccctatccttgtccccaccaacactagtaaaggctgagtggagagcctyttgtttgaaatttctgaaataawacactcactgatgggtttgacataagaatggaaggaacagagaaaagagtcagtgaactggaagttggaacatagaaatgacacggtccaaatggcaaagaaaaggtaggctggaraaagaaaaaaggaatagagcctcagagacctgtggttctccaacagagcatttaaagtttgtgtcaggggattcctggaaggagaagataatggtgggcaaatgctcaaagaaataagtgttggaaacttccaaagtttgcaagagacataaagttatagatggatttataaagctgagtgaatctaaaacaggaaaaacccaaagaaacccacaccaacacacaacgtaattcaacttcttaaaactaaagacaaattttagatcttgaaagaagccagagaaatatcacaccttccctatagggctaacattgttctaattacagtggatttctcatcagaaaccatgaaggctagaaggaagtggcacaatgtttttcaaatgctgaaagaaaagaactgccaacctgtaatattatacccagtgaaaatgtcgttcaggaagaaagaacaaatcaatacttttttttttagataaagaaaaactaagcgaatttgtcaccagcagacctaccctaaaagaatggctaaagaaattttctaaacaaatgaaacaacaaaaaaaggaattttggaacactaggaaggagggaaaaacatagtaagcaaaaatatggttaaatacaatgcactgtttttctcctcttgagttttctaaattatgttagagggttgcagcaaaagttatagcattgtctaatgtagttctacatgtagaagaaacatttcaggcaaacataaacacagatgcaaggaaaggtaagatttctaaacttgacctacaaaatagcaactgcagtagagcatgacaagttaagaatgtataaagaaatatctagagtaataggtaaagtaggtaaattaaaatacaaaataaagacaacaccaaatgctggtgaggatgtggagaaattggattactcgcaaattgctactgggaatataaaatggtagagccactctggaaaagaatatagcagtttcataaaaaatgacatatgtatttaccagatgacagagttatactcttagttatttatcctagagaaatgaagacgtaggtacacacacaaatctgtatatgaatgtttatagcagttttattcacattagcagaacacggaaacaactctgatgtctttcagtggatctgtggttcaacaaactggtacctccacaccctagaatattactcagcagtaaaaaaggagccgactgttgatatacaaaatatcttggatggatctcaggggaaatgtgctgtgtggaaaaagcccatccccaaagatcgtacactgaataattttatttatataacattctcaaaacgacaaaatgatagaaatggagggcagattcatgcttcccagcagttctgaagsgggtggaagcaggtgagaggagggtacgactgtgaaagggtaacagaagggaccctttggtgacggccgtcctctgtgctgactgtaacaatgcttatagtacaattataacgtctagcttggcaagatgttaccactggcggaagctggggaaaaggtagctggcatctttctctgctatctcttacaactgcgttagaatgtgtaagcattttaatataaagttgaatttaaaaaaaacctaggatatctgtccactttcacagaggaattgaaactatcactttcttagaaaataagcttgctatttgtctctcttttaaagggagagtatgtattcaatgagtgatatttaacataagaaatgagaaaaataatttaattgattagcagacacatttaaagacttgttcatactaagagtacagggtgagtaaaacttatagagacattaatgcctctttcttgaagcctttttttatttatttatttatttttttttgagacagagtctcgctctgtcgcccaggctggagtgcaatggcacaatccctgctcactgcaagctccgcctcccgggttcaagcgattctcctgcctcagcctcccgagtagctgggattacaggcgcccgctaccacgcctggctcatttttgtgtttttagtagagacggggtttcaccatgttggccaggctggtcttgaactcctgacctcaggtgatccactcatcttgtcctcccaaagtgctgagattacaggcatgagccaccactcctggcctctttcttgaagtcttaaacagaatttttagcacattatagatctgaatagacatgatgagtatttatttgcaaactctttaccaaatatttaaactaagcaaaagtaaatagttcttgacaattgtgtactccagttgtacatagtttttaaattgatttgttagtcatacattataattttaggaaataaatgagccagatcgggcacagtggctcatgcccgtaatcccagcactttgggaggccaagacaggcagatcacgaggtcaggagttcgacaccagcttgaccaacatggtgaaaccccgtctctactaaaaatacaaaaatcacctgtaatcccagctacgtggaaggctgaggcggagaatctcttgaacctgggaggcggaggtggcagtgagccaagattgcgccattgcactccagcctgggccacaaagagactctgtttcaaaaaaaaaaaaggaaacagatgatctgctgtggttatagagtaaacattagtaacatatttatgtaatagaatttagggatgtaatggcttcatttctgaactaaatttattgaaatttcatggttttttttggtaatttattcaaattttttttttttttttttttttttttttggagatggagtcttactctgtcgccyaggctggagtgcaatagcatgatcttggctcactgcaacctctgcctcccaggttcaagtgattctcctgcctcagcctctcaagtcgctgggatttcaggcatgtaccaccacacccagctaatttttgtatttttagtagagattgctttttctattgactataaaacagaaagaggctagtatcaatttagagcactgaatacatttccaccatgattttttgtttgtatataaaagaattctgcaaatgaccaatatagttcctattttaactgattataagataaaaggaggccaggctcaataccattatacccagagcacagtcacgcagtgatttatttctgtgtaagagattggtcatgtaaatgagatsctcattcactacaggactgatacaagcatcttctctctgaaggtttgccttgcaaatggaacttactgctggcctcctttatttaggcaaatgtacatatcctcttgagttcctccaaagaacaggtacattattatacgaactagtaagtgttgctacgtgtccgagtctagaatcaaagaatgatcatctgtacagggcaaatgctcactttgggaagaccgttatttcatctatttgtgtctggttgcctctacatgtcagaaagtatccctgaatgacttacctctttgcataattcagaactctcagaaatgttatttttctttgaaaggaagccttgacatttctgtgcccatgtggacttacaaaacatctctgaggattgccatcrataagcatagacttgaagaaaaaaaaaaagctaagattcttatagcttataagatgctgaagatatatagtctgtggattcatttaataggctctcatctcatagatgtttccattgtgattacactcacattccaaggcaagcaatgtgtgagagggtgaaactctgcagcaatccaatctccaaactcttaacataggatgcatcttattagggtacaggaaacctgataaatgacagagaagagatgccatactgaaactgtgttactgttcactgaagtcctagtttcagatattctgttgtctccattattggactaagattccrtcatccaattgacctgatgttatctgagattttgcttaatacagtcatcatcctttagggaagaatttaagaaatgagaggttgtgtctatacacccaaaagctctgaacccaaagatgattcactgaaattccatctttayttttttccctttttactaagtcattgtaacaagcctgagatgactgtcaaggaacaataagattgtatatgagaaacttctttgaagcttatataccaaactcacttatgatgaatacrtatgggagtatgtgtgctccttcattttctatttatatatgggcttgggtcatagctttaattaataagttaccattagtaaatatttaytccagcattgatcttccttagatataagttaaatggcagatgaagttaaatgtgtgggatgtgatcctttatgttataatagtttatgttaaagtataactttagtgatgcccataagacacagaaaacacaattaaatgggaatgggagagtctggcctaatatgttgtgttaactttttttttcaaatattaggtttaatattgataaaaataaaattatcataaacaatttagcagcagaagttaaattaactgaaattcacattggacaagtgaagattgccatagtagcctttgtaargcacagaaggatgggctgaaagatctttctttggccatgtgctaaatcagaggatgcacagactcatttgaatggaggcagaacatcaagtatttactgaattgttgggcaagcccatgatttataaagttggtgtcartatagtgttctagtatcaattgtttttggatttttaaaaaatgttttagcctttkgtacatatatgtcttcacacagagaagcatacattcatttggggaatgcatttcctgggaaaaattataatttttgtgggtgtacttgtgtaaactgcattggattgaagattttattctgtcattgaattttattttgcatggaatgtttcttgtcttattatttgttctggatactttgcattcagaggtgtcactcagataagatttaatatgtagactaattatggcacagaactctgctttttaaattaatagaatattctgacattagagggagaaatgaggaatgcgagaacccactgatgtttgtgttttgagtacatcacaaactcaatttcaaatatgtgggcttttgaaagctcagtgcaggttttgccaaggatattttctgctcatttttataggcttacatatttcaaagggaattgggtctgtgtgtttgcattccatctatgcgtaattcatyaaaaacattgytcagaaaacagaggaaataaacacaaacatttgtttaagatagttctagtgttatttaaaccttggacactaagaacttcagaacctgctaaagtrgttaattaacatctgcttcctcagtttacctgttttgtaycttggagtcaattcttctcattttgagraacattgagatacatgctgttcttgtaggagcctaaaactttttatatgtttttttcattccaagggagttttatgatgccatcctacacatgtgcttattgctatatataaatgagaagtcaaaacttcaagaatgtcatacactagatgaaatcacttaagagttcaactagactttcaaatacactgttataatgaagtacagtagatatgaatcactctaaagtcagactctctgggaaggacaagtcatttaagctctccagtctttatttttctgatctatatgaagtgtagatagtaatmatgcctatattttatatgtttgttttgagtgttatatgaaattttacctacaaaggactgacacataagcaaattttaacatgttattagtttaatttgatgaataattcacaaagaaaatataaacattttatttgtaatgcgcagtaaattcatcccacgatttattctgttttaaaacattgcaaaaggggacagatttaccccatgccaaattgcctattccacacttgaactaactgagaacagaatatatttgtgggaactcctttgagttaagtctaaacagttatcttaagaaaatactatattctattctaatggagtttacttttttaatgcactgaatgtatctgtatgtgaaattttatttgggggagcaattttgcaggagtacttaccattcaaaatctgtttaacaaggggcatgaagtaatttcagatttctcctaagaattcatgagtcgcttgaatgtaaaatagagggcaagaggatcaggaagcactctgaagagaaaatacattctaagacccacttaaatagttatatttttgcctctgtaattgataagcagaatgaagattttgaatttatatgatctgtcattttgtagtacactgaaatccagttgtgtggctttagccttgcagattaaatacatactaatctttttgtgtttgtatttattttaaaggtcggtttctgtttgtttgtttgtttgtttgttttagacggtgtctcgctttgttgccaggttggrgtgcagtggtgtgaactcagctcactgcagtctccacctcttggattcaagcgattctcctgcctcagccccgctagtagctgggattacagctgcgtgccaacacacccagctaatttttgtatttttaatagagttggagtgttaccatgttggccaggatggttttgaactcctgacctcatgatccgtctgcctcggcctcccaaagtgctgagattacaggcatgagccacggcgcccagccaagcttggtttcttatataccaatctttaatattgtttatgtcatataatattgtatatagctggtgagttcatttctatcctttgccttcaactcaatggcattgttttgagggggaaataatgtatctgatttaaccaattatacattggttattcagccctgttcactgatataaacaattggaaatttttaaagatttccctgaagagggcatataagctttaaaatagacttaatcagttatgataaaggggggaaattcttctaatgattcatttcagtttattaaaaccatactattgaaacttaaatatcaaggggtattactttttgaaaatggcaataaattcactaattactttggagtcttggactgattagaaaacatacctatagattttgcattacgaatttgaaaaatataatacatttgttgataatcttttagggtttcctgcttgacttggtaaatttttaattcttgcctctggtggaggaatgtagtggaccatctcttattcaaaatgattggcagttttcttttagtattttgtttgtttttaatagaagagattgatgagagaactataaaaatatcagtctgtttctttaaataaatgagttttacttataaagagtgtttaacctataaatagttttgtttttgttttgttttgttttttttgagacagagtcttgctctgtagcccaggctggagtgcagtggcgcgatcttggctcactgcaacctctgcctcctgggtctcagttcaagcaattctcctgcctcagcctcctgacctataaatagttttacatatagtgtttttatagatacttcctgaaaaataaatttaaaaataactaaatgtaaaggactgacaacagttcgcgtatcacattggcccctccttaagtttctgtgcgcattgatgatatgtatctgttggttacgaagtcatctctctctgccgcattctcaattactatccattcaccacaaggctcaactactatccattctccacaaggcaaccaagtccatttttttctttttttttttagcaactaaatgggataaatgcagtgataagcaggtaaactgactctctataaatacaaagctctgattgtcactttggagtttccctgcaaaacctgccagccctgttttttttaagggaccaacataataacactgaaggcggcgttgggaagaggtgttccctgtccattcttaggaggcagcctgagtgggcccagcacacacaactggaatttgcttccttatctgagcacattgttcttccacccttagatttgttctgcccttttaaatcagaagaaatttttgtacataacactttctcagatacttgacgataatccatatgcccttcagttatttctcttcctattttagcagccatatgttttacctactttggacgaactccatttggtcttttctaaagagagaggactgtactagattctcaaagtggcctgatctatgctggagttactacatgccccttggtataatctgcctattaatgtggcctgtaatttatttttaggatcaatgatatgacttagagagccatacagtccatttaaaccccaactctgtttttacaagatatatatatatatatgtaagccagtttccccattctgtatttatacaactgattgttttaaaatctgttcactcaacrgtcttttattgggcacccattatgtatcataaggtatgagccctgctcccaacaatctttcaggtcacagtgtacaaatatgtccacaagtcatagtgcatggattaggaggtgggccacatgggttggaatgtagcttatgccattttgacctttggtgcattagttaatgtctctgtgcctcagttcctctcctaaaatgagaaaaattgtgttatctacctcatggggttgctacaagggttaaatgagtcaccaaacagaaatacttacaagagtgccttgtacgttgtaacaccccatgatgtcagttgctggcattgtgattttaacatcatcatcatcatcrtcgtcgtcgtcgtcgtcatcgtcatcatcatcaaagtgctgcatccaggaggcactgtctgctcccctaggctgagtcagtaaggcctctaagctgaggagaatcataagctgggaattaagtgatgaacagaagatttctgattttaaaaggaaggaatattttatgcagatattataaaataaaagatgcaaaggtctggcactactttagaattacaattatttgctgtgactaaacaaatggcaaaagtgagaatgaggaaggtgataccgggaagaggatgagccgggtcaaaygcagaggggctttgcacataatcttcgggaatttagatgcttccttggattctgttaataaatacttgccaagtgtctcctccacagcaagcactcctggttcctaggcctggagagcagtggtaagcaggaccggtgcgtccccacttttgtggagctttctatttgagtgcagactttaagaaaacataagagttctagagatgaatatgatcagtttgtgtcgtgggtgtgacagggtggcaggcgaaatggggcaggtggcgggccacttaggagactgtagcgtgagactaagccctggactaaggcagggccaataaagaaggccatgaaggccagggcttcatgagaagagaaatccgggtagaatctccagggccaatgaatggaggctgtggtgcaggactcccaggatgcaggaatgatgctgaggttgaggactcttgagttcctctttcactgctctagctgatcaagctgttaacacagcacctgtcattcttccggtgatgggtaagacagacaaggtcccttttcttgtggagcctgcattccatgtgcaagaaggttattaatgcttttagtcagagtgccatgaagataaaagccacrtgctaaaaggacagggcagaaggatagaagaaacttgggttgctgagggcatcagggagcccccagccagttctagatggcttttgtttagacttcttgtaacatgcgaaaaataaaccccaattggttatacttctgtagtcagtattccggtacatgcaaccaaatacaatcttcaggtttaaagcaagtaaagcaataaaaatggtaaatttcagttagtgataagtgcttggaaagaattaaaataggctgaggactggtgacactaccttatattggaaatttaggaaaagcttctcttggaaggtgaagtttgagctgaaagctaaaggagccagccctgggaatacctgcagaaaatcattccagagagagggagcgaaggacctagagtgggcattaggtaagcacatgccaaggccataagggaggtaagtgtggctggaagttggtggaagcaaggaggctaattgggaggctagtctaggtgtttgggggacggagcatggggcttcgctagggtactagacgttgtaatggagggacacatgtagctttgtgatgttttagaggttgtgtcaatgggactagcagatgtacgcattgtgagatgcaagggaaagagaaaattgaagtatgacacattgatacttggctatgtgagatatagaactcatgttagatgttgatgccaccaggcacagaggagagtggaagaaaaagaggaatgggttattgtgggaggggcagttcaaataaactttatttgagaggtttaaggtttcaaataaattttaggtggcgatctccagtaggaagtttgtttatctgtctgttgttgaggttagaacagaacagaaatataaatttgagcctcagtgtttgatacctagtgctaccaaataatatatagtaagacattcttcagataaagcttatttgagaatctatacatacattctcagtcaagatgaggttagatgtagaatctaaatcgagaactataatagaaatacatggaaattacattagtgactttgaatttgattagcatgcttgttcttttgcaagtctgacattagcaatcttgacttcctgtgcaagtcagatttccattacaagtcaaagatgaatgaattatatataaaccattgtataaactttgtagggagatacatatttgtaattgttattgcaaaaccccagggatggaaaasaatatgggaattatatgacaaatactagtgggcccaccattcaacttaagaaaaatattacaactaaaactgaagcgatggatgtactgctctctgattgtgttccatttcttccttctctacagaggtaactattatcctgaayttgggatttgtcattatcaactatgtttttatactttaaaaaatacatttattaccccgtctcaactaaaaaaaatgcaaaacattagctgggcgtggtctggggcgcctgtagtcccagctacccgggaggctgaggcaggagaatggtgtgaacccgcgaagtggagcttgcagtgagccgagattgcgccactgcagtccagcctgggcgacagagcgagactccatcaaaaaaaaaaaaaaaaaaaaacatttatttaccagcctataagtaatatggaatactgctaatttgcatgcttttaaactttaaataaatgatatgatgttacctattgtatgcaactgaacatatttgttcaatcatattttgagattaatgcgtgttagtggatatagcagtaggtcacctgtgttcactaatgaatagcataccatgtgtgacatcacaatggatttattctcatgctattgggaatttaaggtgtttctaatttttttgcttcacaaatagtgctgcactgaacattcttatacaagtcttgtgcacaggtataagactttctctagaccaattcctgggtgtggtatttgtgcaccaataacttcagctttactattaatagatactaaataattgctctgctaggtgatcataacaatttaactcccaattattcacatcctcgccaacgtttaatattttcagacttttaaattttgagcctgactggtgtaaacttttctgtcattgtagatttaacttgcatttctctaattacttctcaattaagcatcttttcacatttactattcatttgcattttgtcttctgagcatttagtatactttggccaaactttctcatgggcctgtgatggttttaaaatgtgaattattttaatgcacaatgtatattagtattttggggctaacgtaggaaacaaataacctgtcaacctctggtttgtctccttaactttgatgctgttattggatgtataagatttcccacattaatgtggaaaacttactycatctttgtttatgatttgtatcttctgtgtctaatgtgaaagttttcatatgttgtggccttgaatatttttaaagaatatttttgtatacattttaaagttttggtttttggctgggtatggtggctcatgcctgtaatcccagcactttgggaggcccaggtgggcggatcccttgagctcaggagtttaacaccagcctgggcaacatggtgaaacccgtctctacaaaaaaatatgaaaattagccaggcaagctggtgcacctgtagtcccagccacttggggatgaggtgggaggatggcttgagcccaggaggcagaggttgtagtgagccgagattgtgccactgcattacagcgtgggtgacagagccagaccttgtctcagaaaaaagaaaattagtttttaaatataggtctttaacaactggactttatctttgtgtacatgtgctgtccacgcaagatccagttttattttattttcttcacagggatcacctgttgtgtattcccatgattgaacagtcatgcctcataaggacacctttgacatatatatagtttctatgtatacctggatctattttgaaccgtctactctgttctgtttgtctatttgtctttccctgcaccaatactacgttgttatattactatagttttattataatttgcggtatctgacaaggcatttcacatcacccaccttgttgttctttaggaataacttgtcttattttctgaattacaggaaagataattctatattgagattattcttttgcagtcctttgaagacatagcgtatagcttttatctttgctactggtaagtatgctatgagtctacttgcrgtatttttggaggtaatctgtttctctcttgcagctttagaaatcatttcaaatctttgtggttagtcgctatcacatccatgcgttcagctttggctttctttccgtattcactgtgattcctgtatgagaacattcgtatcggttctagaaaaatatacaccagtgtcatcaaatattgcttctcttccttttgcattttcctctaattctagaatataagttcattatatgttggactttttattcctttttcagtacctctcacttcctctctaagttcttcatcactttatctctttgtgctgcattccaggtaatttaatcatacctttcttttgcccttagttgtatattcatagttgtaccatttttgggccattttgcattcccagtggcattcaaagaatggatatttcattgatgggttttctatgtgattctttttccaatgtcactgccttttctgatggaatcctgctcttgttttatatttcaatgttcttccattaagtctttaatcatttgaaaaatagtaatttaatgatatctgtacaaaattctgtgtctgtggttcttaggtaactaatcctgatggtgactgggtgtattgcttctctcccttggaagattatattttcacaaggtttctgtgttagaatgtgagttcttgggctttgtggggctgcttcgtggcaggctggcagtgtgtctcttcaccatagttttaagcttgtctctggcatgcagtgtgtaactacttttttatgtttatttttcagcgttgtgaaaaatggactatataaatagtataaggttaaaccttttgtcgaaggaagagcagatctctgattacaaaccatcaaatgtaaggtctagtatcaggtcaataagttttcttctacctgttctgatgggtagattttttttttttctagtcaatcctttaacgaaagtcattggttttctaggactccattctacataaggattttagttctaattctccaccttacatgaggctaagacacccatctcctatgtggctgtgaaccatgaaccttgaaagcagcaatttgatttttaattaatgaaacttgttttttagagcagcagttctgggttcacagcaaaattgtgtggaaattgtggaaaattctcaacctcattcccttacttacacacaacctccccactatcaacattcccacccccatccgccagtggtacatttcttttcttttcttttttttttttttctttgagacagagtcttgctctgtcacccaggctgggatacagtggcgtgatctcggctcactgcaacctccacctcccgggttcaagcaattctctgcctcagcctcctgagtaactgggattacaggcccccatgaccacacccggctaatttttttgtatttttagtagagacgggatttcaccatcttggccaggctggtcttgaactcctgacttagtgatccacctgcctcggcctcccaaagtgctgggattacaagcgtgagccaccacgcccggcacacccccagtggtacgtttcttacaactggtcattgacacatcattgtcactcagagccagtcctctacattagggttcactcttggtgttgtacattctagggcctggacaaatgtttagtgacatggatccaacactgtaggattgtgcagtcttttcactgctttagagattttctgtgctctacctcatcacccatttcttccctctaccctgagcaaccgctgatctgtttaccctttttatagctgtgccttttccaggatgtcctatagatagaatcataaagtcgcctcttcatatcgccttctttcacttgataatcttcatttaagtttcttttgtacctttcatggcttggtcacatatatctttttttgcattgaatggcgtttccttgtctgaatggaatgtaccacagtttatttatctgttcaccctatgaggacacgctggttgcttccaaactttggcaattatgaacaaagctactataaacatctgtgtgtargtttttgtgtggaaataaatgttcagttcaattcatcacttttagaatggcataagcatcacccttgtcattaggcattcatctaaacactcagggtggttatttttatccagtgggtaggcactggataaatatttgttgaataaatgaatagacattatttagtataattaatggtctcttctataaggtaccatgtagcagtggctgaattgatttaacgtcttgaagtcttcatcaatttctgatgacgaccagttcctagaattagaaattcacctctaagtggtaagagaatagaggaaaccagtgggttgtaactgcaaagataccacagatactgacatttgcatcacactcagcagattatatactcaaatgaggtttctcctactccctgtcattgtgtgtgataaggcaatcatgaataaaatctcacacaatgaagctgaagattgtccctgagttatatagcacctaaactttgtctagatgtcttacaaaggawataaaaaatgaaagaggaaaagggaaggaaggagggaaggtggaagggagggaggaaggccaactgtatttctaggattggggaatttcctagtataatttccatcttagatctgccattttcatcatggccagagttagtcactctgtcatctccttgttgttcattacctcaacacttagttctagttactgatgtgtacatatataaagccagacatctgtaagtgcttagttgagaaggtgtagatggaatccaagagtatctaggaatgtaaccccaggatggttagggtaatgtctttattcagttacatttttatatgtaagggaaatgattgtctattccaattcagatttctttgtaatattaatatgtactatagaagcaatgaaaggcaaagaatccagaaagcgactagaagaataatcatttttactttccttcttatgatgctttttttttttttttttttttttggtctcttggagatggagtcttgctctgtcgcccaggctggagcgcagtggcgcgatctcggctcactgcaacctctgcctcccgggttcaagaaattttcttgcctcagcctcccaagtagctgggactactggtgcacgccatcatgtccagctaatttttttgtattttagtagagacagggtttcaccatgttgcctgggctggtctcgaactcctgagctcaggcaatccgcccgcctcagcctcccagagtgctakkattacaggcgtgagccactgcacccagcctccttcttatgactcttaatgtcctataagccatttttaaaagtagcagatacctgagccctctcaattatccccagttcttactcgtaaagaactctctgacccaaagtcattttttaaaagtaccactaatattgggatgtgcagtcaaacctgctgtattctggaccttccctgccctgtgagagctctacatgcaagacccaagtaaggctgtcagctcatgtgcagtggcataaaaactaccatgtgatactgtttcatgctgtggccaatgcatttctatcaatgatgcatcactggcttgacagcaatgttactgttgtatactaggggcaggtaaatttttctagcagaaatggtatttggaccagaagtttttrtatgaagaatttgattaaagaaatattattaagtagcccttctttctaaatatactttcatgctaaaacaaaataactcagaaaatatgaaaacagaactctagaactctttgaagttagcaagtaaagcatacatacatggtgtcttagtaactgtttccattatgcagattctaagaatctttcctggacaagactaaagaattcccagtggcaaaccatgatctgctgctcagctcaaattgtgggtcccagagcagccatatgtgatagttacttgtaattaaggacytcatctaaacttgaagataagctttccttgctgaaattagatattacttcctatttaacttatttagataaattatttttattttataaatagaatacrtactttaatagtttagtagaatatctcttaattttgtagctccttcagtcaatacctttgcattcctattttatattgcattatattaatagttactggtcaacattatgtaatgatgttcctgagtcctttagtgtctttgccttacttacttgattstccttgtttgcagtagactgtygctgttttcctgtaatgygttgttcttctcctgtttatttatactatctagcaaggccatggaggaatttggtagacatttgttaatgagtagctagccatcctgagttaatagacaatgatatgaattgatggactcattgagaaggtgccatattgtatcatttctgattacaaataaaccaaaaaattgaactaagagtacataataggttaacatttcatgtagctaaattaagagaggccaaaatatcaaagggaaakttgaaagtcacaaggaaccaccctgggtcttagctccatcaactgtgtctcatgggatggcaggtaaattagttawtgttcttaacagcctagattctttacttgagaagacagggataataaaaatcaggataacatctgatcttcagggcgctgtgagggtaaataaaataatgttaggcaagtayccagagagtgcctggcacaaaacagccacgcaggtgctgcctgttgcttccttcctgatggagggttattgataaacatcgtgcataataagatttccaagtaagcctgtttcctctcaattattaatgattacctrgagktctgttaaggagaatcagagatctctggacatgagtttgggtcataagaaagcggtggtgagctgtggctggcaagcctgtgctcacagggaggatgtgtgagttcaatgctagcttctcttggggcagacgtaaggcatttgagctcagtctttctttgagytcgactgtatcrcttgatttaggtttgctgttctggtttttaaaatttagtaatagagaagagagtacataagtagaagaccaaaactgtattgttaccagagttccaagcgctgctgacttttctggctctacaaaagaggtaagccgttaaaactgtaagtgtccccatctttttcctgcttatctcttagtgagtaataattttgcttcttacactttttatgtctctgagctacagagtcatagctacaagtccttcattcatccctgaattttaatttaatgtagtatttatgggtgttagcttttaaaaataataccatattactcctcagaacatttgccatgggctgtctgtatccgaatctcctagaawggagatgggaaggttgttataaatgcagttttaagagttccactgggcaggggctcccctgaaatctccctgactctgctggctggatgcaggcaatctgcactgttagcagctctccagggcactgttatgcatgctcagatgtgaaaccctcggatctagattttccaacttgcactcattccaagatggcagyaggacaaccttttaactaatagaagacaaaggattcaatgtgattaaatttgtgcctaaaattttgatctcaggctatggtattttaaacataatgctttacaccaggagtcccccctccccsccattgtgaaatgtacatgtgaagaatstaggttgcacrctccttatgagaatctaatgcctgatgatctgtcactgttgcccatcactcccaatgagaccatctagttgcaggaaaacaagctcacagctcccactgactctacattatggtgagctgtataattattccattatatattacaawgtacaaataatagaaataaggtgcacaataaatgtaatgcrcttgaatcatcctgaaaccatctccctgctccagtctgtggagaaactgtctcccacgaaaccagtccctgatgccaaaaaggttgggggctgctgctttccactgtaattttctaaaattttcccaaatcaggagggaggatartaagtaatcatttcatgttgtgcaaaatattccctggtccagcaactttctaaaatggttctctctctctctttctctttctctgtccctgtccctgtccctgtccctgtctctggctctgtctctatctctgtgtctgtctctctctctctgtcattataggtcatggatgtttatatgagaatatttcaaataccaaaaagcatttttcaaaaagtaaaatccccctaacctcacctcccatagatgctccatcatatatttcacttgggagcrttgtgggcactgtggagttccagggctaggactgggctgcagaaccaacttcctgggttccagcttgtgaccctgcacctgctggctcaaccttagtgtgcctcagtttcttcatctgagcaatgagaatagtaaatgtcttattcttgtacatttatttatttatacacctcatagtgtttttgtgaggactgaccacatgcatgtaaacgtcttcttaagctcaattgattttagctattattattaatcacacatcttataataaagttgaacactttgcaatataatcaaaacaaaactattttcatctctcaccagccttttgttgaggaagagcaatttttccctgtccctggatgggaaatcagaaggtcccctgacatttttattcactctttaacaaacttccttacaggtactagaagtcacagacatagtcttaaggatgtaattagaacatccaagcgaagacaataatacgaacgtcgaagttaatttgatgttggatcttcttaccaacacccctcccacccctgccgcccctgcttgcacctgctttgcctggagcctaaggaaggaatgggctttgtctctggttctttgccttgcctacctgtatgttcccttgtgcctgcttcccagtttgcgacacctccagggttggggggtgggactgggtacagggtgggtccttgtcctggtgccccacaccctcgcagatgattctagctggcttctccctcccctcctcctgagaaggggcttttgggggctgcagtggtctgctgacaggagccctccctgcagctcccctggtgcaggcaggagtgccctgggtgtgcttggattccttcatgagtgtgcaggaaccgtgcacaccatcagccactgggtccatctgccctcctaatgggtgttttccacaggttccagccatcccccccctcaacacacacgcatmcacacacacacacacacacacacacacacacacactgtctgtccctctctcttcatcactttttcgtggagcctacatctgaagctccaggaacactccaattcttgttctgcaatctctttgagtgctggcctcaactttgttgatatgcagtccacatgcyatgcacttcacccatttaagcataccattctatggtttttagtatcttgggagcgttttcactccaccaccacaatcaatttcagaacactttcatcaaccccaaaagaaaacctcatactcagtagcagtcattcccttttctcagttcctggcaaccattaatttactttctgtggatttgtctattgtggacatttcatataaatggaattacacaatatatatctttttgtgattgccttctttcacttagtacartgttttcaagtttcatctatgtcatagcatgaatctgcacttcatttttattgccaaataatattccattgtatgtatgtaccatattttatttatccactaatgagttgatggacatttgggttgtttctacttgttgagtatcgtgaatgatgctaccatgaatatttgtgtgcaggcttttgtataggcctatgtttttactgctcttgggcgtatacctagagtagaattgccgggtcatgtggtaaaatgtttagctatttacagaaccctcaggctgttttccaaatgcttgtctatatttattgtgcttcatatcagtaatcaagagttcatggagtattgaaaagtctactatgaaggtgaagaggtggaagaaatgtgatgatcacgttcacacttaggtcttggaaaacctgccacgtgracactaactcttgatttctcarcagaagacccgtaaacacgttcatgaactgagctagaaaccgaaagccataaacgttaacggacattatctgggagaagtgttgttacacagtcgggcacagggaggttccctgctatgttscatttgagagcgctttaatttcaaagggtaccatctggccctcagtgcttgaactacttgtggctttaaatgcaggkttttgctcattaaagcaggtcactcatattttgaatcagaaaatgacatttaagttactccttttctactttacatatgtctcccttcagcttctggtcatctctcactcttcctcagtcttctgcccccacagctgccagcatgtgatggtgtgagtggcctggcatgttttgcaggatgcagatcccctcaggggatgcccggctgccgggggcaggaaaggcagcgacccctagctcacagtcaacgcgtggcatcaagagtgctataaatggaaaaatacagagatggccctgtcctggctttgatttagaatttggcatgtttccttttgcacttttgaaaaaaagtcacgactttttactaggatgggtaggtagtttgtatcacaactatggccacatttgccatcattatgaaaataaaaaataaaaactccttggagtttcagtaatattgtttgcatctcttaccctgtgttgtttgattgtcttcacagcccgcatctgtttaattcaaattatgcacatgtctctctggactctaatttcctccagctgttaggatgctggagcagaagagctatagatttaaaacagctgtttagttaggagaactgctttgtgtttagtttaagactgaaccatatatttcaaacacattcttatccatttttaaataaaaaatttctttaattgattattaagttgattcattttagtatattttctgtgtacagaatttaaggatgtacatctttactcaaattttcattttagaaatagaaaaatgagataaaatgctttgtagaaatgtaaaatattgtctgtccccaatcacgtgtcagtaagtaggtaagttattaagaaaaagagcagaaagaaaataatttgagaatatagtaaatatactttttatttaactacaggaatagtctagaaaccaaaaatggtggagaaaactgattgatgatgttctgcccacaaactacacacagaaaaattcttacagcctggcagcaggtttaattgaatttatcaaaatgcttccaaataaaatatacttactcagcaacttgtaaggaatatgaaaaggagaaggaaggaaatctagtgactttgcttccatcctacctccagaaacatagttttcttcttggcacagaccgaatagacttgatcagaataattaaccatccttaccacctcttagcaaaggacagacttcttgacagctaaagctgctctgctacgattatcttgaatgtcaccaggtagaggtggggtctgggggattcaaatggtgggaaaatatggaaagcacttaaatgaggatttaaaaaatatattatttaggaaaataggacagaatgtgcaaacaaatactcaccctcgacaattttgtcattgttatggcagtggtataaatggaaaccaagggccattagcacaaatgtccacaagtgccaggccggtattttaaagcatgatactggaggtcaaatattggaaagtagtggagccactgagaactggagatggcatgcctgatttaaagacatcacaatttttaaatgattaaaattcagtgcactaaacaacagaattcagcgttttgcagtctttcaaatggagagatgcctattaacgagtgttgctgagtattacctatgaagatctcccattagtcagaatagtctgaataatatattctaaaaatacatttctttatttaaatttgaggttgtcttaactttttttgagacagtctcactctgtcaccaggctggagtgcagtggcgcaatttgggctcactgcatcctctgcctcccgggttcaagcgattcccttgcctcagcctcccaagtagctgggactacagatgggtgtcaccaggtccagctaatttttgtatttttagtacagacgggtttcatcatgttggccaggatggtcatgatctgttgaccttgtgacctacccgcttcaccctcccaaagtgctgggattacaggtgtgagccatgagcctggccttcttaacttcttaattacctcttaatcacatatcactaagtgttgaacagctactcttaaagtaggaagctttcaccataaagatatttagatacatgagtgatactcttcacaygatctgtttctaccttttgaagatttggcaatttcagctgcctttattgaattcattatctgccctgtgatacttgattgcctccacacaattgctgcatttcggtgccacattgtgtcttctgtttgaacacatttaaacaaagtggtgtgacactcrtgttaaaatttaaatagtttctagtgttaccagtccaaataactttccccagttggctatttttgcgtaggcacaaccaattgtagctacgctaagtctattacgcagggttgccggcaaggtgaacctggaattgatggttctgccgcatcttcgatttcagaaacattcagaagtgaaggaagtagaatcctattgtttttgaagaggtgttgtttactagcattttgccatctctcagaaatcagtgaaaattttaactgttccttagcatcagatatcttaattttcttaaataaaagaacagaaattttactggtctgtaaaatcataagtttgggaacaagttataaaaatatacagtgcctccagtgatagaaaatccgttcctttgtaaggcagcctaattaatagatggacatcaatgataatcagttttaagaatgctcactatatatatgtcatctttacactttccattctgattattttattctatccatagatagcattattttaaaacttcaaagattcactttttttttttttttttgagacggagtcttgctcagttgaccaggctggagtgcagtggtgcgatcttggttcactgcaacctccgcctcctgggcttatgccattctcctgcttcagcctcccgagtagctgggactacaggcaccaccaaccatgcgcggctaattttttttttgtattttagtagagataggggtttcaccatgttagccaggatggtcttgatctcctgacctcgtgatccagccgccttggcctcccaaagtgctgggattacaggtgtgagccaccacgcccggcagattcactactttctaatcttcatggtcatcataacacctgtagacaatgatgccttgtcctaacagccgttcaaacctgcttgtccttacctaacacagagattagcttaagataaaagcaagagtaatctggaatcagtcatcacccttttaaagttttgtttgtattatggagcagtaagttctgtgcatttcctaaagccaacagctctgtatctgaaatcttttttgttgttattgttgagacagagtctcaccctgtggcccaggctggagtgcagtggcatgattycagctcactgcagtctccacctcccaggttcgggcaattctcctgcttcagcctcccgagtagctggcattataggtgcctgccactacacctggctgattttttgtatttttagtagagacaggatttccccatgttggccaggctggtcttgaattcttgacctcaagtgatccacctgcctcagcctcccaaagtgctgggactacaggcgtgagccaccgcgcccagcctgtatctgcaatcttgagtttgacattgcccttagggcccagcatagcagcctgcctgtgtctgtgctttctccctaacccccagcttgaagctccaagtgccgattctggactagatgaaactattaaaataggtgatgtctatggtctactccttaaggcaaaaaacatgaaagaataacatgactggaaatgttgaaacttttaatttaattcctaaattgaataaaatccagtgaaaatagcggcaatgttagaagacaatagaatggtgatttgcacaatagttttttgaatgaaatggaaaaaaaggaaatgagtagagatccaaaagtgaaaatacagataatgtttggccctaaaccaacttttgttgccttttgttcttgtttcattttgtcagtaataccttgctatctaattagttactatctgaggcagcttattaacttttttctattttcttcctttctatatttcacaaatgtttcaagaatctcatttgtctctttccccctgcatagctacacaacgcaaatatgtagaccgctccctcataactcatgcttgtagctccataaatcatttactcttgcaagctgtgtgtcgtggtctgaagctgatggggcttcttcatttgttctgactccaggatattaaggactgagaaaaacaacaataaaaaaaacagactgtacagagagtttttagtcttttaaagccaattatataggcatgaaatgttgaaatatttgatatgggcttcagaccagactggtcttacctattactgcacagaagaagcccccaattttcatatttaagaaatttttgcttaagaaatgaaacattccagaaattattttcatgttttcatggtatcaggtttatcacacaaacatatcacaatacattgccagagataaattcattaaactgtgtttaagagaccactagtctcttattgttttgaaagtttaaaaaaatgttttaatgcaaaacaagttggctctttttttcagtcctgtaatgtcggcacctttgtatatcccatctatacaaaagtaatccaaatatggatacttgtatttcttatacaaaacataatttacccagttataagcttacagttctcaagctcaatttttttcttgttggtgataaacaaaagataagcagtaaaatttaacttgcagttgagctttgaagaagagctctctgtcaagtatcaggttttagaaagcacagttgtatttaatgtgtcattgtacatatttgtagtgttgggaagggaaattcttttaatttaaaacattcaaaaccaagaagatggaactttttcttatgattgctggaattccatggaaaataggataatataagttagttaagtagcccttaccccgtgttgttcttctgcttgtttgaatgtatactggattgctatgaagaacagattttcatcgcatagggaggcggtggcttaggtgtccacagtgagtcccgtagtccccacttcctgtgggtgacatctttgttccatttgttattcatcgtaccctagaatcctcagtccagacaccttctagattgagccttgctctagatatgccatcctcacggtaggatatgacacaaactcagcaatttgctttgtgcagttcaactccagaaatttactttgagccccttggcatgtcatttatcgttccaatattatggcagtaatgtgaacaactgtaaatcatttgtagcagtgctatggtgttacttttagtaggttcatcttactattctgtttttaagtaaattaagatctcattttgcaaacaacctgctttctgtgattgttgttttccagatcagaaaaaaaaaaatgcctctcagctgtgaccaaagaaatactatggttttctttatgggaaatttctttctcaatagttggacattgtgtttaaagcaaagggagttccaggatctaaagaagtatcagggttgatagattcaaatttctaatataggaaacattttttagtgtttttaaagtaatttaaatgtggtggggtgaggtggggatgtgagcctgaggaggttagaggaaaaagacggtggcccttgaaaggtactcagtttgcttcaatggttatatttgtctccagtctcctaataattatagttaataaaagtgataagggatttttaaaaattataactatattcaaagaaaaacctgatccttaattgtaattttttctggattgtgtatttttcattgccaaatttatacaacttttcttacaggtggtatttaaatgacagtgatatttaaaatggattattaaataataatattatgtttttgcttctgtaatttatcacacacattgcacagttgacaagtgtcatctccaacagtattacagtcctccttgggggagaggagaaaacctaacatctgttacatgatgttaagcttcatttaacattccttgtttcttatactgtgctgtctaagtggtccatcttttgtctagaaagtaaatttgttagtgattcatggtcattccggtataagagctacacatgtatctcaaggtttactgttatcagaagataccttattttcctaattaacctagtcacttcttgtaaagtaggattcaaatgcttgtcttgaaatccatttttaaatgcctgacagatattttttgagttgccatttaatttttatcttttaaaacatccctgcaacgtaacctttttaaaagtaaattccaccatatttctctttaaatagattattgtaatttaaaataacatgtcgctgtaggtagatcactgtgaaaccccaaaggactatatgaatatgttcatttctctccttttcatttttgtatgagtctgtatcaataccccaagatttaaggagagacaccagaagaatcattttcaactttgctccattcaacaatgaaataagctaaagtatcatttcctttccctgtcacctccttcttccctgtcacagtcctcatcctcatgagccttaaattctgctgatttgggcagaggagaggcttccttgaatctgaacgcttttcagctcctcaggtgataacagaagccaaactccaagatagtggagcagatcactaaggaaaagcctcctggatgagagttggcaagaatgtgttttgaagtggaatcacaaaaggggcatggtttgagaagcagcctgtaaatgacagggaaaaattatcttcactttcaatcacctctgctctcctttcctcattggtatgcattgtccactcctctgaggcaggcttcctgacagtagaaaagaaaaacaaaaggaggcttttcagcaagggggacagacacagcccttgctttcagtcgagcgaaattggaaagggcattctcccccttcttccccaagggaggcaggaggagacccggctagatggagggtgtggactttccatgtgaatcgttagctgtttttcagtggcacattttttggatatgcttttaggtctgtttctggattcagctttgaaaactatccaatgggggcaaactctggtcagggyggggaactgaggatctcttccccccatgggggcaaagaatacttcctgggggccagagcagtcctcaaaccaattgatctccagctggaaaaaaaaaaagattttattctttgcaagtctctcagcaggagcagaaaaaacagcagggtggttttcattcacaggaaccaggcattcacagatctctacagagaaatgttagagaaggcctctaaaaacaaaaatgcctagattgtgcagctgatctattattttattttcattgataatgttattttgttagccatgctgagtcgatgaaagctgctgtattgaaaacttttttcactggtggaaataaaatcagcttatcttatttcttcccttttaaacagcatggttgcacatatcccgtgaaaagaaaatgtcacactgattccgctgctcccatgtgactgaactacttggtaaaaaagttggttttacttgctgtgggattgattttaaattcgtctttgaattatcttctctgagagctgtttctagttagtgtgttgagaatcccacttgaggtattaatttcatcctacatgatgtagtttaaacaaaccaaatattttgtgcttgggcttgaaagaggtaaatattaaatttataactagtaatacaactttaaattatatgcttgataaaatactgaatacgttagtgttattaaaaggatatgttcaatctcatgattctatttgctaatattctatcatgtttgatctacaaaattggcaatttcatgtggttcaacccatattgataatcatgcaaaagtgcatggggtgagggtggggtgtgctacagaaaagggagaggggtctgggcgtggtggtgcacacctgtaatgccagcatttggggaggccaaggctggatgatcactttaagccagaagcttgagaccagcctgggcaacatagtgagaccccctctcaaaaaaaaatatggcaggcatggtagagcacacctgtagttccaactactcaggaggttgaggcaggaggatcgcagaagcccaggagtttgaggctgtcatgagttatgattgtgccactgcactccagcctgggcaatagagtgagacactgtctataaaaaaaaaatacaaaagaaaagaaaagggagggagttactattcccagaagaaaggaagaatggaaggtacaccacaaaagcagatgcacattaccccatctatgcaaatcgttcctttatttgtgaaagaaacccagggagcctgtgtgtggttggagacaacagtgtcagagagacagggggagtgggagaggcagggatggaagacaaggatcggggaggggaggagaaggcagagggaaagctgggaggggaggggaaagtgaggtgaagaagaggggaaggaagaggcagaggattcattataatcatttacgaagaatgaagaatgagaatcaactagaataaaaatgagagatgcttagagtaagaatatgtgattgtgtccatggtgaagatgagacatgagcttcaggagcttccagattgtttagatgatgctaaaatgtaaatagtaatctatgggatctttaccaaaaaagaaactttccacccctaagcatgtttgccaaagtgcctaggactttatagtcaactctgtatgtgtaaattgcttccacaagamcttatttctcactatctctttagtgtaagttagtggtacgtttgcaaattatggatagaatatagtggtttaaaggccttgaatgacctagcaatttgaaaacaacctattctgctttagagatgtaccctaaacctggctttcaagaatacataccacttgtaataattcctctcaaaatcatattgagggcattttgtgagtgcttctttgaattaacctgtattttcaaaatgttcttggtacaactttgacagacattcttctggaagtcttattttcacctaagcagtcacttaagcttttgttttgttttttttttctgaatatagttgggaaattttagrggagacttgcatattacctttttctgataattgctgcaactttatgtaagtaccccgactagtagcagatatgtttctaatgggatattatatttattttcataagatccatgtgactactaatgagggaatcagcaggatgacaaaactggttcaaaagaagatatgagagtaggaattttatatagtcagatgaaaaagaaatgctgaaataaaattgaaaagatgtagatatcatagtggctaatttattatcctactggataataaaactttttaacttgataaaaatattagtcatctgattttatcactttttttttttaaattaggaacccaaactttaaaatgtgtaaaatacctgggcccaaatgaatagaaaatgtagtaagtttaaccaagttacatttctctagagagttcaaggagatttagtgagctttgctctagcaagacattaacacatcagtcgtttttttccttatttcacattttgagtaatttttcttaataataatgccatctatttggggaagtaaaattgtgaaagtattttataccctgtaactgtgtcagtcattagcccttcattcacattttaattatgactagcaggtgataagaattgagatctgattctttgttatgtaataattttaagacaattacatggaagacagttgtgattgactgtcttaagcattgaagttgacgcatgaaatcagatggtgagtttggggcctactggttgtttgattttaatgggtagtgatcttcagttgacacatctgctacaatgaacttgacatttgcaatgataacatatcagcacacttaattactatattacatttgttttcacgatgtgggaggccaaccaaagctactgttttatgaataaagcctctttgtacaacgttatgaaaggctaaactgaaaataacttggagtacatcaggagcaacagaggtctgctggtgaacagtttccctggacaatgttaccccctggcattatttagctgaagcttcagttacctcttaacagctctacttcaatcaggtcaacatctagcacctttgtattagataaaagtattttaagtgartgagggcaagagcagtgagggaatagagtagtcccaaagtctaggttgctttggaagtgggcaagggaaagtctgcctgggaatataaatgggggtatttccaaccctcgtttagatcacatgatctagtaactgtccgcacaaaattatcaaagcttagagtatcctggaaaatctacaattttggtcaacattattatggctcttaaacctggcagaaagttggaatcattattaaactttcaagaatagcttcctagagccataccagatctactaaataaaaatactggggtggggagggaggcaggagagtgaggatgttatctgtattctgaaaagcttcccatcaggaagtggtggcagccatgcacccgtgtggaagaggggaggagaagctggcgggtggtgtagacactgactttgctacctacctcaacttttcatggtggatagtgcgctcctatctcttctcttcaaggagggttcccagggccttggtaatgattagactcttgacctcagtctgtgtttattcactggagtgactctcacaccacatggtatagtcacagtgctggtaaagacacaacgaggtcaataattaagaaattgtgtttcatagaatatttgctacacagatacattgaaacagagaggtcaaatgtagctaggaaatgctgcatagagagtctatatctaagtactgcattctttataatatttgatgaagatgttgaatggtgtgtttttctggaataaagttcacattgaactcttgactagagaaggtaagagtactgttcatgcagtatgcacagtggttctaaggattctagagttggactctttggacttgaactctagttccaactcttgcagccatctgacttcagcaaaggtcaaaatttacctctctgttttagtgtccacatctgtccatttggaataacaatggcaacgatcttacatggttgcagtgaaggttgagtaagtgaatgcatgaaaagtgttgagtttggtgcctggcacataaaaagcccttgctaaatggtagctgtcattaatcaaagtgaattggataaaaatcatacctagggaaaaatgatgctccttgtgtaaagctggttctaaatccctgtcttgatgttcagcccagcaggagggtccattccattgcttgcttgttgttgccatctttttatttgttgctttgtagttgtatatttacattcaggtgagttagtttgctagggccgccataccacagactgcgtggtttatatgttctcccaggtctggagtctagaactctgagatcactcggggtttactctgagtgcacagtgccagcaggtggtttttcctgaggcctgtctccttggcttgcggatggcacattctcactacacccccgcgtagcgtttcttctgggctcctgcaacgccagtatctctcctgtcctaatcttgccttcctataaggacaccattcagattagattcgggtccaccctaatgggttcattttaacttgatcacctctttaaaggccgtgtcccccaaaacattctgaggtatctgagtttagagctttagcatgtaaatgttgggggtgacacggttcacttcatagcacctggcatctgcattcccatcaccacacaccgtggactagatgatgagttccttggaggcagaatgtatcttattcttctctcgaagtcttgtccataagagaccctcaaaggagtatttactgtgcattgaattcatacagatgtccaagcatgtgtgagggcgacttagagaaacccctgcaggtgattttgatgcttggtctctgtgactggacataggcatgttttcgggaagttgtttctcttttgtaagatctgccattacagaaatagtctattccatgttctcactagagatttaggatgtttagaaaaataatactgaaagtctgcgttggaagacgtccaagtgtcagaacaggctgcctcactccttttttgagttgtctcttaaaggcttcaggagctctgcaggacacatggaggggctgacctctgagcggggcatattgtgaaacattcatggtgttttgtttttatgacatttttgctcatccaatcccaagcaaacacttcttgcattaataatataggcctagtgcttggtttcatttctattttgtgtatatagagatctatgaaggaaggcaagcgttggattctatgctgctaaaagtatttccttacttggtgtrtggctctatgttcactttttaaaaaatcagaagtggccggtcgcagtagctcacgcctgtaatcccagcactttgggaggccgaggcgggcagatcacctgaggtcaggagttcgagaccagcctgcccaacatggcaaaaccccgtctctactcaaaatacaaaattagctgggtgtggtggtgcacgcctgtagtccgagctactcgggaggctgaggtaggagaatcgcttgaacctgggaggtggaggttgcagtgagccaagattgtaccactgcactctagcctgggcaacaagagtgaaacaaacaaaccaaaaacccataagtgttggtttcaagcctttgccaaatttcaaaatatgagtgtactatttggaatcctaaaggacatgctcacaggtatttggcaaatttctagacccaatatccttttggaggaagcactgagctctttgctaatgaggaaaagaaaaaaggattttctttctttctttctttctttttttttttttctgacagagtctcactctgtcgcccaggctggagtgcaatcgtgcgatctcggctcactgcaacctccacctcctgtgtttaaatgattctcctgcctcagcctcctgagtagctgggattacaggcacatgccaccacatcggctaatttttgtatttttagtagagatgggggtttcaccaggttggtcaggctggtctcgaactcctgacctcgtgatccgcctgcctcagcctcccaaagtgctgggattacaggcatgagccactgcacccggccaaaaaggattatttctaaactgacagatgaagcagcaaattgccaaccaacctctattttatctattaggatagggaagacctactgggataccaggcaaaatcatgaagtgaatggttcggtttaatgccatgaaaaaaacaggtaagccttcaccaccaggactttatggatagaggagaaagagaagtaaaaacttgcatagctttttaatgatgataagtgagccacctggacccatttccctgaaacgttcttctgacattggccttcctcccacaaaactccatgatttccccgcccatgtaattacaacgacttgtgtcactccccactccaatcccatccaaactttgaggctgctttggaacttgatccagttctgtcctcagatggaacacttttttccccattcctgaatccaggaatacggtgatgattccagggattcagtaactatttctgacacctgtgtcaggctgtgttttaggtgtgggggttacagcttcacacaatggaaaggaatcaccggtgccctcttggagcctccttttaaagagaaaaggctgacgacagacaagataaatccatcagatatgcacagtggtatttcagatggtgatatatgctgtagataaaaataaaactcgctggggataggaagcagagagtgcagttctaaataaggcggagtggtcgacctctttgacaagaaggcatttgagtaaagacgcagcccgggtgagggagtgaggcacagggctgcatggggaagaatgagattaaaggagcagcaagcccaaagctccaagggggcaagcattcgctggcaggagaggctggaggccagagtgagtgaggagagctggaggcgagctacaagtgacgaaaggcgccagatggtgttgggccttgtgagttgaaagaatttcacgttcatggacatgctgtaaaccaatgttgagaagaagttggccagttatgttgagaacaaagcaaggcggaaaagatataaatctgggagtgagaatccagacggtgtttaaagccttgagactagatgagatcttcatgggtatctgagtccagaccatcccaacactggccagatatccctatacccttaacagaaatatatgcatgacagggccaggcagagtggctcatgcctgtaaccccagcactttgggagcccgagacttgagcctaggagtgtgaaaccagcccgggcaatacagcaggaccttgtctctaagaaagctaaaaaacaatcactcagatatgatggcattctagctactaaggaggctgaggcaggaagatcacttgaggccaagagtttgaggcttcaggcttcggtgagctgtgatcacaccactgtactccagcttgtgcaacagagaaagaccttgtcttaaaaaaaaaaaaaggaaataaaagaaatatatatatatatgacaaggaaagacacaaacccctactatttatgatttattgtatagtgctttagttaaaggaggctgagtggacacacatattttaacttttccttttttgggggtcagcctaaagtcttataccccgagacaatgaattaagctaagagccctcaagagtgagacttctgcatttgttttacmgtgagggagtaggggggcaactgtgagtgggaagtggaaagtgtgggaacggccttgtgttccgatagattccttttggagaaaagtacatatggctattaatttccttaactctccatgcctgagcatggttggcaaacgctggaataatactgcttatcggaatgacactatggtttgaaactttttttttttttttttgagacagagtctcactctgtcacccaggctggagtgcagtggtgcaatctcagctcactgcaacctctgctttctggtttcaagcgattctagtgccttagcctctcgagtagctggaattacaggtgtgtgccaccacacctgggtaatttttgttttttggtagagactgggttttgccatgtcggccaggctggtcttgaattcctggccttaggtgatcctcctgccttggcctctcaaagtgctgggattactgggatgagccacttcacccggcaacactgtggtttgaaatactcagaataatctctagaagttgcttaaagctggttaaaaagttatcgagtccaaaataactgtttgcttctgtggaaattggtctgatgagatttcctgtcttgactcaattttgataaattctattttcttataaagttgttcatttacttcaagttaataaatttacaaagaattgtgcaaagttctttccctcatatttaccattctccttattttaattttgtatattttctttctctttccttatattagtttgaagtttattgcttaaagatgatgctcaacttatgatggtttgacatgattttttgagttttcaatagtggaaaagtgataggcattcagtaggaaccgtaattgaactacccacacagccattctgcttttcactttcagtattcaataaattacatgagatatttaacactttattataaaaataggctttttcttagatgattttgcccagctgtaggctaatgtaagtgttctgaacacatttaaagtaggctacagtaagctatgatwtgccatagttaaatgtattaaatgcattttcagattatggtattttcaacttacaatgaatttatggtgatataaacctattgtaagtcaaggagtatctgcataggtttttttttttcccagtgaagaactagctttttagtttattygatgtttctgctctttttgcccattttctgattcagcaatttctatttttttcttaatattctttttttctgacttttatggttatgttgtttatatatatttaatcgtagttctgtctccatttgccacattttggcatgaaaacatactttttattccttgtttttaaaaayacttgcttttgcaactatgaatttttctctgagcatcagttcagatgcacagcgtgggttgccttgtgttgcgtttccattatcatcaatgtttttactatattctgtgattctcatttggatttcctattttattcaagaattgcttaaaataattattttaaattaataacacgttatttttgctttattaatttctaagtgtatattacattgtactcagagtatgatgtatatagtagttccctcattcaaattaattcatattttattggggcctgatatgcagtctcttcaaggaaatgactgttccataagcatttgagaaaagatgtatcctctgttttaagaaatgtacttcctctgcttcccacccatctaccttttctggttcacctcccattttaaagaaatgctgttgttttacagtcaggacaaagtgcactaaactgttttccattaccctaaaatccacaatgatttcagtcttagttctattattaagctaatgatagttcggttttttccaaaaaattttgagaacaatattcaacatgctgtattacttttcttggaacactctttccttgtgttttttactggtgtcattttagcttttttttttttttttttttttkatatttacatgttgctgtgggaaagtcagaggcaagtctgatttatttctccacataagtgaattgatctttctgcttggctgtccagaagattcttttgctccacaaaccacaaactgatcattttaataagttataatctggtgttgtctacaggtcattttccttttattacaaagtgttatttccatatgtagattcaaatcttctttgtttttttttkttgttgttgtttgtttgtttttttcttgagacaragtcttgctctgtcacccaggctggagtgcagtggcacaatctcaggtcactgcaacttccacctcccaggttcaagcaattctcctgcctcagcctcccaagtagctgggattacaggcacctgccaccatgcccagctaatttttgtattttcagtacagatggggtttcaccatggtggaccaggctggtctcaaactcctcacctaaggtgatccgcccactttggcctcccaaagtgccgcaattacaagcgtgagccactgtgcccagcctcttctttgatttcttttttttccaaatcatacaggccgtttagctcattgttcttttttctatctttttccttgtagtgctttttgcagtgagtttgtacctttgtgtcacttcacatcttatttttatttttttttcagttgttccttaagtttctctgttatgtctccagctcttgtatttctgctctgttgtcttgtttcatggacacaactgcttggttgattcattgtttggttttcatttcttactagaataggttgccagagagttctgttgagtaacaacatttttctgatgagatttcttagtctataaatagactttttcttgtagtatgtttgtatagattgtgtgcatgcatgcatacatgcatgtgtgtgtgtgtatgtgttattcaacattgaatacttgggtttcatggacatgtattgtggaggggtgtcctgtatgtggtggggcrtagagyagtagtccacctgctattctagtattgctcactttcttactctctgcctcatggatacagactgcttcttccaaccgtggccttgctgtgtgattattaattttcacctgcctcctctgttactctaaaccaaatttggtctagtggagctatccacccattggtttaccccattctgattttgacccctcagtgttcccctcactttcaggaagatgtctctccatgacaatatctctggcttccttccacagttcctacccaattgctgttgcttatgtggctttcacattcattttagagtttcaccaacaagatgaaaaaaaatggggaggggattgttccttggtgagagaaaatgctgtttttccgtcccctcttgttgatggaagtttccctaggaraatttttattgtcccatttttcatagtcccatttttcataatacttcctgataatcatgtttatgttttaagtcatgtgaagaaggtattttgctgaagtaaaaatttacatcttcmgtttctttttcttgagtctgtatggtaaattactggatcaatattaaagattgcccattagaaaatagccctcttaaatagaatatctggagaaattagtgaaaattagttgtggcaagcaggaatgtatcatttgccacatcatgtaatatacacacagattactgtagagaaaaggagatttgcatatttgtttccctgaaaataaagtgaagatcctgatgaagttaaaagatctggctggcccaggtggagtgcctcacgcctgtaatcccagcactttgggaggctgaggcgggtggatcacctgaggtcaggaattcaaaaccagcctggccaactggtgaaacccagtctttactaaaaatacaaaaattagctgggtgtggtgctgggtgcctgtaatcccagctacttgggaggctgaggcaggagaatcgcttgcacccaggaggcagaggtttcagtgagccgagattgtgccattgcactccagcctgggtgataagagcaaaactctgtctcaaaaaaaaaaaacaaaaagagaaagatctggctgaagttgtcttactctttataacagcaaatttgtgttgatattcatttttttaagaaaaacattataactacctatgataataactgtggaaaaatgaagttgatgttataaagctttattcagtaagccagatgttagttaggaaatgatactagaagccttttatatgtttttcatgtttgtattacatagcactctgggatttttaattttaaagtatttgctttatgttgcaagtgttaaatagaacttttatagtaaattgattcatagtgaatttttgtttagtttcttttccacaaatttgagaaaatctttcttttttttttttttttttgagtcagaatcctgctctgtcacccagggtggagtgcagtggtgagatcccagctcactgcaacgtccaggtactaggctcaagtggttctcaggcctcagcctcccaagtagcttggcttacaggtgggagtcaccatgcccagataatttttgtatttttactagagatggggtttcactacattggccaggctgttcttgaactcctgacctcaagtgatccacccaccttggcctcccaaagtgctaggattacaggcatgagccactgtgaccggccaaaatcttacatttctactgccgagtgtgctcttctgcctcaataaaaatgggtaaggagttccctaacactcaatgtcagcggtgacagtgcaggaaataagtagcttttctagacctccttaacgctgctggaagagctcatggattggagcgtttagcttttcatttattatagttgtccctgtaaacaaattttaaatttctgaagcaaggaccatgttatatttgcttgtcttcggcttctgcatttccatctacctccaaatatctagtacagccgtgtgcatatagaagatgtattagctaggactctttcaattacaagaagcagaaatccagccagactggcgtaagaaaaaaagagagattgttggattaaatatttgagttcctggcattaatgttggcctagacatgacttaatccaggtgctcgaagttaattcagacatctcaaatctgttgatattcccgagtttgcttctttttcttaccttcctgaacagttgctaaatgaagagagttcacagaatcatttaacaataattaagcaaattttctggaatttacttcattaagtcagctgtgtcctcttggtgacagaaaggcaccataagcttcaggcttacattctatcagttagcaagcctagtgggaagagaaggcctctttcttaatagttccagcaaaagtcataggagtgacccttattgsgctgtcctcggttgcatactatctccaacaccactatggccatgggaactaaacaggtggataggcccaccctagtcaaaccctatgcctgtgtgtatattgtgtgtgtgtgttcatgcctgtgtgtttaggggataagttagcccaccttgaacctaaatgcatcagacttgtggtttctcagaagtcagtgaagttgttcttaccaaaaaaggagaagaattctgggcaggtaaaaacacagtaaatatgattgcttcttttgtataaatgtgtgtgtgtgtgcatgtgcatatgggagggtgattaatttatatcgatcttacactggcctttatcagcacagaaaattatgtttctgtaacaaatgtgccaatagttccagtggctttacacaacaacaaaaaatgttttctaacacaagcgacgggtccagagtgggtctgctcgatgtgggacctcgggctccaggctgactgagtgacaacagtgaacgcgacagacaaggtccttgtcacgaggctccaccatgacaagttgccacagtcacaaaggcagggaagagttggcgtcttatgctctggctgggaagtgatacccatcgttccaccttgttagccagaactagtgacacgtcccacctaaaaacaaagggactagctggctcgatattctatgtggtggggcagcaaggagggctggacaacactaatgctgactgcactcctgttcaaacacgaggaacacatcctcaactactccgaatcctaaaatgacaatccacttctcatttcagagaaatttattctttcaaaacattctaaaactcctacaatcccagctggtttagtacatatacaaacaaaatggcccagcagcattccaaggactgcctggaagtgaaaacaaaagctctgcaatagtaactcttaactcagcttaaggccttgcccagaactcattaggcttcaagaaatgattcgattcgctttgtctacatttaattattcacatatgaatgacatattcctgtctccaacatttactgagcttttactgtataccagaaaaggtgcctggtgcattgggtacagcacagtgcctgagttctacaacttagtgtctactgaggaagacagaatttaaactggataatgctgtgtttgaagaaatgttaataactcagataataatagtcctatatgtatgctcagctagacagactaggcctgagagccagccctttattttaaagcatatgcaccttgaaattcaaactgctaaaccacacaacaaccccaggtgacagtgggcatctggagtaagaactttctttttttttttgcaaacaaaggagaatttcttgtaactttggcgtttgtatcagtgtctatggctgcataatgagttacttcaaaacgtatggcctaggacaatagtcatgcattatctttcatggtttgcgtaggtctggaattgtggagagactgctgggcgattcttgatttgggtatctcatgcaatggcagttagatgtcagtgarctacattcatctgaagacttaactgatgatagaagattcacttccaatgtggttggcactgtggcaaactgawgtgcatgtggcaaattgatgctggctgttggccaagggccttcagttcttctctgtttggacctttctgcaggacagtgtctgtgttcccatggcaggacagctggcttcccctggatgagcaatccaaatgttcaagtggcagctgcattcctttatataatctagcacatattgttactgctgttatattgtattgatcacacagggcagccataattcattgtgggaaggtattatgctagagtatgactaccaagaggtacgtcttgaaggctagttatcccagagtaacttctggctgccctcagccaggatatctctttttatattaataaagttacataggtgagttgattgagatagtatatcttttaaatgggggttcactacctgcaaatttggacacttctttgttagctttttactgcaaatagatattaaggcaaataataagacaacccctggctttcattcaaatatcacagggaaacatacaacattcaaggtccaattaattacactaggaaaacgagatgcaaatgcttttctttaaactttaaacatatacaggatttaaaagtgttttatcataaccacagtaacatctataggctacttttctattcacttaagtgatgagctctacttcttgggtacagaatttacactgcattgcagagttctcagtaaattagtgatgtttttattttccaaaagcaaaattaatacatttcactgggacttcatgagataagccttttggatgtatcacatatgctatcatttctgcaggaaagcctgttacaggtataggaaatgaaatttctaccgggaagcctttcatctataatggcactgtgatggcttttttgaagtgttccaaatattaccttgataaggaaaaaataaaaagctatccttcatagcctgcagccacacagactatcttgtagtagtgactaggtggatgtattacaattacatcgagtactcagttaaccttaaaaatgtttgagttggtaggaacgccatgataaggattacatagagtcatacatatttctgtatcacacccgaagctcgtggaagtacgtgttcattttaggccaggacctctctaagggaaagcagaacgctctcactttgcccagagctccctagcattgcagaggaccttttgcattgcacctcctcttctgaactacctaatgtttatagtcctaaaatgaaaacatgaaagcgagatttttgaacaagtatattctcattatgcttcaaggaattctttctcaaatacgtaaatgtttgttaatattatgggaaaataggaaatacaagctagattataagttactacagtgtaacaaaaaaaattttggatacttttgaaaatatataatgctttgctaacaatgtagaaacatttgaaaaggtttccaaataaactttgctttgtatttcttttgtaatcaaaatgaccatataatcatgtctgagaaataatatggtttagtgagcaaccaaaattttatttgagctaccagtatatgaaatgtttttaattttaactaaatctaaaggattattttctaaattgtagtaaagttgtttattagctgtctcccagaagaaaaaaccggtgagagttatgatgctcctgtggtcacacaactatttgaagtaatgtatatccaaaaataaatttgctagataaaatttattatttactcttaccacaataccatgttgagtgattctagctaatttaataatttaataaagattgtctagattctacattatgacattccagttaagtggtagttggtggtattatgtaagagtaaataagatcgtgcatgcaaaagttgatctctattgacttgtttatgggttcacatttacaatttcaatatgaagcctagaatgtcttctctgtcctctatgaatctcctagcctcggccgggtatggtggctcaggcctgtaatcccagcactttgggaggccaagacaggtggatcacgaggtcaggagtttgagaccaactcctagccagcatggtgaaaccccgtctctactaaaaatacaaaaattagctgggcgtggtggcaggcacttgtaatcccagccactcaggggactgagaaaggagaatcgtttgaaccctggaggtggaggttgcagtgagctgagagtgcaccattgcactccagcctgggcaacagagcgagactctgtctcaaaaaaaaaaaaaaaaaaaaaagaatctcctatcctcacccagtatcaactggttgtctagttcactttaaatggtagcacatgattctgccagaacagtcacccaattactggagccagcttgggtgaaaggaggactaatgtgagatgcgcagagcttgagccaagcatcatggaattgctgcatggtggccctaaaagcactgaagatgttgatttatatgcctagtcagagaaagcttagcagtgagcccggatccgacatgctcctggtctttgaagccaaacatccatgttggtatatttaactcatttcaagtgtgtattctcaaatacaagtgtccttacaggtaatagaaataaagagcaacttgcattagaatttttattattttagcaatgataggctgagttttaaaaatgtagaaaattacttcaaggagcttacagtatggcatcaatgtaacattaggtattaggccaaactaaagacttagaaatagtggctgagtccactttgtctaatgactgcaaatgttggcctcaatctatatgctttgctggcattattggtttgcctaattcacctataagtacagaataaattacagttccataaatagcagtacatgatcttttgccataacaggaatgtgtatctactggactagacttgagtgaaagaaaaattaagttgtagaatcagagacattatggtatcatcaaaggaaggcaagtgagagcaggcaagctggtgcaccagcttgtgtatagattctagtagacagagattggagatggaggcttacctgggatgaacataaaagttaggagaaaaagaaccaaaaacttctggcctcctttgacctcttggaaaggctctgtgtggtctccatgaggactatatcaggaggccctctggcctgagcagaccttatgctgttgttgcctttgaagaccaacaataatgagagaaaatactgtatcacacaaagamtgcaagcagcagatgcaagaaagcttttttttttgtaaaagattttgggcatattgcttttcttctactggattagcaatgaaaacagggtgtacaaccaaggaatttatgtactaatcaatagcatccaaaaggaaaaaaaatcatgaaatggcagtactaagaaaagtgaagaatgttaaaatacataggacaatatcataaagatatacagactacctaaaatccataatcttagccaagtgcactatttaaatcctggagttgtcaatatttattctcaggaaaaatgtaaygcgttggccttttagaaacaatgcactaatcttaggttagcactaacctaagattttttgcaagtatgttaaaaaagtgtgaaacttgctatatgacatatttccaggcagaatgccaggagggctgtgtgaaaggagcctggaagtgatgcagtgtggagacccagctgtcaagcatgagcagtaagaaaattatcttccaagatgaagtcattgcagatgttcgaaatccacgtcaagcatgtgcagtaagaaaattatcttccaggatgaagtcattgcagatgttcgaaatccacgtcaagcatgcgcagtaagaaaattatcttccagaaggaagtcattgcagattttcgaaatccacgtcaagcatgcgcagtaagaaaattatcttccaggaggaagtcattgcagattttcgaaatccacgtcaagcatgcgcagtaagaaaattatcttccaggaggaagtcattgcagatgttcgaaatccacgtcaagcatgcgcagtaagaaaattatcttccaggaggaagtcattgcagattttcgaaatccacgtcaagcatgcgcagtaagaagattatcttccaggaggaagtcattgcagattttcgaaatccacgtcaagcatgcgcagtaagaaaattatcttcctggatgaagtcattgcagatgttcgaaatccatgtcaagcatgcgtagtaagaaaattatcttccaggaggaagtcattgccgattttcgagatgcacttgaaataagtatttcaacatttttagtttcacatctgtggccagctaaaatagtttccacgtgagtttacagcgaagtttcatccaaatatccttggaattctaacaacacttctttctaggactaaagaaaattcagcatctgaattaaaagaaggtgcctgtggtccttatcaaatatttgacttacgttaagaataatctatactctattatttcttcttccccagaagatttcttcttatttaacttctgttttyatagatttatatttattacactttaattttttgtaccatctctaccctaaaaagtgttaagttttactcctattatgttaacaaatagtcaaataatactaaactgaccgttaatataccttagcagggctgggcattgtggttcatgcctgtaatcccagcactttggaaggccgaggtgggtggatcagttgaggtcaggagttcgagatcagcctggccaacatggcaaaaccccgactgtactaaaaaaatacaaatattagccaggcgtggtgggggcatctatagtcctagctactcaggaggctgaggcaggagaatcacttgaacccgggaggcgaaggttgcagtgagctgagattgtgccagtgcactccagactgggtgacagaacgagactctgtctcaaaaaaatccaaatatatatatatatataaggtktgtgtgtgtgtgtgtgtgtgtgtgtgtgtrtatatatatatatatatatataccttagcagtataatcaccatgtggcattcccctccaaaaagtcagaatcattggaaagatttctttaaaaaactaaaaatttctttaaagaaatttaggtacaaactgattattattatttttcactatttggtgttatacatttaatttttaaaaagcagttaacgaaagagtgaattattaagattttggagtcagaactggactctttcccacgttatgtaggatctcatgaggttaaaggagtttccaacatttacgggaaatgaacattggcgctattacccagctcttgaagttaatccaacattattaggttaatgatagcattgctattcttgcaagcattggcaatctccagagataaacctaagaaaaaacaaaaatactgtctcaccttgagcctgcactaagtgagaatcttatgcaactrgccaaaattagacaggcaaaggccaaatgccagtgcagagaaactctgcaataaagccagccatggggttgttaccctagtgcaaagagtatgtaggaagctcagaaaattaggaagtttgtttagctttttactgaggagtggggaaagctttggactccactaggcctgtgtttgaattccagctttaccacttattagaaggataatcttggctaagttacttatcttcgctgaagttctggttgcttatttgtaaattgagaatattaatgtctggtttatacagatattagtagcaaattaacatgcttttgccaagtatctgctgcaatacacactggttaccaagaaattggtaaatgattaaaatgaatcatcggacaccttttagactgggtagagggaatgcaaatgggctgtgtgtacgtctattttgttttctttcttaaatgagcatgccaagatgcaaaggttttttatttcttttaatcattgtttgatacttggaaatgcctcacttccagtcagaggctctgaacagcaactagtattttcctagatgaagaattactgattatttccccatgggcaatcattacctagggaagaaggtagctttgctcatcacctgcacccaccggtgccccagctcttcttggtggcttctttcaacaggattaagctgtgctccaactgccttcttgctatttgggctcctatatgttgtgtggcccatcccagccctgcgcacaccaccctcactgagctaggaggcatttggagaacacaaactagcctgcactttggcaggactcacacatccattcaaaacaagaagtgatcgggaagggctagcaccttactttctcctcatttacataaaatgtctaagaattgagggtcaggtttttttgttttttttttttttttttttctggaggaactgaaaggattttaaaatgaagctttgggtgttggggacaaaaagtgtctggggtcttggcctctgtgactttcttttagggactttggactggacagtgggtaagtctttcagttcctttgccagggcatcagacccccatacccgactttatattctacatttgggctgagtctgttctgtgccagatgctgggccagatgctggcatcccagcagagtagagaagggccccctgggcacatgtaatgcagatactggagaagagagaggggtccagggtgaggtggttcatgtccctccccgagcacagtacgtggcacagagaggctccacccatggcagcagtgttgttaagacatctgtccttggagacctctgaaagctccacccatggcagtggtgttattaacacacctgtccttagagacctttggcttgggagtcagtcaccttttgacctgagttaggaaattcctagggtcaggctcagaaaagctgcccctcaaccttgctgtgtgctaagtgaggaagtagtgcatttaattttcattttcttattaaaccctctggcttttttcatcaggatagaaacatagttagagacccaaaattggatagaaacgttgttagagatccgtaagtgtcactcttgatagaaatgaaagatgacgattggagctttccttgtgctgggtgtcttgggaagctggacctgggccctagaggtcagagaggaagggtgtctgtctcctcaggcgccttcctcggcctagccccacactgcccagagtcgctgccaacaccctcctcctgcaatgaaacctggtccattgccactgcagtccccagggccagcccgaagaacataattaactcaagaattgcatgaattcagccttctcctaaaataacaccccagtcactgacaaccacacgagtttacctcagttctctgctttgcagagaatatttttgtgttgttggctctgccttccccacgagaccgtgtgttttacaagkaccttgtctgtcacgttcactgttgtgttccccagcactcagaggaattccgccatggagttagcacagacagcgctggttggaggaatgagtgagtgcatctactcagccagaggccaccttgwttcattgcttgtcctcccatgcagatttccacctgacgcattcttctgtgcttttcctggcaataaggtgaagaaaaggcagcattcgaaggatgtttagaacaccatttcagataccacacttgtgtggctttcatgataaaatgctctgttgattccacttttaagtcttcatactttagactttgaggtacacaccttggctaagaaccttagggactatttgcagacaagtggaaaatttctctctctctctctctctctctctctctctctctctctctctctctctgtgtgtgtgtgtgtgtgtgtgtgtgtgttgtgaggagggtttataagaataaacactagaccattaatttttattttcttcttaacttcaataatttgagcaattattatcgttgtttctcaatttctctgtatgaacaacaaaaattattcgtaacagccttctcacaataagattagagaatttgtgcttgtaaattgagcttaagaactattactaaggaaaaaaataagcttttgttcagaataataacctttagtataaaaattatcacagccttccagtaaacatttggttggagaaatttttttttttttttttgcttattttttcttagtgtgtaattactggattttcaattcttgttgcctttatgaaccttctaaaatgtttcattcattttattcacatcattgcttyaaaaattctattagcatattttgtagtgtgcaccctagtatagtaatacttttgtgtaacttaaaaataaataaataaatgaatctatatttggggtccctgctcaagtcgactttttaattaacttccattttaaattgtggacacagagaacaaggtatttacatcatttagaaaagacagggattctgccttggggagataattgaatgcaatgttaccttattgacgtagtctatatttatttgagagtgacttctgcgtctgcttagtcataaaacattaccctgcaaaaaaggtttagattgagtttgaaactataaaatcatattttagattttgattggaatctcaatacaacctaccaatttttctttctccatctgtgttcatctgtctgtctctgtcccttatacctgcgcacacacatgcatacacgcacatatgtgcacacgtacgtacacgcatatttcacagacaggctggggcggaacccagcacaggcacggggatgtgcagggcagcctcctgagggccagcccagtgctggacccaaaccattctgggagtccagggaacaccaagctcagccttaccagacccaccagaggaatcagcaagatgaagagaacccacctctgacaagtacgagtggactttctcatgtttctgttttgtggcaggagcagagacaagatttcacattaggtgaaaatatttcagttacataacatatagtttcacataaactatagggttaaaaatgagtttaatttttagtataaatatacttttaaacttgacataaaattatatgtttttattatataccacgtgctgttttgaagtagacagacactgtggcacggttaaatttagcaaattatcaaatgtattacctcacttagttagcattttgctgggagaacacaccatccagtctctcagcattttccacaatacatcgtcattaactgtagtccccatgcatgcagtgtaatttaagtcagctaaatatttaatgattgagtcactaggagatggttgactctatatttatatgtatcctgcatctgcataggcacctctttttttaaaaaaaatcaaaatacaattggcgggttagtcatttatagaaattgatttttccaagattatactgagcttgtcattctcaataggacaagaggacctattttacttattttgacatagatgaaatttgaagttactttttgaaaaactttggaatckgaaacttttttttttagggaaaaaaccgaactgaataacattcaagttggtttttaaaagattgaaattaatttccttttgttcagaaaacaatatatcatttttattttcccaaagaaatctgtgaaggaccaaaaagtcagggatggattcaagcagaatgaaggtaataaactttccctcccactccatcrtgtctgcatgaaactcagtaatgagcacaggaaggcctctgcctgtggtcagccttgtgaagatgagaaaggagagcgggaarggacctgctgaaatagcgcgcagtcaagttatttaaacaccacggtgtcacatttgatgtttgggatgagttagatctaacagatgttatcctcctcaggatagtgcacatatcaaagggagcagtaaaaagccaccgcaattagctctacaagccgttaatgatattatcaggttggttattaataagtaatagagaaagtttttgtgtggtgacatttatgtatgattgtcttcctgttttattactggaatgactagctaatataaaagctgttaaatggttctctttttgctttataccatgttgggcgtacaggggttgcagataactggtgtgtttatgttatctgggtgaagtggcatgcaaacctgctaccattggtggttaaaacttagtttattactcaattccttgagggaatggggacatactccctatttcactttcatgtgagttccataagtatcttgatggtattttcagkttttttaaaaagataattaatatgattctgtatgtctttgttaaagaaatagaataggctgcaggagttaaatttcatgaggggggaaatactatgtctaaaactacttaagtcatgactttactgtgatataaacataggccccttcatactaaagtgggacacagagcaacaaaagggaggggaaggcagggtattttagtgaaaataaagacttcgaagctaatgtaatgctgcctctgatgcctacttactctacttccttaaacaaatcatttctcctctctgcattgcagctttctgacctgtgaaataggaaaaagtaatacccgccatataagacaatttaaagaaatgcagcgtgtaataaatatttgctggtatcacaggcacacctcattttaccatgcttccctttagcatgctttgcagataatgagtgtttttttttttggtttttttttttttttacaaattgaagctttgtggcaaccctgtatcgagcaagtctattagcagcaccatctttccaacaacatgtgctcactctatctctatcatttggtaattcttgcaatattttaaagtttatcactttatctgctttggtgatctgtgagcggtgatctttgatcttattgttttggagtgcgatgaactgctcccttacaaggtggcaaacttaatgtgtgtcttctgactgctccactgaccagcagttcccccacctctcttcctctccttgggcttccctattctcggagacaaaataatattgaaatcaggccagctaataatcctacagtggcctctgagcattcaagtgaaaggaggagttgcaaatctctcactttaaatcaaaagctaggaataatttagctcaatgaggaagccatgtccaaaactgagacaggttgaaaactaggcctcttgtgccaaagagccaatttgtgaatgcaaaggaaaaattcttgagggaagtgctactccagtgaacacataaataatatgaatktgagacagtctcattgctgatgtggagaacattttagtggtctgaatagaagttcaagccagttacaacattccattgagccaagacctgattcagacaagggtctaactctttttaatatcatgaaggctgagagaggtgaggaagatgcacaagaaacatttgaaggtagtagaggttggttgatgaagttgaaggagagaagccatctccactgcatagacatgtaaggtgaagcagcaagtgctgatgtagaagctgcagcaagtcacccagaagttctggttatgatcatcgatgaaggtgacaacagtaaacaacagatcttcagtgtagatgaaacagccttctattggaagatgctatccaggactttcatagctaaagagaaaaaatcaatgcatggcttcaaagcttccaagaacagcctgcccttttgtgaagggcaaatgtacctggtgactttaagttgaagctaatgctcatttaccattctgatagtcctagggcccttaaggattatgctgaatctactctgaccttgctttgtaaatgcaacaacacagcctggatgatggtacctgtgtttagggcatactcgagtgaatattttaagtccactgttgagccttactgtgccctaatgctcagaaaaaaatgactcttcagaacattaccactcattcatgatgcagctggttacccaagagctctgatggagatgttcaaggaggtgaatgttgttttcatgcttgctaacataacggtcattctgtagcccatgaatcaaggagtaattctaattttcaagtcttattattcaagaaatacatttcattaggctataactgccataggtagggatgcctctaatggaactgggaaaagttaattggaaataattcaccattctagatgtcattaagaaaatttgtgattcatgggaagaggtcaaaatattaacattaacatgagtttggaagaagtggattccagtcctcatggatgactttgaggtcttcaagacttcagcacaggaagtcatcgcagatgtggtgaaaatagcaagagatctagaattaaattggagcctgaagatgtgaccaaattgctgcaatctcataataaaacatgaacaggtgaggagttgcttcttacggatgaacaaagaaagcagtttattgagatggaatgtgctcctggtgaagatgctgtgaacgttgttgaaatgacatccaaggatttagatactgcataacttagctgataaagcagtggctttgagagggtttgagaggattaactccaaatttgaaaatacattctactctgggtaaaatgctatcagcatcatatgctatggagaaatctttcatgaaagaaagagccaatcagtgcagcaaacttcactgttgtctttttataagaaattgccacagtcatcccaacttctagcaaccaccatcctagtcagtcagcagtcatcaatrtcaaagcaagaccttccatgagcaaaaagattacagttgttgaaggctcgggtaattkttagcattttttagcaataacgtatttttaaattaaagtttgtatgctgtttttatatacataatgctattatacgcttaatagactacagcattgtataaatgtaacatttctattcactaggaaaccmcaaaacttgtatgcctccctgtattgctatattcactttacacagtggtcagaaactgaacccttagtatctctgaggtatgcctgtacatgttcctcaagttttcattattatttaattattcaggaaatgtatttaattggatttccatttctagttaacagttgcttcttttgtgagattaatattatttgcctggttttaaggatttgttttggctgagatggatcatcagcatcattaggtgactaaatacgtcttgtactatttaaccttatttatgactctgagtgggggagaatactaccgattataggataaaataaaaatctagttttaattatcaaaaagtaaatgccagcaaaatcttgctactttctcagaaagcagatatccagaaatttttgaccaataaccccctaagtgtgacccacgagtctgggaggtctgcttgtgtgtctcctgatctgcaattgtgctgtgttataagggaaaaagaaaaacaattctactaatgaatgcagttttccttattctgttgaatttttacttggagttatgcctgaagtctaaggacgtaatgtggaaaagagaatgtatattaactatcagtatagaatattaatggcctcactcacttcatccacccagctatttgttagcactttatttctttggactaataaaaaaaaatcagaaaaaagtgcgtaatkgtaaaaacatatcatttttaactgaggcatttataaagagatagtgggggggacaggtatagcatttaccagagatagtctcatcttttgagagtattgtggtgtttaatattaaggacagcttatacacaatagaaacatgataaatggaaacatcttttgttccacagatggggattttaagctactgtaattataatgagggtataagtgaatgtaattaagttacacacaaattcaccttggaggtagctgtaaattgcttactaaaagtatcacttagagaggaaaaagtaaaaggtaataggcagctgccagttcatctcaaaaatcgaattgartggggaaaattaggatacagaagatactgtgaaaattttttacattactgaaagggaggagggcaacaatagttatagaaatayaattgaaaaacagggtaatttctatttattgctgcatgctatgaggatgtgacgggggagtaaagagaactttaggaaacatcaggaactgtcttccaatggagacgatgcccagacactgtcttttgagctgagtggaatgactcaggctaggaaaggacaaggacttcaaggtggggaatcaaagatgcaggtgtgctctgcagaggaagggacacagtgggcttatccagaaatagctggaagaggaagaacggttcgcctgcggatcctgctctaagtctggctgaatccatggcggttttccttatctggaccacggcggccactctggtcgctggactctcccatgtggctgttgtagcttctcaaaaagggaggcttgacagtggcccagaaagactgcccataggtccagtgatacagactcttaaacaccttacttccttatttatgtgctgaatgtcttcatttccaacacctcccattcactgagcgccagttgaaattgacaatttgaaaacaatgctgcaaggtggaatttttcaaggtttttttttaaacagtagagagcattgaagcccacagaagtatatttctcaaggcttatatctagcaaatgatagaatctgaatgagtatctttaactccaaagccacaactccttccactacttgataccacctctcctgtgtctttgtgcaaagcaaattggttcatgcagccttgatgttaatgatacatatatatatgtrtatatacatatatatatatatatacacacatatatatgtgtgtatatatacatatatatatatacacacatatatatatgtgtgtatatatatatatagctttaaactattatccaggtacacatttcctttcctaaatgaataatgaatacttgctgttctctatgatgataccaacacccrtgtattcagaactctgtgttcctttgagaaatctcttctgtaaactgatgacatgtcacattataatgctatcactatacttgatttcaaatttacttgccctaataagccacatcagcatttaattcactatttactacccaaagtgccaaattacagtctattagatgaaatattaaaatggaaggtactcgataaagtacagaatatggcaacataattttaaaaagatgttgcattccagtataatatactagtgggtgtcttataccctgtttatctctggatattgaattgttttgacagctgtatgcacaagtgagtcccgcagggtttctgtttacattaaagcttccaaacgctgtctcccttggattggaatgactggttcacctcggaattcaacctctctgccggcatgttcatcagctacctcagaagtcttctctgaaataaaaagcagatattgtataaggctactaaattgaatccaaatgctccatttcatttacacaagcatttttttaaagtgccttaaaatctattgtctgctcataccatgtactgtgacaatcataatggaggataatatgtgacgtccccaggagacgccaaggaaacctgcctagctctgtccacatgcatgctctcaggacctttggcttcaccagccagaggcrggtccatgcgggaaaggcattgaggctcagtttgggaggtgtcggatgggatcagaatgatactggagaggagagttaaggggattagcctgaccctgaatgggagatttatttagaaacttgaagtagtaagatagttgagttagtatttatttagtctkgaggggtagagaaagaagtatgtcaaatatctttctcttaccccttctaatctcctcaaagcccacaaaaagtagaaaatgtaactgctgaatacaagtaatctcccaattcatagatctgggcctttcagaaggacaatgaattgaggactcctactcccagcccatrggaaccatgtgagaaatgggaatttatcactcatggagtgatgagacctttgtaaatgctggtatccagccatcttcccagcttccctggcaatggcactcaaattcaacagttcttaaaatcatgtggtcaagcaaaactttaggccaaatatagtttagagatgtttagacctctgagagaaatagaaggaaaacattgacttggttaaaatgtgtaagaaggggagaggagtttagagaataaacagctttgatctatttaaagtatttgaataaaggcctgccagttgttttcagatacttgaaatgtggcttctcaaggtgagttcttgatattgagtcactaccaagcttccattaaataaatcatggcacctctgtgttgttgcctgtggctctgcagagacagccaagtgtggaatccccttccaggtcttatttgggggcatttttgaggaatcatcttaaaactgaccccaaatgccccattagaggctccttcaggtttagaatatgcagagcataagtttcctaagtagttgtggttttatggtaagcaactaagcagacctttcactcagcatgttctgtttcttcttgtaataaagtttaagctcatttaacagttcttgagactgccaggtagaacaaaggccatttgaattctgtgcataggcacttgataactagcctcaccagtcttattatcctgaaaatacaagactaactrtagcagacgaaagcttgaataatcatgccttaaaataaaytggattaataaaagtgggaaattgcttttgctgatgacgttgctcttcttacatagaaacatccgttggcctgtgggtgttcakgcccccaggggcccacctcattgaaaacacattaaactgtacttttggtagccgctgctaagtggaatccagttttctctctgataattgttttgtcatctcctttatgatcttcgattagactgataatctgggatttaggaagaacgagagacagaaaaaagtattcttgaaacccaaataaattgtttcacttaaaatagatggcaggtttatttcagcacttgccttgtttccctttaaatttctgtctcttctctgtccttttattctacacatagaaagaaaggggagaaaagaactccagatagatggtctttctttatctcttaccttacatttgtaaacctagcttgatttcrtgatgttaaagtattgcctttgaccatgctgtgtgaatcccgacgagaaagggaatggattgtaccaaagggagtgaacgatgcccacactctgctgggagagactgggatcctcttgttttactaggcgttctcccaagcacatgatgctttgtttttctttcctcctcttgcccaagaaccatctggctttcacttgaaattccacattgccttaagcatgaatagtttggagtattaataaccaaaacatgccaagctccaatggtcaactctaatacctgctggggtattgctttgggttgctaatctccgtgctgtcctcttactctcccgattagcactgcctggttgaccaaggtagatggtctcatatgacttacatgcctgtcccagtgctggcagccccttctgtgatggttcagtctttccatggccatggcatgacatcagggagccgatctgtaggctggccatgggcctgtggcgtgtgttggtctaagaactccatccagtgtgatgaatcgaactgaatagatcccctcttttggacagtttgaactagattcaaggagaattttagtctgcacccagagaaatcaaagaaagagacaaaaggagtggcccccgtcagggcactcaagaaggcagccaagaatatctgcctctggggttgaaaccatgagaagagctgtggtgtcaccgagcgtggtgtcactggcctcttggccagtcctctgaagtgactggtcttccttaatgccagcccagtcctctctgtctgtatggaatttgtatgcacaytctgtgttccttacacattcacatagcctagtcagcctaccagtctgcagatttggatttgaatattagttcaaccaagttactcggagcagaaatacacttttattactttagagggtattggctaactgtatggatgcacagggaaatgagtaagaaacaaaaagcatcaccctccaccatcctcttaggatggaagtgcaaccagaacgtcctcgttcatgatttgggacccatctgtagctgcagcggttcctgctaagtgggcactgtgtccagcgcatgactcaagttgttgctgtctctacctcccagactgggcttctcctcctgcctttactttgtcttcctcctcctctctcctcgtggtctcttcctacctctctctttccctctccctctccccctcttcctccccctttcccctccccctcccccctccctccctctccctctccctgttcttctccttctgcctctctctctcctcctcccctccccctccccctccctttccctctcactctccgtctccctctcccactccctccctctccccttccctttccccctctctctccgtgtgtccatttcttggtttcggcactactttgctgtctagtatgtttacacatttaatattcaagctgtctgggagagaagcattgcctggtgtagtaactcccctctctggaggcccctggccccaggtattcatttgtaggctgcctctctctcaggggatgacttcggctcctcagtgccaaggagagtagggtcatctttgcacagtggctgcgtgtacagcaggaataccctgtatagcttttctacacggcggggaaacatgaatgtgagggattacagtggtcaggctgtggaccccacaaacataaggatccatgtggatatgtgtaaaactggtaatataatacaatttgccactctagtgttcttttttcttcttctgagtatctttttcaacttcttttatggctaaattcagcrtattctaggatgggtaaagtaatcaggagtaacaaaattcccttattcacacaagggtgcggtctgtgttctttggaggcaaatcctgttgtcactgcctcctycagtgggtgtctggagctccagtgggcatgaagttggggcaaatgagggagacagaatctagtctcccaactaagaaaacactatgatatctgctaagtattagaatgaagagctgaagaggatgttcttgtttctcaagagttggattcctcaatcctctagcakggaagcttcccagggaggatggtgattaactggagttttgaagagtgtgtacacattcccagatgcacagggcacagacaggggactcagacctagtagctgatgtcccagacaagaaccgtgggtccatgtccacccaaaattcagtgaaaagwatatttacttgtgtatatgtgttatatgttaatatgtatatatatgtatatatatctagagagagagagtggggtgtgtgtttktgtgtgtgtgtgtgtgtgtgtgtgtgtgtgtacaaagccatatttgtatcagattggcagagtctttcttgtactaaggaattttcaaaaccattttgtaagtacatgtctagtatccctatccaaaattcataggaccataagtgttctgtatttcagactatttttctggagttttgaatatttacagtatacttaactgggtgaacattccaaatccaaaatctagaacgttccagtgagcatttcctttaagtatcctgaaacaacataagcaactccatgcagtctatgacacatgtttattaaaccatgttaaggctcttttgtagacaccaaatacaaaaagaaatggaaaaaaaaaaaaacaggagttgataagcagatatggatcttcttacccgctccccacccctactccagtggcttttttgaagtattttttgcttgaaaaaataccagcttgagaccctggttactcatcactgtggctcacacttgaaggtgttacatgaagtttagtctaaagctgtttcattctatttataacgtttggcctaaagattttgtccttcactcttctcaggatacatgacttattaggtctctttttccatagtttaaaataaatgggacagtcattataaatgcatccctcataatagactccataasaaattctactacaaagactattgttacacaaaagactaaattctgttactaaaattgttcctaataataaaatcacactagattatccattgactacacaaaaagaatctgttttgttatgaacactttttgttatacataaaaattataaagattcaattatgagagattaacagactacttggctaaaacaaatactatttatctaactcacgtttaaaactcttcaattttaattgattcatagagactctgaccagaaaccatatttcaaactcttaatattatcttcctaatagtcataatagtagcctccccaaaatactatattttctcaaatgtttacatacagacatctataaactgtcaactggtccctcttcaacccaaacaacaaaaactccaaaaagtgatcaacaagtcactgtaacatataagacacactgagaccgaaaactgaaaataataatagctaaaagtaccacgaagccaacagtaaagtttgggtcaccctctcacctatccaataaatgaataaataaataaataaacaaacaaacaaataaataaataaaacataaaattataagaggctattgcttttgactaaactcatgtactaggctccaaccgaccagaccaaaccaaactaaagtcactcatactaaatatcacataaacaaactaaaacttaaaaaaaaaaaaaaactatagcagaccaggttttatctcctaaaatcaaaaaatttcaacacacagaggttccttctactctaatccttacagaaaagtaacctaaagtccttcttttcactttacaaaacccactatccaactacttcccaataaaatttaaaactgtgtgaatatgtttataatagtgacaaaatgtcatcagtgcctagagttttggttaacccctcatgatttttggaggttgaccataaagagagaattgttaaagcaaatttagcctaagctgcctccttgcgtattttaagtctggcctaaagttttccctgtacagagtaaactgtgtaawcaggctataacctcctcttgttccaatcacgaagatcaccaagttttggcctctgaaaggtgacaaattcttcaaagcagttcaaatagacaccaaggtgtaaccaatacaactgtttgtgtacctgacttccattttctgtacatcattttccttttttttccataagtcttctttgaccacacaaaaacactagtctctctaaacctattctagtttgagggctatgtgattcactttactcaattaaactctattaaatataatttttaagtgcttttttgaacaaaggtttgtgactgtaaatatttaataattttctttcttaagatgttgttaaacttgttcttctatgtcaccaggaacaaaagatatgtaagaagggtattaaaatttcctatataagggtattaagaatttcctataaaggaagtattacataggcagtcatcagtttctcataactttctttttcccaaatcccaacaagaattcctaattcactcagtcaaaatattgcacattttagcttcataagttatgaaattaagaaaaaaaatcaatcccttacccgtgttggaaaagaaagtactcagggttctggttaatgtttaaggaagaggttagaaatgtcaaataacaggtcaaataagagttatagattaacatccaacaaagaaattgtccaagaaccatagtttattaactcaacaaacacaaaagaggcttactactacttattgaccaataagttgtaaacttaaaattgccaaactcacctttacatagccaaatttttctcaaaagaaaacttaaacttgcaatgaaattctgttttacatgaaagctccgttgaagtagctattatattactagttacacatcgttaaccatttaaaccattatttttttccaaatattctgttccagttattcaggtctcattagttgtggtaggtaaatgtactttctcctcactgtcttagtctctcaaagagatctattaattatttttagtgctagggaagggaattgacctgaaaaagtactcctgataaaggtgcrtggtctacatccacataaaattgcctactcctccggtagttgacaccgtgataaacaaaatcaacacatctagagaatcttccattctacatactcagtctttttctccactgaaatttcttgcctctcttgaaaatgattttttaaacatgatatggtaaagatacacgggctttagtgtcaggtacaccagactgcaaagtccccttcttaactgtattttaaaaaawtttatttattcatttatttgtaatttacarttttttataatttcaacttttattttacattcaggtggtacctgtgtaggtttgctggatgggtatattgcgtgatgctgagctttggggttcaaatcattctgcaacgcaagtagtgagcatagcaccgaatagttagtttttcaaccctccctcctccctcactcccctctctagtagtccccagtgtctsttgttgmcatatttatgtccgtgtttacccattgcttaaccctctyggaagttatttttcttctgataaaatggagatgctaataccatcttacagggctgtcgtgaggatcgcatgtgtagcacgtgtgagtaaactcagcgccgtgaatggagcacagcrtgtaaatgagagtgtcccagagtctccagggacaagtttctgggatgtttacttctgcctctggcctggaggtttgcatgcaaatagaccattagaaataatggactgcttacagggacacagccacttggcactgacttccgtcaaatctctagccaaagatgttccctggctgcaaaacgacatggaatctgtaatccttgttttctctatagctgtgcagggacaacagactgaaggacaaaaagtagaaaagaaattaaggaaaccagtatgtccttcaggaggaggccagaaggatggcgtccactccagctttctcctgggcttccaggaggctggacagagggcatctggcagcagctccatcttcttgaagagctttgtgcacttctgtcaagaaggtgctggagcaaaataatctgccaatcatgcccttctaatgtttccacttcagcaagctcattcatttcaaactgaggagcctcaagagcctcaacatcccacagggctgccatgtttgaggaaggcggagaagggacccatagtaagaaggggaggtgaagaaacataataacatgctgctgtacaattacccaatttgttggcatcacagaactggaaatagaagtgatgagtggagcaaaaataaaggttaggattcttaggcagtgtacacagtaccattgagtaccattgtggaatggatgccataaataataatcgctaagttttatcgaatggttattatataccagataacaccttaattgtgttattttatttggtcctcacagcaaccagtggagtagrtaatgttattctcatgtttataaatgaggaaactgagtccagagaaatgaaataacttgtatttagggtcaccccagtagaaagtgagaaagccgggtttgaaagtctgatgttcacatcccagaattcagctgaaataatacttaggaagagtcctgtgtgtgttggcagtcagaactcgcaaagctgcatgagggcggctgtgagtcaccaagaractctgatgattagcaacacctggtcaccacactgctttctaaagaagacagttcctattacctgcagggtgctgctttgttgcctgaggatttgggtcggggcccagagtgaactgcttgaaataatacatgagcacttagcagtgtcccttcttctctaatctgtccccaggaagcatcccgcctctcctgggagcaaatgttgaacaaatggattgaaaggataccaaataattatcttgccctaagcatgaatcrcttcgccttcccacgatggccttctgtcttcgtctggctttgacttgggtcaggatgtttgataaccagtgatggccattgggctaatagcagtagcattctggacaagaagccatgtacggaaaacacccatttggctcataagttctgagtagctgcgttccatgctcagtaccatttgttcaatgatgcccgtgagccaagctgttggtttttcagtatcactcactaaactctttttccagacacaagaagtcctataggactcttagtgaactactaatatcccacataatactaccattcatacgccaggacatactagtaacatctactctggagatgctgataactcaattagttgctatgactgtattcatttgtactgctttacataggttggacagagaaatattgcatggaataagtaaacgtgaatttcactttggctttgccaccagcttccatttttgtaagttcgtttctccaagaaatctaagtagattcacctttctttctctcccacccctccaattaaaggaaccattatgctagtttaatgggataagtagtacttttttcatcttttgtttggtaataaaatgtaatttggggaaatgaagttgtttcctggatacctcaagccaataaaatagtgacacaaggacgaatatttatacaacatccttggtttttcagtccagtgtccttatcttttgccttagttagtgatgttaaaatgctatgcctttttttctatattaaaaaaaaatctctgaattcgaaagggtcaatgagatatatctccatgagaggcaacatccaaatcatctgccaggtgatcccaccttgtcacaaaggattgtgactgacagcagaaagaaagcaggcatgagaaaacgagatgcagtcaagagctgatgatcacatcaaaaaggaaagaaaggtgaaacatttcgactacagtgaaatttgctgttaagctttttctatggagagaaaagctttcttcatagagaaaaccatatttcaagaattaccactcaaaaagcgtaggtggccacttgatgatagagaggccatgtgtactcattcttgatgacaagtacagggtgacctaattgggggctttcactccagcaaactgccccgattccactgaccccatgacgaggatgcttatttttccaaatagccacaagtcttgaggcaggataccttcagggttggctaactcagctcctaggtctgccatccttagtgctatgcaaaatgtagacgggctttgtaggggaaaaggggttatttctgttattataaagaggggagttcacctaaacatcatcagctaccctgttgttggttcctatccgtggatgctaatttctgccagtgatctctgccctggggaggatgaagagctgaaatacatttaaactacgtactcaatagactgttggacttaatttgaaactaatatctttacttttttctctttgtgagtaaataaaayccttaattgacattaccagatgctgaactagacaaatggctgatatttttgtggaatgtgtacaattgtatcacccacacaaattggctaatgatctaaatattttttaaaagacattgggtagtatartaagagtcacacctgatgttcaagggtagatttatggcactgttatcttttaatcatgtgaaaattttctcaggtggaatgatatttcatagaactagagttttcttagctagagacggcacagcacctccaacttttctgtttcgagaactgcctgttcccttgtgttcccttgacctcagacagtgaaatgacatttgccaattcaatataaaaatagcaacaaaagaacttattccagaaagtttcctgttttatttctttttggatacatatttgagtgggattttgaagctaacctgaagtataagggaacttcattatgggtttatttgacttactatatgtcacctttgcaaccaacaagcttatgctttatttcattttctgtgaaaacgaaggaaatgggcaaaaatctcaccaaaatatggatggggtaatgagtgctagtgtccatgcaacatgtaaccatggcttagctgataaaaaagaaattcctattgatgttatctttttaatcacaaggtaattgtgctgacagctaagagaactaggccaatattayaagtagcctaagkgagcagcagagacacaggtttggctctctgtaattgtgaaaaaacacttggttgttggcatcacaaattatgctatatcaattagagaaaatatttgaaggacgttgaagagttgagagcaggtgactagctagctgccactagttagttgtctgcattgaggtattgctttggcctaaatcctttgcctttctttcctagatgttctatacattcagtgagaagtcagcctgtgtttgcataagyatttctgtcactgccaacccagctctgatgacagagtgtgagcttctgtgctgctggtacctttgggattcgtgctgactcgtgacaagccacagaaagaaggatgtaaggatgtaagaaggatgaccttccatgtcttcaagaatagttgcgttttaagaaacaatgagacttccatgtcctgatggcagtcgatgtagaaattcctggcatttggcaacagcatggaatcacattctgtagtaatacaaagagtctggcttctggcttctcaggtagattcaacaatgtcagctctcctggtaactgctctaaaaatacattttagagtcataagaagcccagttttgacccctcactctcttacctgtgtagacacccagatatgctccatgcactcttgggtgtgagagtgattccctgttctcccaacccctccccagccatgccctttgtgctgctccgcaatgcttggctcgggaggaaactgtatttcccagatgcccttgccagcgagttcctgtgacatctgctcagtggatccaaaggcaggtcaggggaaaggcgctgtcattttctcttttctacccttccctctctcctgcttctggaagtgtctgtgatcccttctccatgccactcctccgtgactgggaggcagtgccttggtggtttctacccactcagtcggcccatcctcaggggtcctggcatgcactcagcactcagaagttctgataaagtactttcttgagtttcctgagtcctgggggcagtagctgtttcctacagtttaccaggtgatctaatctcattctatcccttttttctttctttttttctctttctgctctgctaacattttgtaacagatttcttatattcagtgcactcttaagaagtacctaatacatcttgtatgtggtgggattaatagtactttaaatagtacacacaacctgcctgtaaaaggcctgaaaagagctgtgaaataatttatactccttttcttattgagtccacatttaggaatctatcctgtgaatgaaatcagagatggtcctggagattttatgagcatgggttttcattggtgggttaatttttaataacagaaaaaggaattacttgtagaacaataggaaccattaaaatacactcatacaaattacaatacacatacacattaagatactgtaccattattaaaaatcacattttcaaaagaaaatgttcatagcataagcgaaaaaacagtgtattagcctgtcctcacactgctctaaaggactgcccaaaactgtgtaattaataaaggaaagaggtttaattgactcacagttctgcatggctggagaggcctcagtgaacttacaatcatggtggaaggggaagcaaacaygtccttcatcacatgatggcagcaaggagaactgccgagcaaaaggggaaaaagtccctgataaaaccrtcagctcccctgagaactcattcacatcatgagaacagcaggcatgggggtaactggcctcaggattcaactacctcccaccgggtccctcccgtaacacatggggattatgggaactacaattcgagatgagatttgggtagggacacagccaaaccatatcaaactgtatacaaaagagtatgagggaatgttgtataagggaataaacattttaattttttaaaatttattttattttgagatggagtttcactcttgttgcccaggctggcatggaatggtgcaatctctagtcaccgcaacctccacctcccgggttcaagctattctcctgtctcagcctcccaagtagctgggattatgtaccaccacacccagctaattttgtattttttatagaggcggggtttctccatgttggtcrggctggtctcgaactcccgacctcaggtgatccacccacctcggcctcccaaagtgctgggattacaggcatgacccatcgtgcctggccgggaataaacatttttataaacaccrctttataggtatgatcaaagaaacatttctattaacacacctttacagggaatgcagtggaaagaaatcaggcaagtttctattggggtgatttttattttcttttctgtgtttatttttgaaaatttraagaaatgtccaccatgactattttttaataagcaaaagacaattaatacattttaaaagaataatagttcttattatgccacatataataataaatcccatttggatataagatctaagaaagccaaccaaaatcctttcaatcttgtataataatggaagaaaactagaatgacattctgtaatcccaaaagataaaagaataaaaaagattttcaacaatgattaatttggagataaaacacaaatgtgataaatgtaaaaagattctttagaacaaggtgatttttaatttacaaaaaaattattataacctgtcaaattggcattataaaactgcatttgtgggaaaagggccgttgccatratattggtgacaatataaattgccattaaagcttttttgcagtacccatggcaagtacccatcaatattttgtgtgtacaaatctttgggcagtaattttacttcgaggcatctctctaatggaaatatttgtgtaaatgtgctacaatccaagttgaagtatacttccattatgcatcttctcagtggacgtttattgagagcctatgatgtggcagacattgttctaataaaggacacattagagcataccagagaaaaatcttacatgaaaacagtaaacagtaagaaatacatgaacaagattattccagagggtgatgggtgctgtacagaaaataaaccgagaaggtataaaagatattgactaaggataaattagattgtgtagaacaggagctctagaaagacctcaccaaggaagtaaccttggagcgagtgatgagacagcaggaaccaccacgccaataccttgggacaggacattccacagagatgcagagacaaggttggcttagcccaggcatggaagaaaggccaggggcacaaagatttggtataagaagttccagaggaagacaaagacaggtagtaaatcacgtaagagtccacgggctatagtaaaaagcttgaagttgatgtacatatttttgattttgaaacagtaaaaaattaggggaaaatatttcaacattcatcagtaggggaatggttaaatacattactgaatataatcatcttgtaaagtactgtctagacatgaaaaaaatagaaagctctgtatttactgacatggaagaatgtgaatcatgctattaaatgaaaaagcacattacagaacaatacacttacaaaatacaatatcaaaatatacatatacacacagataaaggtgaaattcagaggtggggatgtgggactttgactttttactttatacacttttgtgtgatttttttaaattatggatttattttattattgataaaatatacaaaggttacaatactcctgattgtaaaaaaaaatgcttagtaaagtatatttagaaaacagggaaattggaacagtttttagccaaagaaaatcccacactacatattggcaaaaaaaaaaaaaararagagagagagagagagggagaagagagatttctattctaaaaaatgccttarggcttgtagtttcttataacttctgtgactacctatggcrtataagtattagattgtattctacaaattgacagcccaggatcatattcctggttgctttgttttttacacaaatatctttatctgaactctggctcattctggaaatgtaagcctctcctccctcttcctgattccccttcacaccccacaaccatgtcagttgtgcagccattttctggtttaaatttcagaacacatgagagggcccagctcgccgcatgttaagataatcctttaaaggttgctgtctggccatgtgagcttgcaagataaggcaccgagcgtggggctttcttcatttgaaagagtattttgagaaccttctttgatgtttgaagccccttttcttctgacctcccacttgccaagtagatactttctttctttcttttattttatttattttatgtttttatwtgggggacattttactcccagggtagttatagtcaaaaggaagaaaagtttggaatttcttctgtttgaacaccactgtgtaattggaaggcgcaagtctccacgacactgatgacaactcaaaaaagctcaaattaaggaaaagtccagttgaaaggtcaaggtatggaaacagtacagataattatttgggtattattttaaagagcaatgcattggtgaaatattcatcatgattgtttttggatacattgaataccagttatttatattcttgaatcataccagtgaatgtctgtgtagatggtattatcaagtctggggtttgattttacccctcttacaaatcagtgagcctgctactgtatcaggctgctggtggaagacgtgagtcttggggccaaaggcaaagggctttattwcacagtgctcagcagtgcagcagcttgtgtgcagggaatgaagcaaytggctcagagggaacttactcatgggtggatttgcatcacagccggtgaatactgagctgggactactgttatagcaagccgcatgcaagccttttgtctaggggaagaccttgccttatctctttaggttaccagttgcataagcaaccctgagtaatagtctgttaaaagcgggcaggaccttttgatcttggcaagtccagcaagatgtatagaagggagagaggcccaaagaggactgtatctcccagtgagttgtaattttatatcacaatatctaatagcatataatcctgttaacgtagtcatgcatattacatatgcatttcaaataatctttttaaaaggtttttgttaactgaaggcataatagtgaacaatgatgatgtctttgcttcatttttaaaaagaacaagaaataatttggaaaaagtagcatagaaatgaaagaagaaaaatgtcacttttcttgtgctgtcaagtttggatttatagttcactatgattaagtatggaagaataaatagttttcaaatagacatatttattagctactaaatggaggtatattaaatacaggtacctcgatggcatatgggtttgtatagaaaaatacattttttcctacagaaagggggttagtagtaacacagaacttcagattcaacatagaaaccaaattgaattacagcagcatcaaaagattttcaaagaggggctttggacaatgtactttgaattgcctctgcagaacactaatacagacacgtgcctgggcaggggcatggagggccaagtgaagctaaccctctttcccataactcaagtcaggggagacaattttttttttttttttttttttttttgtttgagaaggagtctcgctctgtcacccaggctggagtgcagtggtgtgatcttggctcactgcaagctttgcctcctgggttcatgccattctcctgcctcagcctcccgagtagctgtgactacaggcgcccaccacgacgcctggctaattttttgtatttttattagagacaggatttcaccgtgttagtcaggatggtctcgatctcctgacctcgtgatccacccgcctcagcctcccaaagcgttgagattacaggygtgagccactgcgcctggccaggggaaacaatttttatagaatagtgttttttattgtgaaggataactttttgtgaaataaagtttttttctgggctagaggaggcttcctcacgtaccctggccaccctgagtgcttgttcacagttggttttggaagggaatagcagaaagagcaagatgaatgtgagtccgcctcttcctactattgtttcttaatatttacaatgtctcccatgttagtctgatttatctaacagaattttctgctatcctaaaaggaagaaaaataaaatagagaaacaggtgtaattttcagtagaaatttatttttaatattattcaattttaattcaaataggattatttttcagttattttacacggcccttatttttgaaagttaaacttgtgtccgccacctcccacccccaaatatctcagtgcattactattacttttttaaagataggtaactaagcattatactattttgagttgtagaaatgtggtttatatgttccaaatagctaaattctaaaattgacaggatacaacttatcaaacatacaaaacatatattttacatggtagagaaaaataacgaaaacattcttgagatgatttgatttttcataaattaaatgaagacttgagtcaatttataaattggcaagtagaagtaacagcatgttctttgaggccttataatttatctactgaaccataattttataaatgagtatccttttgatacttccctttggaacactgcatatttggcaaaatgtttgggatcttttacttttaaacatttaacacacacggtgtagaatgtgagcaattcattgttgaaaatctgagagctgcacagtccctatttttcataattcatatgcatgccttccttcttttcggggtggaattgtaattgccagctttggttatttggtacttttttcttagtaggtcttcagctgtttctccaagaatgttatagttaatggcctcaaggtttgctttgatatcaggctgcacgtatttacagagactggaagtacgtgagcagataggactcttggcatattaacactataattcctttagtggaaaaacttagacttaatttgagcagaacatcaaacctatgcacagcacacttgcatcactgctgcaaaaatcaatgtggctttttttataaataaagaataattaaaagacaagccagaaaatttctctccattttctctctcttggtctgtcggtattagtctgctccagctactataaaagaaagtctcatagactgggcacttaaacgcacatgtttagttctctgagttctggaggctggaacgttcaagatcaaggtgattgctggtgaggcctctcttcctggcctgcagagagatgccttcttgctgtgttctcacacagagtagaaagctcactctttttttttcatcttatcaagctttccaatcctggcttgtgacctcatcctcgtgacctcatctaaccctaatcaccttcgaaaggccctacctccaaatacgatcacattgggggttaggggttcaacatatgaattttttgagaaacacactttggtccataaccctttctctctctctctcttttcccctaatgagccactccaaatgcaaagcgaacttctgaagtaaaaatgtagccatctgaacttgactgatgtttacaagttatggtttcctgggtggtgaagggcctgtcttcccagctaagaagatggattgtcttgtttcacagccagcatcaaaggcactggatgggatgccaaagtttctgatgagaacatttcacttaagataaaaggcacttctaaaatcctggaactctgttttgctttgttttgtttttcatttaaattttcagtaaagatcaaagctgtcaaaaatttaattcaaaaactcatcattcatccatgttgtctctcaaaggccagttcctttatccttttaccatttttaatcagtatgtctcatgcccagcacaatcagaggtgcagacccactaactccatcgctaagcagaggtcttagtaagcactggcccgtggtgtgccacggaaacatagaagtaatgagaaaggtggagcgagagcctcacaaggatcttaccattgtcggtgtttcattgtcggtgtttacttttgacttcttgacctctgtgaaagatttctggtttacatgattttgtgtttgtaggttttttgttttttggtttttttgtttgttttttaaagaacaaatgacttattttatgtgcttatttttaatatttaaaaaagaagaaaagatgtctgactgtatcgagagtagacaggttttataggaaatatctaaaaacaactacataaaggttaccattcttttgaaaggaaagcctttctccttcaaaatccattaatttgtttagcacttattttaaaaggaaactgaataaatgcaaatgttaggggatgtatatgtgaatgtggcattgtccaagtaaacgattcacagaaaaattaggaattgttgaagaacaccttactgcagttcaaaaaagtgagtgccatggattaaataacaaatattaaaaaataaatggaccgtaagttgcactattagaaagaacactttctgtttgtgttatttttaaaggggtgcgataagacagaggaaacaaatttttccacttattgtgttccaggtaccacacacccacacccgcacccacacccacacccacccacacacacacacatatgtatatataaattatattttgccgtattttagtaagtgagaacataaaagtgagaatttgaaaaattataaaatattgtatgacatgggacgagaactgagacagtttagaaaacattttgaagaataaaacaataatataagccaattataaaagattttcggataaaaatgtgttgtatggcatatttgttctgtagaatattgatgggttctttgaagagaggatgccacagtgaagtagtttagccaacccttaactaaacatgtatctttactgtaggaattttccaattccattaagaggcaaacgtctattctctatataataatcatgattcttgaacgtatttgaccactgaacaatatttttccttgcagcagatcaagaagtgggtattaagacattttgggaaatactggtttagctgcctcaaatgcaggaaataagatcacttataaccatgtttatgtttttttttttttaattttaaaaggtatatttagttatagcaaagaaaaaggaatacttaactcatggttttgttctgttttgagaaaatactgaggagatttcattagcaaattaactcttgtagtaaaaaagattattggttaaaagtcaagtgattgaattttttcctgattccattactaagactttggacaaggtgagttaacatctgtcagccccattttccacctctgtaaaatgaattggccatgttagggctctcaaaactcaactttctcaacattcatggagctaaattctacctaattttccgaatgtccttgacaaaccaaatctagataagttaatttattcaatcagtcacctcccaaatatttatttacctggtggttttcctctgctgtggcacttccaagtacatctgttcctatggggctgatgggctggggaattgggagagatgatttaggaaacaagtaaacagatatgtgaagaaagtgatttcatatatatatatatatatatwtwttttttttttttttttgccacagtgtgtcactgtgtcacccaggatggtgtgcagtagcacaatctcggctcactgcaacctccacctcccaggttcaaatgattctcctgactcagtctcctcagtatctgggattgcaggcagccgccaccacacccagctaatttttttatttttagtagataggaggtttcaccatgttggccaggcttatctccaactcctgacttcaagtgatccacccgmcttggcctcccaaagtgctgggattacaggcgtgagctgctctgcctggcctaaacaaggtgatttctgatagtgagcactactttggagaaaaaaatctaaaatgataagatagggataggagacactttatgatatgctgcactctagatttagagaactgaatgcatccactcaagagtttttaatgatctttaatagttatctactagaactatttcaaaattggtgaagtatatttttatcatgaatgtggcattgtcttaaagataagaaaccaaaaataagttcttttatgaacagagaaatgtaaatttgtagcatttaaacgtttacagtcagaaatgctttcattaaacaatttaattattattttaaaaagaaggaatagaaataccttaaatctgtaaataatgctaagattttcaaacagtaaaataccaagcttgattgaattagattgtggaaatattttgattgcttacaaggctgaaaagaaccatgccaggtaactttcagtatggcaagtgaaaaataaagatttcgaaaaatattccaaactgtttattaaaattcataaactaacttttgtctgtaattttaggattacagacaaattgtacatacagaaaagttgcacaaagattttccctatttctcccccaacacacacatacactttcctctgttattaacacatcttgcatttrtgtgttacatttgttaaattggtgaagcaatattgatacgttattattaactacagtccatagcttccattaagcttcattctttgtgttgtacattctgtaggttttgacaaatatctaatggcatgtatccaccgttataacgtcatgcagaagagcaccactaccctaaacataccctgtactccacgtactcatctctccctccttcccctgaacctgtggcaatcactgatctttcactgcttctatatatagttttgctttttccaaatatcttttagttagagccagaaagtatatagcctttacagacagactttcacttagcaatatgtatttaaatttccttcatatctattggtgactcaataattctttttattgctgcataatattctattgtaaggataaaccagagtttgttcattcacctgctgatgcattaatggacatcttgtttccaggtattgtccagatatgaataaagtgtgattgctggattgcatggtaaatctgcttagttttgtaagaaactgccaaactatcttccaaactggtcataacgttttgcattcccaccaggaaggaatgagagttctttttgctccacattctcactgacattggctgttatcagtgttctgaattttagccatcaactaggtgggcagtactatctaattttgttttatttctgaattccataatgacatatgatggtgagcatcttttaatatgcttacttgccagctgtatttatttatttctttatttttcctttggtaggatgtctgcttaactmttttgaccatttaaaaatgggtcccttacttatgtgtttctgagttgcaagacttctttgtatatcttggatactactcctttatcagatatatattttgtgaatattttctctctgattgtgactcggcttttcattctctggagagtgtcttttgcagagcagaagtctttaattttaatgaagccctgcctatcaattatttctttcatggattgtgcctttggtgttacatgtaaaaaatcaccagcaaacccaaggtcatctagatgatcttatttgttatcttctccatgttttatagttttgcattttatattgaagtttatggcgcatttttagttgatttttgttaaggatgtaaactgtaatgatttattctattttttgcatgtggatggctatttgttccagcatcattttttgaaaagatgattatttctccattctattgcctttgcctctttgtcaaagatcagttgactgtatttgtgtggatctatttctgggatctccattgatttgtttattgtctatcttatctttttttttttttttttttttttactaataatcacactttattactgtgacattatagtaagcattaaagtcgggtggtaccaatgatatttgttctccttcagtgttgtgtaggcttttctgggtcttcttcttctctatataagctttagaatcagtttgttgatatcctcaaaataactttatgtgattttaatatttaatttaaactttgttttgaccaagcaaaaaaaaatgtattatatattagattatttcttaaatattgtagtctactatggtagtctggggcccatgtggccaccttacagcaatcatagtgaaacacagtctcttatcgtggtgtaaaccatggtattatattcatggaacactgtagtcatttcttgtcctgaaagaggaaatgatggccctggaagaaatgggatgggggtggggggacggctatgaaagcagcaaggggcacaatttaggaccacagagtagaaagattagcatctttcagttagagaagattaaagctgcaagaacattttctgctttctacattacgtagtcaatttattgaatagcgtaatcctgctaagtagtagtgaccaagggtagaagatatttaattacagaaatctacatttaagggagatrataaaggtcacgttggtggttttggccttgtctctgaatgtggcaggtgtaaagtgcccrcagtgccctcacacagaatgtctgagatagccctgtatactggaggaccaacaagactcctgtataagtactccctgtatcaacctatagatggatctgctgggcacttgtatgcagaatcttcatttcttttgatgagttgatctttgctcttaataatttacatttgagtttttgtcaaatasatcagttaaggtaaacctaattaatcctttaccttgtaaacaaattctgcttcacaggagacttccgaagacagagacattgttcctgacttggtttcctttatgtcactcagggtccctgagatgaatgttagaatccatcaaaattgaccatgttttttttttttaatttggttcaaaaggaaatacccagtttgtcctgagtaatttcttttttcatctccaacccactttcctgcttacttttgccttttattcatgctgaagaaatgggcttttcttcttgctactacagctgcagttaggtaaatggtttttgtttcagtacttaatatgggaagtaattggtgaaggactttagagagacagtatgtattgtttagaggtatttcctgactcctcccagaaatcatatatgtgtgtgtgtatatatatctacacaaaatgaaaaactaaattgttatatatatatagatagatagatagatagattacagatggtgttaaaatttaagttccagttctcatatcttgccttttaaaaagtctcttaattaaatagataatgtgagatctatgttttagatctctagcctagaacataattatgttctagatctaaaacataattatgttttagatctctagcctagaacataatttcaaacacctataattaaattgtaaataaagtccaatttctctattatcaatataacatgaaactatatattattctctaattctatgaaaacagaaaaatataataaatatttttaaagagaaattcaaacctgtagactgtcttataggctttgtatttctaatctcccacagagcctgacatagttccatttaatgagtatttctgttgttgatgtatattcttttaagtgagagtaacaatattatttttttaattgactgaggaaaagtaaattgtgtttgcatttaaaaaaaaacctttcatatgatattttaagagtctccaaataaggataactgcataaataaactagtaatttatttgcttagttcaaaaatataaaagctaataygtcaacttattcarttaatggtttgctgatggttgatagacacagtaaagacaaataatacaaagagtaaaacatctgaggatagcactgtccagaggaagattcctcagtataacgaagggaggaaggaactgaaaatatatatatctgttaaattatgtaataaatgtatgctttattgcttcattggaaatataattggccatagtagagatttgccatacacttactctagcttttccagctgctaattagaggtggaaatgccatcttatttttatgcatacttcatatgatccatatttttaaagtatactttaaaaagtacattttgtgattctggccaaaatagagactataatctgttatattactcatttagagttagaaggtctgatctccccattgttcctgataagtacaaatgattttaatattggtaatcaagagactgctttgtgacgcaattttattctcatcttgtcttcttaaaagttgccactatctgcctcatgagcaattgtgagtaaatggtcagaggatttatgcttttgccttgctattttaaataccgaggtatgataacaaccactctcttagttttcttttattgttaagtttttaaaaatcaaggaatggtgtgtataccttcctcttcggttgagaatggtccagagaatgtcacaggaatacataacattgcagaggcaaatttccatatgctgcagaattaaattctagacaaatacacccatttcatatgaagagataaaggaaactagtttggttatattcggatagtcaaagaaacttgtggaacttataacgataaaataataatataactgcaatcatcataaaagctatggagaattgcatgcttaagttgtaagtgtgcagtttgtccctacttctagcagatttgcatattaaaaactgtacattctttgctagccaatatgtgctagcaaatactgacactacagacacataaaattggtcaatccccacattagatttatatggaatttcacagatgaggacactacaacttaagtaatacatgctcaaaatcaagtaggctgtggggtttcaatatcagtctacctaattctaatgtctggactctttctattatatcatgccactttccaaaaattccaggaactatgtacaaggtaaactacatagttgattaatccaatagttaatttttgcagattgtgtattattcatgtctctatattgtcttacctttaatattcttcaaaaaattaagtatacatatgtgaatatgaatttttttaaaaatttattcatatacgtatacttagtttttaaaatttaacattttagcatttaacatttattttatgtacataatatataatagctaaatagcatttaatatatgtgaaagaatagctgctgaaatgcttagcactcaatttcattttttttttttagcagttccagtaatttttgtgctgcctattcgagagaaagataaaaattagatttggttattgcttatgtattttctgctaaccgtccactcttaccctaggtagcttagagccaactctaatggtgtgactttcattgcttaaggggatggaaataaaagcagaacttggaaaatatgggaagctgactaaatcaacctgccacacgatgaggttgagagcatggtggcattggcctgctaccaccacttagtgagaacttctaaaaacatttgcagtggacattggtgtgtgaaaaacttctcattcaacatactagtaaagataatcaaaataaaatacagcattgaaaattataggaaagttctatttctgtttactcattaggaaataaggaacccacatttttgttttaaagtaagcacgctgcattcagtccccatctattcatcttatctacttaaagtttaaattatgccattataggtgccatgtaaatttggggaaaaatggatacttttaagatgtgtaatcaaatctagaaaatgaggtgtctagctttctattgctagaattataatactctctctgtcctttctcgatgcttccattactaagcaagtactaattagagaagagcaatggaaaagaaaataattagacgtgagatgaagatatcttttacaggaatgtgactgttagattttaacctgcttcactatttatctgttaatccatgcccttcagggtgatgccattgctttcccctgagtgattgttactgaaagtctctctcctcccatattagagtttttcataatcaagatggccccaggatgcgcagtcacactgacctgaccagattttttgccacgtagattatcttttctaaaacagcgctttggattaagagacgctgaactcaacagtcttcagcagtctataaaagataaatggttcagaaagtttgacacacagccttttctgttgtatgcttaagtaaaggcagtcctgcggtttgactcaccttgttctttgtgacaacctgccgtaatctgccttttctgcttcatagactacgtgaagcacagtgataaaaagtagttctggttctcagggccccctggtgggatgacctgggtgcagagatcttccagatattgccaaccataggaattcactgggagtgcttcagggagacctacggtgctgctgtttgtgaagtccatgtctcaaatccttttgaaccccgctgtcaatattactgagctctgtgtcccctgctcagtctgtctttcatttgtatctgacccggtagggtatgttagaataagtagcactctggtgtccggagggggtggctcaaaagcttgctggtgtctacctttggcatttaatgttaagtacacttatctactcaaaggtggtaggaaaactaccttgtttttataccacaggaaaaaaactctagcagaaaagttacatatattttaataaacacacacccatacacacacacacacaaacacacacaaaaacctcagggtatatacattttgactggattctttcatccattacaatcattttgagattcatctatgttacagtgtattttgcaagtgccttcctttttattgctgaatattatttcattgcataaatatatactacagtttgtttatctgttctgacatttgggtttaaataggttttgacgagtacatgtaaagctggacatttgtatacagttctttgtgtagtcatgtgcttttttttgcctcttgtgcaaatacttccctgcgaaatgtcctggtcccaaagaaaatggcaatctcttctccaaagtagttgtaccattttccatttagaccagaaacatagatgaattctagttgttttatattcttgacaacacttggtttggtctaccttttaattaaaaggtattcaatttgacaggtgtgtagtagtatctcattgtggtcttaatttgcattttcctaatagaaartaatgctgggcatcttctcaggtacttatttgccatctatatgtcttctttgctgcagtgtccattcaaatcttttgcccatttttttattgggttgttttcttcattttccactttttattgggttgttttattttttatttttatttttggaaacgtagactcgctctgtggcccaggccggagtacagtggcaggatcatggatcactgcagactcaacctccttaggctcaagtgatcctcccatctcagcctcctgaagagatgggactacaggcacatgccaccttgcttggatttttattatttttttattttttatagagtcagggtctcgctctgttgcccaggatggtgagttgttttcttaccattgagttctgcatgtgctacattacagacataagtcctctttatcagatatataacttgcaaatgctttatccaagttcgtgacttgtcttttctatattttaatagtatatttcacaagcagaaagtcttaaatttaacacatttaatttgtaactttgctcttttttttggtcatgctttggggatcttagctaaaaagtgttttcttaacccaaggtcataaaggaattattttgttttcttctagaagttatatagttttaggttttaaatttaagactatgatcaattgtgtgttaattttgtatatgatgtaaagcagaaatcaaagttcattttttgcatatcaatctctaattgctacagtatggtattttgaaaagactattcattctgcactgaatagcctctgctcctttatcaagatcagttgtcaacatgtttgtgtctgtttctggagtcttctgttctattgatctatttgtctgtatctgtaccaataacgtactcttttttacggtagcttgattagttctaaaaatttagtagtgttctctaactttgttttagatattccaggtcatttgtgttactctataaaatttagaatcactttgtcagtttctaaaataaataaataaagcctgttgtgattttgattaggattgcaatgaatctatagatgaatttggagagtattgatattttgacaacactgagtcttctaacctgtaacataacatacttcatttacttgaggctactttatttcctctcagtggtgttttgttttgggttttcaatgtctcttctgtttctttctgttgtttggtcagatgttttcctgttttatatttttttaaatgatgtggtaaatggtagtgttaacgttttaatttccaacagtttgttgctagtatgtagaaatacaattaattttgtatattgagcttattctcttccaacttggctaaactcacttagtacttctggtaggagttcccataggattttcacatagaaactatgccatctttgaaggaatacagtttttcttcttctttcccagcctcgatgtcttttgtttatctggagttcttaatttggaattattgcattgactaaaacctccagtacaatgttgaatagaactgataagagcagacatcctcactgtgttcctccttttaaggggaaagccttcagtcttttaccgtcaactataaagttagctgtaggtcctccatagattctctttatcagggcaaggaagtttacttctcttcccgttttgcatcacctctcattattggaatgtactctacttgatcataatgtactttttaaaatacagtgttgaatttcatttgtgaaaaatgttaattttttatctgtttctgaggaatgtaatattttatctggttttggtattatggcagtggtggcttcattgagttggaaagtagtcattcattttttgtttgtttatttgtttgtttgagacagaatttcactctcttgcccaggttggagtgcagtggcgcgatctcagctcactgcaacctctgcttcctgggttccagcgattctcctgcctctgccccctcatgtagctgggatttcaggcgcatgccaacacgcctggctaatttttgtatttttagtagagatggtttcaccatattggccaggctggtcttgaactcctgacctcaagtgatccacccacctcagcctcacaaaagtgctaggattacaggcgtgagccaccgtgccaggccagtcattcctttttaattttctgctaaagtttgtgtagattcatgtaatttttaccctaaatatttgctagaattcactgaaaggtttttacaaaatcagtctcttcaacaaattctattcaggttattatctcttttttattgactgactatgtctttcaaagaatttgtscatttcatccaagtagtcaaatttactggtataaaattgtccataatctgtctttatatttttaatatctgcacaatctgtagtgatgtaacctttgcctttgctgatgttataatttatgtcttctctctctgcctacatgtttatctattgtactatctcaactaatttgctgttgatttttagaatttctgtctctctttctctctctctttttcttttttgctttttacttcagtattgggtaaattacagtctgtagaccaaatttagctctgtttttgtaaggccttgcatctaagaatgatttttacttttttaaagggttgtaaaaagaaataataagaatatgcaacaaaaccataggagacttacaaagatgacaatatttattgtctgacactttacagaaaaaatttgtccatccctgttttatataattgattttgactctgatttactttctttggatttaatttgttcttctttatttagttttatattatagaaaatgtcattgatttgagatcttcttttctaatataggtatttattgcattcctcgtcagtttctgttgaccacaatatctggatatcagatattgtgacttatgctttgtggattattagatatgtttttttctcttctacagatatttttggtcgttgttctgggaccgagttaagttacttggaaatagttttatccttccaggtcacgttgttggttgttaggcagaactggaataagggtcagtctaggacttactgttgcccaccagaggccggccactctgtgtattctactcaatgctctgtgaaccagcaaggttttcagtttcactggtgggtataagaggcactgttccttaccctcgtgggtccctgacactgttatctctaatccttttgggtaggttctttttagttttctcacatgcataaacttgaacaagtctttgcagatctctgacactctgtctctgagcacctctcaccaatattttgtcctgtgaaatttggaggccatcgtctccctcaactctcagctttatctcctcactttagccttaggccccagcctggaaacgctctcaaggcagtaagttggagtaatgttaagactcaccttatttgtttctgtctcttagggattgttagttttcaatgcttgatagccagtatcttcaaaaccattgtttcaagtaaaataattaccaaaaaaatatgaatgagcttgaagctctttttaaaagaagaaatagatcatttcagcaatgtaatgggagatttctaaatctatttgtctcagtgaaataagagggagccatagataaaatttaagcaataaaattaacaaatgctatataaaaatatatatatacataagtactatatctgacacaaatttataaatgtgatattcatcacaaataatacattctctttattcaaacacacatatttaagtcataaagcaagaatcatcaaagccaaagattaatttcttatacccagtattctttgaatacaatgaaatgaagttagaaaacttaactaggtcaacccatattgaaaattaagaaaacctcttaagtaactaatggatcaaagaagaaatcataaaggaaattagatggtattattaatgtagaaaaatacaaaataaaaaaaaattctatatactaaaaattgatccttttacatgtgtggctataatggctcttcaaggaaaattggtgagctttatttttttttcatcagaaaggaacagaggctgaaaattagtgaactaagcatccaacataagatgtcagaaaaaagacaacagaaagaacytaaagaaaatggataaataaaataataaaaataattccagacatcaacaaagaaaaaaataaaataaatataataaatataatagtttgctctttaaaaagcaaagaaaatagatacacatctcacaagactgatcaagaaaaaaatactaaagacacaaataatattaggaataaaaaagtacacttaacaaatataaatctgaaattaaaatgttgttaaaggatgatatgactacaaatactaggaaagcaaatttagaaatagatatagacacatatatagatatatgtatatatccatagatatatatctcacaaccctctaggatttattccagatatacctgtctggagtaacatgaaatagtcatgttatgtaaacataaataatcaataatgtaatttaccatattgacagattaaaacaattacatgatctcagtagatgctgaaaaagtattttaaaaaatttctcatgcagtcatggttaaaaacgtatcaaactagaaatagaggactttytttttcttgtttttgggkgtgggggtatgggggcaaggtctcactctgtcacccaggctagagtacagtggcacaattgcagcacactgcagcctcggcctcctgggctcctgtgatcttcccaccatagcctcccagggagctgggactacaggcatgcaccatcacacctggctagctttttttttttttttttgtagagacagatttttcactatgttgcccaggctggtctcgaactcctgggcacaagcaattcatccacctttgcctcccaaagtgctgagattacaggtgtgagccactgaacccagccaaattttcattaatctaatagaaaaagatctatttaaaaactgtggaaaatacggcaaaaatgctcaaaggttatttttaagattgggaaaaaacacgattatattcattatgaccagtccactgaaaggaatatggctagtaaaagaacaaaagttattgtctttgttttatgttgttacaacagaataccacagcctgggtaatttacaaagaaaagagttcatttggctcatagttctgaaggctggaatgtcctagaacgtggcaatggtatctggtcaggacctttctcctgtgtcataacatggcagagggcaagagcatgccagctaagatctcctttctcttcttataaagccaccagtctcattatgagggccccactctgatggccttatctaatcttaattacctcccaaaggccccacctccaaataccatcaacatacgaatttggggattaagttwccaacatatgaaatttgagggacacattcaaaacatagcaagtttcaaggttggaaagtaagaacctatcattattcatagctaatgtgactacaaagctcaaaagaatataacgataagtcatataaattcataagagaatgtataactttgctgaataaaaattcagcatactgaaatcaattgcatttctgtatgctaacaacaggcagaagatgtgatttttctaagctaccatttaaaattgcgtgcatcaaaaatatgctgaaccttggaataatctaacaaaagatttatacggcctttgtgaataacttgacaaaactattgctagaggttaagtaaagcctcagtaaatggaaagatattccttgaattacgaacaatcagttcttttgttaatcattgcacaatgtattcagtcaccacaatatgcaatcagcaggttgactcattatctttacttgaaaaggatgcatacttgttgctattatcagtttgtttccctgcactcaagagtacatgatgggtttcttaatttattttgcttcaagcctacccttgggcagctttctgtgtgtagccaacatctgccctgattcttaaaatgaccattttcaatgctagacagaaagtgccgtgatttatctatgttttctcagtagtgaacagggaaaagaacagctgatatgtgaggagcaattgtgttgtattcggagttattccaggcgtggtcttcacctcttcacatctggaatgggaggccctggggcctggggatgaactcaggggagtaagagagcacagaaagaggtttctgaacagcttccttggttgtttgtggagctgcggtcttgtcctargaaaattctttaccttttggtgcacactttgtttctgtatagtgattatacagtatacaggactgattaccatggaagcattttgttaaagcacagtgaaatccttacctcttctgcctatcacgtttgagcaactgcttcaacccaaaccaaaagaaactcacttctttcctgcttgtgtgtgaactcactgtattcaggttccctggggcacatccattttcaaacctgcagcccagaaaggaatggagcctggatagaaagccagtgacaggtactatctgtcaagtccacattttcagagccactgttagtagtagtggggctgcttcaaggacagggcgaaatatatctgagtatctcggtgggcagaggggcatcataaagacgccatttttctctcaaccttcagaatggacaagggccaggccagacctccctgacccagctgygagggcagtgatgggggtgaccttggtttggctcagttgctctagtttccagcacgtaacaccccttggcatcatttcagctaataactaatatsatatgctkctatatgattcatagaatcacatctgttaaaagtaaatttacattaggaattaaaataatgcctccaaatcaccacagtgtgatagtttgctaagtgaaaattgacttataaaaggaaggtaaaacagggaatctctgattgcagagtctctgtagacgatttgagattgcacattgaagaccatatgtttctatgcgaatgtgacatgtatctaatattgggagcatttccagaaaatgctgtgcaatatgctcttcaaaaaaaccaagtcttaacttggtattagactgagccacgtttatacactgcagtttgtggattgtatgcacatgggaatggcacctcaaaacaaactttccttttagactgttaactccatttgtgagccracagcagatggctgaactggcacagaaattcttttccgcatagctctgtcatcactgtggtaaaggtgccagagagggagtgaccacagaccacgtttcttagggttttctaatatattaaataactttcctttttttctattgctcatgggtgaaatctctacaaaagtatttcataagtaacgtttttgtatatgttggttttagcagaagctttcttatcttgcaacattagaaatcatgtaggtttcctaaaattttaactgtttaaattttgcatatcttgcattattattttacttctataatccctgtcttctacacttgtgagcatgcttgcacacatacacatmcacacacacaccccttccatgaaaatgaatgtacagaaacaacttgtgccttatacttactaaatgcatattcagaaagttaaatgttgtttgatcctatgtaagtacacttaaaaaaaccccatctagtctcagatatccaatatacttcacctgatccaccactagtgccaccatgtagtctaccattatacttcctactcttttcttattactgtttctgggaaaccaggatagcaatgcaacttgctgttcctaggggagggtaagagctatggctactgctgtagtagcaaacaacaaccacacgggatggctaaggctttattccacagacccagtcatggcttctgcaaagccagaaaggggtggagaatgtgaggtgcgtctagaacctagccttaatataaaggtattatcattttaaaaatattaacaaataatcccttgatcccaaggttaacagtcttatacctgtgttatttaaacttctcatttattgcatcttttttcaagttgatgtcaggaataaagcatactaatcaggaagacaaaaatgtaataagcagatatttcttcwgatgagaaatatttatttagcattgcagacagtatataacaggttttcctattgtttttctaaaacaaactcgacttctacttgtcaacattaagctcttcctaatggttatttacatcaatccttggctttcatggatacttttttttaaagtgccacaagagagaaacctaggaataagattttatgaaaggagcaacctggactcttttttcctaccatcatattttgtgtttgcttggaaaataaaactaagcaaagatttctgtaatcagtagataagtatatcacgttagggattagaagccaaaggtaatcattaataatattttttaaaatcatcaccatgattgggcttgacaaggaggaaaatcactctagtttctatgtctgtgtcatgcggcaaatgacaacacaagagcttagagaagccgtgccttaaatctgccttagagtcactgaggagtaagtaaatgattcttccctccctagcacactgcatggtgcatagtagacacttaattatttgtcgtgtcaattaatcaatgagtcaaaatcccaggtccaccacttacttactatgtaaactttggcaagtgacctgacttcttaatgattagtccttttcaccctataatatttatcataatagcacctcattaagttattaagaaggtgatatgagataatatatgtaaactacttcacatcgtgcctggtgctaattcacagatcaatagcttattcagggtcttattaaacaccaacgttgttttgttttgttttgaaagtattatctgcacttctcacttactcgtggaaaaactatattgcaatcatgtagagtgaaagttgaagggaaacgttggccataatcagatgtgcttaaatatatgacagaaactgagttcagcatcacttgcatgatttgaaatattcttgcctctacttttgccactttctaccaaataggttgacacagaactaaagaacaaggccaagttagttattcacaaagaggatttagcaataattcaaacttaaatatgtataccgatggaagagccatgcaagagtcactataccaattagtgaggtttcaaaaaaaactatttcattaaaaagcaaaccctctacaatgttaatttaatgaatacctagatttagaagaacatttgactttgaatggccgaagtgacaccaggagtttttttttttttaatacattaggttgtggtatacatgtacagaacaggcaggtttgttacataggtatacacatgccatggtggtttcctgcacccatcaatccatcatctacattaggtatttctcctaatgctatccactcccatccccccaccccctgacaggccccagtgtgtgttggtcccctccctgtatccatgtgttctcatttttcaactcccacttatgagtgggaacatgcagtgtttggttttctgtgcctgtgttagtttgctgagaatgatggtttccaccttcatccatgtccctgcaaaggacatgaactcatccttttttatagctgcatagtattccacagtgtatatgtgccacattttcttaatccagtctatcattgatggccatttgggtttgttccaagtctttgctattgtgaacagtgccacaataaacatacatgtgcatgtgtctttatagtagaatgatttataatcctttgggtatatacccagtaatgggattgctgggtcaaatggtatttctgattctggatccttgaggaatcaccaaactgtcttccacaatggttgaactaatttacactcccaccaatagtgtaaaagtgtttctatttctccacatcctctgcagcatctgttgtttcctgactttttaatgatccccattctaactggcatgagatggtatctcactgtggttttgatttgcatttctctaatgaccagtgatgatgagctttttttcatatgtttcttggccgcataaatgtcttgagaagtgtctgttcatatcctttgcccactttttgatgtttttttttcccttgtaaatttgtttaagttccctgtagattctgaatattagcccttgtcagatagatagattgcaaaaattttctcccattctttaggttgcctgttgactctgaggatagtttcttttgctgagcaaagctctttagtttaattagatcccatttgtcaagtttggcttttgttgccatttcttttggtgttttagtcatgacgtctttgccgatgcttatgtcctgaaaggtattgcctaggttttcttctggggtttttatgattttaggtcttaacgtttaggtcttgagttaatttttgtataagatgtaaggaaagggtccagtttcagttttctgcatatggctagccagttttcccaacaccgtttattaaatagggaatcctttccccatttcttgtttttgtcaggtttgtcaaggatcagatgtttgtagatgcgtggtgttatttctgagtcctctgttctgttccattggtctatatatctgttttggtaccagttccatgctgttttgacaccaggagattttttacaagtgattttgtaccacagaactacacagttaattttcagaagcaatactctattagatatctgccagttttctacagggaaatgtctagacattggtattcaggaagaatttcattatggtttgactatrtattttttattcacaaacctttaagaagttcacttttttcatccaattttcagaacaatgaattaaactttagaataaggttggataaatacttatcaaggcagaatcctattcaagtgttatatccaatttacttgaaatagagaaactgagtaattgggacaaaatgcatagaattagagagcttttctgattttcttggttctcacgaaataaaattgcaaaaatcagagactactttttttttttttaatttatttttttattgataattcttgggtgtttctcacagagggggatttggcagggtcatgggacaatagtggagggaaggtcagcagataaacaagtgaacaaaggtctctggttttcctaggcagaggaccctgcggccttccgcagtgtttgtgtccctgattacttgagattagggattggtgatgactcttaacgagcatgctgccttcaagcatctgtttaacaaagcacatcttgcaccgcccttaatccattcaaccctgagtggacacagcacatgtttcagagagcacagggttgggggtaaggtcacagatcaacaggatcccaaggcagaagaatttttcttagtgcagaacaaaatgaaaagtctcccatgtctacttctttctacacagacacggcaaccatccgatttctcaatcttttcccacccttcccccctttctattccacaaagccaccattgtcatcatggcccattctcaatgagctgttgggtacacctcccagacggggtggtggccaggcagaggggctcctcacttcccagtaggggcggccgggcagaggcgcccctcacctcccggacggggcggctggccgggcggggggctgacccccccacctccctcccggacggggcggctggccgggcagaggggctcctcacttcccagtaggggccgccgggcagaggcgcccctcacctcccggacggggcggctggccgggcggggggctgacccccccacctccctcccggacggggcggctggccgggcgggggctgacccccccacctccctcccagacggcgcggctggccgggcggggggctgacccccccacctccctcccggacggggcggctggccgggcggggggctgacccccaccacctccctcccggacggggtggctgccgggcggagacgctcctcacttcccagatggggtggctgccgggcggagaggctcctcacttctcagacggggcggctgccgggcggaggggctcctcacttctcagacggggcggctgccggtcggaggggctcctcacttctcagacggggcggctgccgggcggaggggctcctcacttctcagacggggtggttgccgggcagagggtctcctcacttctcagacagggtggccgggcagagacgctcctcacctcccagacggggtcgcggccgggcagaggcgctcctcacatcccagatggggcggcggggcagaggcgctccccacatctcagacgatgggcggccgggcagagacgctcctcacttcctagatgtgatggtggccgggaagaggcgctcctcacttcctagatgggatggcggccgggcggagacgctcctcactttccagactgggcagccgggcagaggggctcctcacatcccagacaatgggcggccaggcagagacactcctcacttcccagacagggtggcggccgggcagaggctgcaatctcggcactttgggaggccaaggcaggcggctgggaggtgtaggttgtagtgagccgagatcacgccactgcactccagcctgggcaccattgagcactgagtgaaggagactccgtctgcaatcccggcacctcgggaggccgaggctggcggatcactcgcggttaggggctggagaccggcccggccaacacagcaaaaccccgtctccaccaaaaccagtcaggcatggcggcgcgtgcctgcagtagcaggcactcggcaggctgaggcaggagaatcaggcagggaggttgcagtgagccgagatggcagcagtacagtccagcttcggctccgcatgagagggagaccgtggaaagagagggagaccgtagggagagggagagggagagggagagaacactctttttcagagactacttcttttagatttacctattagccttatcatctcctgctgtggttataattgtacatttgtctctcctggagatggtaagaaccttgaagtcaggagcaaatgcttcttctccttctgtctcccgggccactgtcctagtacagagttatttatcaaagttaaatctctacattctatgcatgttccaaacttatcggaaagttaatttttagatttatcctcttaaaactttaaagatatttaaagatgcatttataatatgttataatgaaatattgtgtattatgtaacattaataatgtatttttatggcaatattttgctattagaagtagtttgttacttgtaatactctcacattttcttaaaatatcctataatcccattccatttaacatcagtctcttcagcgtacttttgtattcatctgtttcatttttcctggttttctttccattcctatgtctctttcataaatgactgccgagtgattagcttctgttattagacccaggtgtcctcacagcccgtatggggccaaggaggaatgatgatggatcgagacctgctgatcctgcagctgccagcgagactgagaggctccacgggaaatgctgcatattttccatgttgaccaggagctgcagagccaccagccctctctctgtgttctcaaatccctcacactttacttacaactgattaagtctgaaaataacttggattatctattacgtgctaatgtagtgacattcatcacacatttttataaacaagtgcattcatctaaagaatgggtccaaatgtgttgaactctgagaaaagatgaggcatcgtctagttacctattctgttaaaggtgaaactttttaaatatttatgcaaatattaaaacaatttcaaataccttggttatgtgaggatgggggaggtgagataacttttcttaactgttattttgggttgtgttttataatagaaatatttggttatttgaaatcctcttgcttaattaggcagattcatactaaatggttcaacaggttgcatctataatcttgtgrctaaaagtggttattttcaagtcaatatttggggttcctttttagagatgagagtttactaattcaatatttgtagtcacaagatacataagagtcatgtttaaacagtactgtgtgctttagaaataatcactgaaatcacaagttgttcttctaattacacctctgaccgagtccttagcagtctcaactggacagccagaaaatccagggatatccttatctgagagtagatatgttctcccccagtgatgaaaacaattcagtgccttcacaatggccagagcactgcttctcacatttttgggtctcttggactcaccagtacctttgaaagtggctgatttgttgagctgtcctctatggttaggaatttagtatccctgagattaggccaaccacctcaagccttttgtagatgtagtaaagtctaatgaactttatggaaagtattctgatgtggagattmatttgtctttgtgttgttgagaataagtgttgagctagttaggcaacctgcagcacctgcgtcccgctcacatgcaatctcaaatcatcaatcgaaatcgtgtgacagacagtcttgatgagatggcaggcatcaatcattttcagatttttgacacatacttttattccttccttgtgcagagaattagcattatggtgtgaatctctgtcagttcagtacttggcagttggcactgtcatgtgccgcagatgtgtggctttaagttttaaaattgtaaagtgtggatacggtgctctccattacccagacattcccctgaggcttccagagagaggaggtatcgttgtagctgtaacatagactgaaattggcattgagagtgtgacatctttctagtgaaaaagaagaagaggtgaagatagagtaatatgaacattttatacttgtatacattgtatacattttatacttgtatacatattctgttgagttttatgaaaacacctgattagataagtggaaaaatgacaaacagtcttcagaaagtgttatggaaacctctcatactcctgtttgctgctctggtatttcacagatggagcccaactattccattgtccttgctgcccttgcttaccctgtagaggttctttagcatcacgcattccagtgtgagatgggccgcactgctcagagaaagccaaggtgtgtggcagaatcactgtaattacttgaatctagttgcccttaagtgagaccaatcctccccagtttacccaggacgtttcctgtttcagcacttaaagtctcaagtcccagggcccctctctttgctggaagagttggccaccctcgcttcactcggcatggacttaccagttgtgtagccctctacctctgaaggaatggcaggcctggccttgaactgtgtagaagggtgaggagaagaaggcattatcaaaatcactggtgagcgataaaataggagaaataagagcagtttgatgtaattattatatattaagtttattacattcaaaaagtcaacttcttttaaagaatttaatctcactctgagtatgttgttggcataaacatattgctttttaagaaaatggtggtgatttaacaaaaggtatatttagaaaaaatgaactctggtattgttacaggcacaccctcagagatactacaggttagattccagaagaccacggtaaaacaaatatagcaagaaagtgcaacccatgagtgttttggtttcccgctgcatttaaaagttatgtttacactgtaatgtagtctattaattatgcgatagcattatgtctcaaaaccaacctacaggtcaggtgcagtggcccatgcctgtagtcccagcactttgggaggccgaggcaggcagatcacctgaggtcaggagttcaagaccaccctgcctaacctagcgaaaccccatctctactaaaaatacaacaattaaaaaaaaaaaagaaaaagaaaaaaagtagccaaacgtggtgccgtgtacctataatcacaggtactcgggaggctgaggcaggaaaatcgcttgaacccaggaggcggaggttacagtgagctaagatcaggccactgcactccagcctggaggacagagcaagactcttgtctcaaaaacaaaaacaaaatcatccataagaaacaactcttcatccattcaagtaatgagattgcagcaatttggtcacatcttcaggctccacttctagttcttgttctcttgttatttttaccacatctgcagtgacttcctccactgaggagtaagtcattgaaagatggaatccaaatcttctaattcctgttcatattgatattttgacctcttcccatgaatcatgaatgttgttagagcacctaggatgaggaatcctttccagaaggttttcaaagatctttgccaagctccataagaagactcaatatctgggacagctatagccttatgaaatatacttcttaaataataagacttgcaagttaaaattgctccttaatccatgggatgcagaatggatgttgagtcagtaggcataaaaacaaaattaatctccttgtgtatctttcgggtgaccagttgtattgtcaataagcagtaatattctgagctggagttctcaacagtgcacttaaaatattcggtaaaacacactgtaaacagatgtgctggcatataggctgtttttccatttatagagcatggccacagaaatttcagcatgatgggccctaggattttaatggaaatgagcattggctttaaaccagctgcatttgcccctaacaagataatcagcctgtccttggaagttttgaagccatgcattgacttttcctctctagctatgaaagtcccagatggcatcttgcaataaaaggctgttttctctacactgaatatctgttgtttggtgtatccaatcttagctagatgctctggataacttgctgcagcttctacagcagcatttgttgcttcacctcgcatttttacatgatggagacagtttctttccttaatcctcatgaaccaacctctgctagcttcaaccttgtcttttacagcttcctgacctctctcagccttcgtagaattgaagggagttggggccttgctttagattaggctttggctttagggaatgttgtggctgtttcgatcttgtatccagataactcagactttctccatatcagcaatatggctgtttgctttcgtttcgtttgtgtgttcactggagtagcacttttcattgccttcatgaagttttcttagcattcacaacttgactaacttgttggtrcagccaacctggtgcaaagcctgtcttggctttcaacgtgccttcctcactgagctttatcatttctagctttgatttaaagtgagagacatgcaactctgcctttcgcttgaacatttagatgccgtcgtagcattattaattggtctaatacagtatagttgcgtctcaggctatmgggaggcacacctgaggagaaagacagagacagtgtctaacaggcagttggcgtatcagtcggaacacatgtaacatttataagttygctgttttatataggcatggttggtggtgccccaaaactagacgatatttatgtcagtgatcgtggatcatacatcacaataacagatataatgatagtggaaaagtttgaaatattatatgaattaccaaaatgtgatgcagagacatgaagtgagcacatggctgttggcaaaatgtctcctgtggacttgcttgatgcacggtcgccataaaccttcaatttgttaaaaaatgcagtatcttcaaagcacaacaacttgaagcacaatgacaagaggtgtgcctgcatgtgcactctagcctgagggacagtgagaccctgtttcaaaaaaaaaaaaaaaaagattttaatgtggcattttatttgctttattttttataaaaagagagtagcagagaaagagtaacttgtcccttttcacatcaagaatatatgggtctctttctctagttaaaattcaaaataggaaaaagtatagtaacagggcaaaatatttctttaaactatggaaataaagtccccttaatattatctcaaaatatctgtttggaaggttagtgaagattctgctactggtctttcaaatagcagcatgtagagccctgtgcagggtaaaatatttggagagcaaattttagaaggaaaaaatttcatagaaataatagttggaaggaaaaaacctccccttggcataatggccttcatgaagctgtgtgtggggcagtggaagtgktggtggtggtgctattggatggaactgtagtaggtgacaagcaggtgtgggttgggggctgtcgtggatgttggtgctgtctgggccctgcctgccagtgtctcatgtggagggacaccattcacacagtgcgattccaagatttgctattggttatttattatgataaatttctgggataaagaagccatgtaacttcatatgacaaaatcagtaattcacagcaattttccaacagatggatataaagtagaattagggtgcctttttccaatttttcatgaagggccatatgggctagtgatggcatgggtttatactgatacgataatttaccaatccaagggagcaggaatggcagaaataatttatgtgcgtcctaaaggagaggaggattgaggctttacttagggcaggaggtataaacctggatgcctacagggctcaggagagagaggggcgcaggccaggttgtgtgctgtgttgacactgctcctggagaacttatcttcattcacatggagaaataaaacctttctgcaggggaagctgctgcttgtctctcactggttttggccctatggatatatagtctcagagttgtcttccagtttttcaagaggaattaataatttggaattgtatgtgaaatcttgtatgtgaaattttggagaaatgacttcgttttgtaatgcaacatgttagccaaagaaaccacatgcctggattaattctggttgagctgagccagcatttgtaacctttaaagagcagatggcagagttcttgggaaggaagagtaggggtgacattttaactacataggtcacaagactggcattttgcaagaaattgatcaatacttattgaatgaacaaatatctgaatacatcccactaaaagtcattaaagttttgactttattggttaacatgcattctcaaaaatggtggaggaagctacaaggggaacacatattccatactgagttgcagtgtcagagacaataaccccaccgctacggaggtctcagtcagcaagaaagaaaatgccaggtcaatcagacacgtactatggcttttaggaaaactggcctccacatttctagaaaaggcagggtctagatcctctgaaggaatttgatttaaggttctggaagaataaattccaactatttactgacatgtgatgatactcagaaagaaaaatggggtgatatctaacaaaaccaatttaggtggtgtccaccaagctcacattttgaaaggggaagtacaaatgctgaagaaatgacaagtaaccaaggataagtaggaagaaagatgggaagctgtaaaaatgttttcatagagcagaagaaaggaatgagctacagtttatgttgtttacagcatgaaagaatgaagggatggatacataaatgaaatgatgaagcgggcatattttattgtcctgtgtacttttctgagacctgaaaggaaagttaaacccactgtttaggattgatggttgatatggtttggctctgtgtctccacccaaatctcctgttaaattgtaattcccattgctggaggaggggcctggttgggagcgattgaattatggcggggcacagatcatccttgtgcttcttgtgatagaattctcctggcattttttttttttttttaatagagatggggtttcaccacgttggccaggctggccttgaattccagacctcaagtgatcggcctgccttggcctcccaaagtgctgggattacaggtgtgagccagtgtgccctgcctaaaattatttctaaaatcataatagagygatggaaaacctgaaacgatatatctgggcatcaacactgtgtcttctcttgatgtgtttgtaagtgaaggacccctggggtctgtattgcagtcactcacctgcctcccacccactcagtggctttaggtgggctgttgaaygcctccacaacacgagttcctgatgtgtcaagtgggatcaacacccttgcttaggctgtgaaggtgagtgtgtcagtgaagcagctggcactttcacacatgcaccttcttcatagcctttcataggacagcagagtgacagggggatttgtaacttccagaacttcacttaaatacaatggcacagttgaagtagaaggaaatctctagtggcatgtgaaagcactacctgtttagtttctttttgtttcagacattttccatctgcttgtacaaaacacagaaggaatgcatagcagacttggttctgagcttgcaggaacaacggatgccctgagtgacagactcaatatctagaattcagtttcagcctttatagttggaattatgcgctgaaccaacaggaggatatataacagaaacaaaggtgaagctgtttgctttcttttataaaaagctactgcacaaataccagatagaataaaattttttattgctcagaacttatgtacatgtataaagaaggtcccctttccacagcccatttgggcctggagtctgcagtttcagaagataccaccatactatgccgcttcccaagacagcaccaagaaaaaatgcagagaccccacatcacatcagcaatgtgcttataaaccatggaaaagagcataattatagaggcacatgataagcactggaaatatgagaagagacatcwttttcaaaagacctgacttgctctttaggacaccagaggacagaacttggattgatagatgaaaggtatagaggaccagatttctttcctgaggggaactttctaagacgtagagctattcattgataggatggactgccttgtaagatggcaaagttcttgctgttggaaagccttaagaagaaatcggatgttgacttgctgtgatgttgtagattggataccgtttctgataggccgacaagatgatccctcagtgttttccaacttttgttttctctgatccaggttagtttacctccattatcttggctatattgacatagatttccaagtacttaaattacctttctgtggttttacaggatttattttattctaccaaaacatatataaaatgtacaaaattattgagtttttttatttttttattttttggcttcctttgaaatttagagatcctgttactctagaattctttctagagtagggcttcgagcaaaagtttgttcttagttcccctttatattcctctcaaaaataaacaaaggaacagtacatgaagataaatttcatgcataaaattaatgtactgcaaatgctgaaaatctccttgacagagaaaaaccatcaccaaggccagacctgatgctcaggaggtaggaacttgcttacrgagtcccttccaacccggtactgctgcaacggttgttaaacatttttgacatctctccttaggaccctgtagtgctaaaaggarccatcgatatggaaggctttggagctggagagtgaggctctctgtgcgtatatgcccactggctatcggagctaccaccttccacgtccactgcttttgagggtccagaccttggctcaaggactgctgggtcccccgtgctgcacccgctcttccgtcctcattttcactcacacactgcatttatatggctggagctgttctacccttaagaaaatcaaacccatgatgttggattatgtctgtgcaattatttagttattttgtctacaataaaagagttagccattatatttaggaagttaaaaactggcagattttatagaagtacccraacacatacagatacgcacttatatatataaatgagggaatgccattttaccaaatattggcattttggttcaggamcttaatattcttggtcctaacacctggaggcaatgtgatttgttgtgtttagaacatggaatgaactagagaagaagagaaactccagccatgtagcaggggccctagcaccacctggtaccacccccctgctctctggcccaggaaccgggcatgaccattggctgccttctgtgcttggaggcacacctaccttggcagccgctcgctcctcctccatccagtccattctcctcatccctggagcctgttttaattgttccttcttctctgaagcttcaccaaggcttggttcctctttccaggaggagctgagggctttaatatcagagctgccatttcttcctttattcgtttgtcctgctgctagctcagcacttataagatacgtctgcacggccctttatttaccggtctcttttctcccgtagatagggagacctttgaaggaaggagctgtttcttattcacccatctttgtaagttctaatacacattcgttgttcagtaaatgcttttgaattactgtgaaggaaaggcagaaatgactgtgttcacagaacaagcagggcttctcacgtgtgcttgttttgctgttttttgtttgttcgtttttttgagacggaatctcactctgttgccaggctgcagtgcagtggtgcgatctcggctcgctgcagcctctgtctcctgtctcctgggttcaagtgattctcctgcctcagcctcctgagtagctaggactacaggtgtgcaccaccatgcccattaactttttgtatttttagtagagacggggtatcaccatgttggccaggatggtcttgatctcttgactttgtgacccgcctgccttggcctctcaaaatgctgggattccacgcgtcagccaccgcacccgacctagtggtgctgtttgaggaacaatttcttttttcacgtgggaacgttgagggccttgcagtgtggccagcgtcgcttgccctgcccacgtaaatgcccatgcccatcttggatctccgtctgtgatccaagcccgcagacctgtttgtagaccattgagaaacgctggggaagactctggtgattctctcagacagagctccattatgcttcttcgtgttcccttggcccatccacccagtagaaagataagaccttggagaccatgagcttctccttgacaggaaacacttccaaaaatcataacggtctgatctccgaaaaaaactttccattcatgttatgcacgctcagagatgaccaaaacctaacattgaaactgtagagaaaaccattgtcaaggacctaacattttcaaaacctaacattgaaaactgtagagaagaccattgtcaaggacctaacattttcaaaacctaacattgaaactgtagagaaaaccattgtcaaggacctaacattttcaaaacctaacattgaaactgtagagaaaaccgtcgtcaaggacctcacattttcaaaacctaacattgaaactgtagagaagaccattgtcaaggacctcacattttttaagaaatgaattttcagtaaatcttctttcttggattttgtgaagtccaaagaaaatcagattgctcatgtcttttttcaaaaaacaaaaataaaaaataaaacacaacaaaactttccatcataagcaaaaaagaacttatgctgcaggattaagtgattgacacgataagtaatactgagtggatggaaaatcaccgtagtcacaatataactcacacctcatatatttttctctcctgatcaatattcagcatagaaatggcactcattttccatgttcagagagaagaaaaggaagaaaacgaaagcatatgaaggttagattggaagggcggtatttcctgttagatgagcattgtttaaatcctggagtttgttaggtcataaaataatagaatgctttaaacatggaaatattattcatagcagayaaatagtattgaaaagaatgcaaggaaaagaatctgtgataatagggtagagttagagaaaaattttgatgtaaattattctttaaaaaaatgtaggaattgtgtagtcacatgattttaaaccataactcctctctttacttaggatgatattcattgtcagtkgttgttttcataaaccccaagcaagtcagtacattgattcattgcatattgcatagaaaactatttaaatctatgctartgttattttcttcctaagttcagtaaattagtgttgtgacagatatgtggcactgtagctttttcaattctgagattggtttttaatctatgatgcaaaccttgggcagttcaggggagtatcattgatttatgaatctcttctgcctcagtgtttaacaaagcttgtttgattttaatgggcaaaaagaaaactcttcttaagtaagatgtttctaatctcttgaagtattagtaccagagaccccaggcaaaagcaattctcaaaagctctctaggaggtagttttatatgagattatagcacatctaatattgtgcaaatattaaagaggtttaaaactcttaaattcattgattttttttcatcctaaggcaaatgataaaagtgcaaacatactgctttaggataagcctgtgggtaaatgtatcatgcaaaatatttacattaaaatgctgcatgacttaattttgcctgacttataatccctgggaacrctgaatatcatttcttcaaaaattctttctactttatgattcgtgtatttaatttgtcttctaacataactattatttttgtcttaatttgttgtaacttcaacaatagaggacatcaaaggatgcaagcttccttttgcttctaagcttcgtctcctccctactcagcattcattcagaggattagaatgtgaatgttwggattttacaagttattcatcctgcagtaaaggaatttggactccttctatgagcggcctctgatttgctggcttatgttttactgagctctgattggctattatgtgtgccgtcaccattagacatgaccacggatgtttgcaaagatctccattgctttacagtctctaagaataaggttttcaacaaatttataaaatgtatacaatttgtttgacttaytctttttcaaatatgactctttacctaaagaaaataatattttaaactgttacaaagtcacttctaaagggcataaaacttgcaaaataataacttgtaagttggcaataatgatgctaataatttcccctaaatagacatatgtacgttaaaaatatctactaacatgtatgttgtgtaaaatgaatgtgaaattcaggaagcttgttgggctgagctttcggggaagctgcaggactgtgctgcagacttagtttgtaggtctcaccagtagcattccactgtcctgctggattacagactgggcttccccatcttgttgtggtagagcctctgtagaccctgggaacatagaaaagagatgtctgaggcagcgttcccaatcctttgaggttaggtcactagtgagccattgacatttttatagtaaattgaggctgtttccgtcgagatgagttgaaaaatggtacaaagagttttaaattttacccaagactaagaaaagaagtgcagaggaaacgargatagtcaatagcacagagctcttaagaaagcatttggcaaccctaaatcccagaatcgataacttgtgttaaccagccaaatggagtgttasagaagaaaagctgtttgtctggctctctttacattcaaagagcttaaattgagagcctgaagtcttccaggagctgtggcatgagggctctagcactaataaagttgttgaaaacatttccttctgaaatcagtcatttaattttaaaataatgttattacttgtgtatttatggatttttttttccaaattaaaatatcctcgttctgcttagttcttaatgccagtttttttaaattaaattactgggaaatcacccagtggattaaagcaacagtagtaattttgttttgttttgttttgttttacatcagatgcaaaagttgaattagtcatactcactagtttaggacacaatattgccattggttcatgtgagacatttttgtcattttatttttatttttattcttccccttcatgccgatacacattccagtacatatacatgtacacatatacacttacacatagatacgtacacatatacacacatatttgtcattgtgaaatagaggccattttaattgtatataaggatcaatatttttactattttatatatactagagtttatagtgtgtgtgcaagttgtgaagcagaattatgaactgagcacctgtggaccccctgcgcacctgtggaccccctgtgccagtgcttagcaaagcattactgatactgttcaagatttccagtatctccttgtctacctgtattctaatgcatttactttacccctacaaataattttgkgttaatttgsgtttcttttcatgtggatttattgaggcataatcaacatacaataaactgcatgtatctggcatataaatgtttgtgaattttagtgtctttgtatacctcagtaccatcaccacagtaacgacagtaaacacagaaattccccaagaagttctctgtgctgctttgcggcaccttccccactctttcccagcctcaagaagctgctaatctgcttcctgccactctagattagtttgcattgtctakaatgtacttacatggaataatatagaatgcactccttactctggcctgttttattaaacataattattttaaaattttttcatgttgctggtatatttaatgtgataaaaacaaatgatcaggtaagtgggtaaacactgtggtaaatctacacactagaaagttgcacacctgtatacaggtgtgtagacttaccacagtatttgcccatttacctgttgattgacatttgtttttatcacatttttggctattgcactgttataaataaagttactctgaatattgtgtactaattattgaatagacatatgctttcatttctaggagtagaatagcttagtcatatgatcagcttatgtctcaattgtaaaaatcaccaaaatcttttccaaactgattaccattttatgttcccagaagcggtgcatgggagtttcagttattcccaaccttcaccagtatttggtatgattagcctttttaattttagacattctgataggtttgtagtagtatctcattgtggttttattttgcgtttccctaatgactaaaaatgttgcacatcttttcatgcttatttgccactcaagtattttctttgatgaagtgtttgtttaaatctttttcttagtattttcaatatgattgtttgctttcttactgagtttgaaaatttttatatatatcctagatacaagaatatatcatatatcaaatatgtgatttgcaagatattctctcaatatttggctttttaaaaaaatctttaaatttgaagtctttaattttttttattttgacagtcaaaataaatgaagtcttttatagatttttatagatttttgtattattatctaagaaattcttgtctaagcaaagattataaagattttctcttatgtttttttctataagtggtttttcaaattttcagttttagattttacatttattggtgagatccatttcaagttcattttttttttattatactttaagttttagggtacatgtgcacattgtgcaggttagttacatatgtatatgtatacatgtgccatgctggtgtgctgcacccactaactcgtcatctagcattaggtatatctcccagtgctatccctcccccctccccccaccccacaacagtccccagagtgtgatattcccctgcctgtgtccatgtgatctcattgttcaattcccacctatgagtgagaatatgcggtgtttggtttttcrttcttgtgatagtttactgagaatgatgatttccaatttcatccatgtccctacaaaggacatgaactcatcattttttatggctgcatagtattccatggtatatatgtgtcacattttcttaatccagtctatcattgttggacatttgggttggttccaagtctttgctattgtgaatcaagttcatttttatatatggtgcaagagatgcaagatatagaccatagttcatatttttataatggatagtcaattgttctagaaccatttgtttaaaagaccgtcctttatcaattaaattgcctttgatacttggtcaaaagctcaatggtcaacatatttttgaatttaccctcattttgttccattgatatatttatttatcttgatgtcaattccacattgtcttgatttctgtagctttacaatgagacccgaagtcagatggtgttagtcttttaattttgtactacattttcaaaatgtttttgcctgtttcaggttctctgcattgtcacatgaatcttagaattagcttgtcagtttctatcaccatcttctaagattttgattgacaatctgtagattactttggggaataatgacattttaataatgttacgtcttccaattccagagcaaataytgctccatttatttaggtctttcttctttaatatcactcagcaatgttttatacttttcagtgtacaattcacacaaactgtttgtaaatttatttttgcgtattttatatgttgatctattgtaaatggtgtttcttaattccaattttagatattttgtatattgactttataaccgagataattgttaagtttacttattagttttaatgacattttttagattctatagaaatttctatggaggcaatcaagtcatttgagaataggaattttctaatttttttctaatcttatgcattttatttttcttgacttattgcactggctatcagctccagtataatgttgagtggaagttgtaagacttaacattaaggcctcaatctcagagggaaagtagacaatctttcatcattaaatgtaatgttaactgtagattttcatagatgrtctttatcaggttgagaaagttctctatttttcctaatttgctgtgggactgtataagacagacttcagatttttgtcagatgcttttattttaaaccttatgagagtattatatttctctttttcactctcttaccatggtaaattatgtttgattttcaaaggttaaatcaaacttgcattcttgggtgaaaccccattcagtcacaatgtatcgttatttgacatattgttgaattctatttgttaacatttctgtgttcttaaggaatattcattttcggttttcttttctcacaatatctttgtcttgtttttgtatcaaagtaataatggctgaaaaaaaataaattggaagtattgccttgtcttcacttttctcaagcatttgtgtagaattgcttctttttctttcttaaatgtttgatagacttcattagtgaagacatctgggcctaaaagttttcttcgtttgaggttttttaatgcagtatcagtttcttcaatagacataagtctattcaagttttcttttctctctggcttgaaatttagtaggtccttgtgtttagcctttacaggaattgtaaaatttcatctaagttgccaaatttataggtagaaaattgctcagaatattctcttatccttgtggtatctctacaatgtgtagtgttgtcacttctcttgtttctgacattggtaatttgtatcctttctctttatttcctgatcagcctgacaagacagtataatttttattgatcaayaaaaagaacaaagttgtggtttcatggtctttttcctattgttctgttttctcaaccagtgatttttcaccttgatcgttattgttttcttttttcttcttgctttgcttttcatttgctcttcattttttgtttgtgaaggtggaatgtgaagacaattggaaacttttttctgtttagtcccaaaaaattttctttgyatattgctttagctgcatcccctaaattttgttatgttatgtcttcattttcattcacttttgaattttattaatttccattttcatttcttcttttacccaaggcttgtttagaaatgcattttcattttttcaatatttcataataaactttcatttcttttgggtaatacctaagagtggaatggctagaccatatgaggtatatgattagcctttcatgaaaatgcaaaactgtttttgtagtggttatataattttaaattcccaattagcagcacaatatcctggccaattcttgaaatagtctttttatttttaacaattctaataggtgtgtagtggtgtcttaatggttttaatttgcacattcttaatggttaatgatgttgcacatgttttcatttacctatttgcttttcatatatttttttttttggtgaagtatcttgaaattttgtggggttttttttttttttggttttttttgcttgtttgatcttaaaatgcttggtttttttttttttttttttggctttttgtatttctattacagttttaaaattccactactgggtatctacccaaaggaaaaatcattacatcaagaagatacctgcactttgtgtttattgcagcactgttcataatagcaaagatatggaatcaacctaagtgtccatcaatgaatgattggataaagaaactggcagatatacacaataaaattatatttaaccataraaaacatggaatcatgtactttgcagcaacatgaatggaacgggaggccattatcttaagtgaaacaagtcagatagagaaagacaaatagctcattttttcacttataagtaagagctaaagaatgtgtacacatggacatggagtgtgcagtcatagacaatggacttggcagggtaagtgggtggaagtaggatgaatgatgagaagttacctaatgagtacaatgtatattatatatattattcagttatgccaaaggcatacctaactgactacctaatgttgagtgtttacattagttgaaaaataagcatgctgatgaattatttacaatgaatttttgtgtatttgtgtatgtattatgtatttacaatgcaatatcttgcaatttgtctctcttaatttcctctaatttatattaggcaaatgttagtatattagtgattggaattggatgctaaagagcaaactgtgtaagcatcccaagcctattttcatttgaaataatgtattttccttattggtttgttaggacaatttaatgagataatgaatgttacgcacttgtattgtgcctaacacacaataagcccttattggggaaaattttaagtgagttaataatttgttgttgtgtaagtaaccacatcagaacttagagcattaaaacagctattatagtttgcacatggttttgtgggtcaacaatttaggctggttgagtggttcatctttaatcaactgcagcaacggacgatgaagagaacacttccaaagggcctaattcattcttattttccacaacagtagttctcaactttctttgtgtattaatattacagatgcttgggctcctccacccccaaagattctgatctttgatgaagagaagtaccacacatttatattattttaaaagctccctagacaattctaatgtacagcagaaccaatttactagtttactttatttttccttttaaaacaaatatgtttgtttcttatttcgtaattacacactattataaaaaaatcaatttgtgacttaatcaggaaatatttcttgagtgccaakgatgaagactgtgtaaagaataaaacaaagcttacttatgaaacacacttaaaaataaccaccttaaacattttggtgtattacctaccagtcttcctacttttataacttagtgttcttttgtgacaagtgcttcgtaatacacttaaccgtttattctatatttggatttttaagtttctttttcagtatttaagtactaaatgtagcatgctgatcaatggcattgaaaagtcacctgtttgtgttttttcaattcgtttttgctttcacaaatgttatatctttggcctgcctggattgatgctatgtttataaaatgtaactttcaaatcttcatratcacgccaataagctcagtaaaagacactcaacatcactaattattagggaaatgctggtcaaaaccacagtgaagtaccacatccattaggataactattatcaaaacaacaaaaaaggaagtaaaaagttcaacagggatgtagagaaatagaaattcttgtactttgctggtgcaaccgctgtggaaatcagtatggtggttccacacaactgaaatatagatgatcacccagcaatttcatttctaggtatatacccccaaaacctgaaggcagggacttgaacagatatctgtacatcactgttcatagcagtataattcatagtagctaaatgtccatcaatgaataagtggataaataaaatgtggtatgtatgtatataacatggaggccctttgttggcttcacatctatttggcttactttttgctgcygtaggcatttttcatmttctgatattattattcaccgttaaaaaggaataaaattttgatacatgctatgacatggaagaactcggaaaatattcgaagtgaaataagcagtcacacagaaatatcgtatgattccacttttatgagatactcragtagtcaaattcctagagacagaaaatagaatagcagttaccagggcctggagaggggtaggaatcaggaagtgagtgtttaatgggtatggagttttagtttgggaaaattaaaaatttctggagttggatggtggtgttggttggacaacaatgtgaatatgcttaatgtagctgaactgtgcaactacaaatgactaamaaggtagattatatatatattttaccatgttaaaaaaacttcagaaccaatacctgtatctatattcaattactgaactgaatgtagccagccacctcacttctccctattacatgtctgtctgtccttcccaggatatacatttacttgagacagggaaataggtgaatgggatgtatctcgaccatcctttgccttcttttcaatgctctaccctcaggagccatcacatgtyaaagttgaaataggacactatccttcargcagactactttcagtgrttgtgctctttgtagagagaatccccacgtttctccccaatcgagtgagtgtgtgagtttctgatacatctgttcccaagacatagggaaaacaaacacagtacaaacttaatttctwctagcatacctcattacctgtattagtgtgttttcatgctgctaataaagacttacccaagactgggtaatttataaagcaaagaggtttaattgactcacacctccacatgcctggagaggcctcacaattatggcagaaggcaaggaggagcaaggccaggtcttacatggagacaggcaggagagcttgtgcaggggaactcacatttataaaacagtcgtatctcttgagacttattcactaccatgggaacagtatcggggaaagtgcccccatgattcaattatgtccagctggccctgcccttgaygtgagaggattattacaattcaaggtgagatttggatggggacacagccaaaccatatcattacctatatatgaaatatggaagaagtaaatggttgaggctttattggtaaatgatatgctttaatgtttgaatgaaatgacataaatttagagaatatatgtgaataagcctactctccccgttgagtagatgctcaaataatcagttttacttgaatcttaactgtttaagtccaggttcaattccctcttttttttactgcaatgaaattttgagcacccctatcaaaagtgatatggattctttgaatttctataatctttactgttttttatactaatgcagcttttacataaaagcacaggcaatatatgccaacttttcatataaatatgtcttatttcattaactatactgagatccttttaaagaaaggaatgaggtcgtattcatgttttttttccccttttgcactctctttgtaactctttaaataccccagaattggcgcttaatagtgctcatgtgtttaagggaaattatgacttcaagcctaattagcataaaacaaaaggaaaaggccccaatttctagagccaataagtctagaactgtgaatatgtattgaatccttttggtttatttaaaatttttggctgtttgtcggtggaatgtgtgcatgaaagaaagaacagtgttagcaatgataaacttagcttataaaaagtcataaattatggttttctctattatagactgtgaatctcacctatgcttaaattggtcttatttctaggaagatgtcatttttaccagaatgttcagtttagggagatattcagctgaagcagtgagtaggggcaaagccaacttcataagcctggttgtggctcaatcaaccctgttggccagtgacatgaggtatcatgactgggactctatcacatccggctgtggaatgtaacttaaaaaactagcagcctaccaaaaattcttatggagttttgctttcccatttttcatggtcctatacatcttgtatgcctaagtcacgcacatttttcctggccactgctcctcttgatttccccagctcctatcccttttgcagaactgtccagccttggaatacttctatcaccaggacatcatagaacctgacccatgcccttccagggccatctccagcattagcccattgtctgctgtctggtgtgccctctttgttagctgcctgatggccagatttactgcagcatcctttctagctctgaagaccttacagcatccaaaatgaaataggttgagtagatgcgaagtcagattctgaggaattattgaaaagtaagatactttcttggtcttgtgacatttctaagtaaatagatttggactaaatgatctttttctggctgtataattttatgaaatgaatggatggagtggaaaatgacagttggcatctgcagttttatcctgccccttctatttttaagccatttccaaaaaagacttatgtcttctaattttgcagaagtcaaacatcaaaatacgttggctaccttttttgtgggtagtgaatgcccatggagaagtaaatctggtattaacatctcctgttaattaatcattgctatgttgaaggctgcaaaatagagttgctagataaaacacaagacaaccagttaaatttgaattgcagatgaacaacaaatttgaaatgcaaatttcactgagtgctttgtatcctaasttgcctaccctggcaaccctgctyttgaggcagttggtcatagcttggttattagtactttcctacaggcggccttacaataactccttaaactttctgaatcattagcacttttcactgaattaaccgaataaagccattgactcattaggtgtttccttgcyaaattaagccacttcaataactagttgcttatattgaaaaattgtaatgcagttagatcaattaccacttttagcacataggaagtcggtcgttagagttcatggctataagatgcaaaccataacaacagagaacaattatacayacttcatttgtttgtttttaaggaaggagaggcatataaggaaggaaaggattctttctaaacagatataaaaatttaacttttaaagtctgaaaaaacatttaaaaaatattattggattctgttgatcaaccaccaaaatactaattttgaaatattaccacatgaaaccctggtgatctactgtgaagacagcacaaagatcatttcgaaaaaccaattatataaatataggatgctggggaccttccttggcagtagttcctgtgaaamgcatacagattttacttgatcccatgttcagtataagacaacagtgtggcaagagtagaaaaatgtgcctgtgactttccctgcattaatcaaagcattgtcagaggaggtatagtctggaatagtgcaaagctctaaagaaatatttgttgaatgagtgaatgaactgttcgttgggttgatagtgaacatctaaaattcagtgtcagttctggacatacctttacttactaggggtgttaacacactaatgtgaccacaagaggacagtcaggggagtaagttgcctggagatgccgttccctgagagaacctagggagaattcctgggaatgagtcttcctggggatgtgcccacggtctttagctacttaggatcttgcatgtggaaatgttaaggcatctgtttaaattactctaaagggcaaaattagaacagtggtcagaagtcacaatgaagaatatcaaaaggataaacaatgtggtcattaaccaagtatgagtcacatttatacctctggataattttaatataattgatgtgttttactgcaccagctggcctctatgtagtccaacccatgtggaggtggggtgaaaaaggctgatgtttagaatcctatttctatcacttactagctaygtgaccttgtaagacattctctaagcttccctttactcaacccagaacatgggattactaatctctgtctggcagcattcttggggagaccagattaattctgcatgggaactctgtgttgtgtagtagacacacctcagagagcaagcgctacatggaaaccttctttgtgtcttgacttgggtggtggcgatatgactgtttgctacctgatgactcattgagttgttttgtgtacttctctttttgtcagttgtgcctaacaatgaaatgatttttaaaagtttcaaaaatttaaaacaaacaatagtatttacacagcagtaagatttctttgctaaaaatttgattttacatacccacgttcacagcagcattatttataatggccaaaaggtggaaacaatccaggtaatcattgatgtgtgaatggataaacaaaaatctgatgcagcggctgggcatggtggctcacgcctgtaatcccagcattttgggaggctggtgtgggtggattacctgaggtcagggatttgagaccagtctagccaacatgatgaaacccatctctactaaaaatacaaaaattagccgggcatgatggtacgcgcctgtaatcccagctacttgggaggctgagacaggagaattgcttgaacccgggaggtggaggttgcagtgagccaagatcgcaccattggattccagcctggggaacaagagcaaaactacatttcaaaaaaataaaaaaaaattgatacagtatatacatgcaacatgcaatagaatattattcggcccttgaaaacgcatgaaatcctgacacatgcagcaacaaagaccttgagacatgatgctaagtgaaataagccagttacaaaaagaaaaatactctgtgaactacctagagtagccaaattcatagagactagaaggtaaaatgttggttgctagggactgggttaagggggagattgagagttattgtgtaatgctttaatgagtatagagtttcagttttttaagatgaaatggctctggagattggctgcacaactgtggtccttagcactactgaactgtacacttagagatgggtaagatggcaaattgtatgaaatgtgtactttaccacaatttaaaaaataattttactttttacagcagaaaaaaatcattttcatttgattgcatgaataattctttctttggcctgagagcataggtcaatcaagattatttttaaggtatatatgtgatatcatctagattaaagaaaatccttcaaattatattttcttctggcatctagtgtacatttcttttaaagataatgtagatgctacaatatttaaaattaccttcactagatactcttaacctgaatgttctaaactccaggagttctagagatgtacttcaagggaaatccttgaatcttctgaaattttatgcaaaatgctgtggcatgtgtgtgtgcacagcttttcgaaaagataatccatagcttttatccgatccrcaaaggctytatgacctctacaagatcaggatcaagaaccacttatgtaaatgaacttccacagaagcccatgagatgcttgcttcgatgtctgggaatgttagaggtgtgtgttatcccctgtcatcccacacatttctcctaacgagtaattaataatggaatgccattaacttggcagacacaggtgttgtatcgcctgggtcagccctgtgcccagggctcttcgtcagtgactggggtgatggagtagagtacatggtcaccttgcatgaggatgtcgtaaagtcagatggggcaacagaacctagctgggtaggaatgggattctaaatgctcttgacaggttggagaaatgaacagaagccagttacagtgagggcagcaaggacaagagaacagtaaaaatcagaaaggaaacaaaggccagcaagtcttatggaaagaactggtcaaggaaaagccaaatgacagtcctaaggccataaaatgaaacagtggcagaggggtgggataaaggtaaaattcttaagattgaacctgctstggcaggggagcaatactaagagaaaagacccatttgttatcttaaataattgacatctcctctgtttctttatctgccaatgagttccaagcagttatttacatgccgccttctgtttgcgaagcaagatttttgtgtgcaaacacacacatatatgcatggtgtataagtgtgtacgtgtatgcatgcacgtgtgtgtgatcaagcgtcttggttatgtgctttgttgtctgggtatctgaaacttaaaagggatagttgtgggggatgttggagatttattcaagacagaaagacagtgaaaagaaaaagaatattggaacatgaggaataattgtctcaaagaatagaaaataaatggagagagatgtactatgccctatgaccaggcaggagagaacagaccctcccttgggaaggctttctcaccctaagcactgagcagtcttaagaatatgacataataattatttatagcctggccaacacggtgaaaccctgtctctactaaaaatacaaaaaattagctgggcatggtggtacgcacctgtagtcccagctatttgggaggctgaggcaggagaatcgcttgaacccaggaggtggaggttgcagtgagccaagattgtgccactgcactcctgcctgggcgacagagcgagactctgtctcaaaaaaaaaaaaaaaaaaaggaaaaaaattattattacttaaacaagttgagattatgtgtcgttagagtaacttttattttcacctgtataatagattttacaggggagaataacttagctatgtttctgattttcagattcctcatgctttgattagacccagatcagtgaagtcattgtgagctaatgattatgagttgccaggtacaaaccatctcccaggaagcatctttcacagctatttttctttgctacaacaaatattttaacamatctattcttatagcaagtgttttaaatctcaaagttataaatcagcaatctttcaaamcactataacaaaacttcaactgttacaggaaagttagttgcccttgttagcagagactatgaccttgttatttctttccagtcagggctttgttggaaaaagatagcctttatgattttctgttttcactatttcagttaccaagtaaaaagaacgctatggtcatcagaaaactttccttactgaatgattgtaaattttcacttaaatactgaaaagatggtatacttaatgttattaataattatgtaataatatggacactaacaaagtatttgctgtggttgtttcaaatttcattgaccctaaaggtatgtcagttgttttgaattcactagtttttaaaaattgtacataaaaccttcatgtatccagtactgtaaagtctcccattgctgcttttttttatatatatatatttttattataatttaagttctagggtacatatgcacaatgtgcaggtttgttacatatgtatacatgtgccatgttggtgtgctgcacccattaactcatcatttacattaggtatatctcctaatgctatccctccccgctccccccaccccacaattaccatgaacgtgggaacttaaacaacagaaatttcttcctttagacttctggaggtcagaatgccccaggcagaaaacaaggtgtcggcagggctgttgctcctgcaggctccagggacccattttcttgctgcaggccgcctgctttcctcagctcctgaccctgcatctggcatcctctgcttctggcatcctctgcttccgtcaccatggcacctgctaggacttcggccctctggctatggtggggaactggcctggtagaggcagggcatccarggaagaagctattatggtattacagatgttgagaggccacctggcctggacatgagacggtggatcagacagctgcagttttggttgacatgtgacatgagggaagtatcctaagttggtggcaaaaattaagatggtttggtgggactttagctcttatctttcattactctctctttgtcttcccgtctatattctcatacagactagataaagaaaatgtggtacatatacaccattgaatactatgcagccataaaaaagaatgagatcatgtcctttgcagggacatggatggagctggaagccattatccttagcaaactaattcaggaagggaaaaccaaacacagcatgttcttacatataagtgggagctaagtcatgagaacacatgaatacatatagggaacaacacacactggggccttctggaaggcagaggatgagaggaaggagattatcaagaaaaataactaatagatacttggcttaatacctgggtgatgaagtaatctgtacagcaaaactccatgacacaagtttacttatgtaactaacatgcacatcctgcacatgtacctttgagcttaaaagttaaaaaaaatctaatctaacaattacaatgtgataatattaaaaataatttcaacagtacaactttttccatacagcttacrcacagtgtaagtagaaagatttttgctgatctgcagtgcacaatcgaaatcagctccatgtgcttattcggcaagacagctgagataaagatcccttcaccacatccaagaaggcagctgatcctatccccctggatgtcagattcaggagcatcttctggatagagttgtgattttctggctcacgcctgtaatcccagcagtttgggaggctgaggcatgcagatcacttgaggtcaggagttcgagaacagcctgaccaacatggtaaaaccccatctctactaaaaatacaaaaattagttggccatggtggcaggcacctgtgatcccagctactcgggaggctgaggcaggagaatcgcttgaacctgggagtcgtaggttgcagtgagccagctgagatcatgccactgcactccaggctgggtgacagagtgagactctgttgttgtgatttgtttttgtgagattttgagttgggatttgctacaatctctgaggaaaaggggtatcattgtcacctgcgttttaaggtcagtcatgtctctgaggacagcggctgacttctgaagccagtctctgagacacataatgtagtgcttgatctttcaagatacctgactaaattacattgtttgtttccatttttttatgtttatttccttgatttcaataaattgaaatcagagtatttgcattaaaatatcttagttgaataactatgctaggaaaaaaaaacccagaatattatcatatgactgattaggacccacggtttttctcatgtacataagtaaaaaaggtcaagcaagatgggctgccctggcaccagaaaatataatctgataaaggaccactagaagattcacttgtctttcatggggcttggctgtttacagtcagtgttttcttctgaaggaagctattttatccctacccgkacaacagatgggtactctagtatttcataaaagatgacaggaaaattacattaccacaaatggcaaaagttgggaggtatgcaataggatagtttattgggagaaaatagactaatatcaaaacagaaagaacagaagcagaaataatgaatttgcctgcatcaatctcttctttcatgacctcatcatgcyggagataccgatcaatttcactacaagcaataaatattaaaatgaaattcttgagtgtcttatctaaagcttcctgacatcaattgttttcccagttttttccctgcaagcattgaatacctcttcatcaatcttttattccaacccattttgttccagtttctctcttcccacaaaaagttttttttccccttctatttttgacttttctttcttagcagagatgcatgaatattatttctttcttagcagagatgcatgaatatgccacagtggctgcatttcatcgatcaggaaataaaacgtggatttgaaaggtgtttcctgaccctgaggggctacaaacaactgagacatgtgtagtgatccctcggttcctggtagcagtgacggtgaagaaggccacgtgcctgtcaccacccatgcatttgcatcctttcttattagaaaggatcctgcataggccaggcatggccaggagaggggagtttgcaaagagcctttaatccttaaatgtcatctccacacaatgaccagcttgacaaatatttcaaaacatcttgaaagcaaatgttagggtcatcattcttgtctgtataacactcttgatctcacaatgtattaacaataaccactttttatatcgtaatagctgaaaggaacaaggttttcattttcataatcatcttcttattactagcggagaaatgtttgggagcatggatgttgttcacatctgagtttatatgaaaattattcaatgtttgcagtgccttccagatttttctgtgaaggtcatgtctccatcatttaggataatctccattgtattagcatgcaatagagcatcattaatcatgacatgtcatcaaactgtttttttccccttacattttctatagtcaaaggtatagtattttccttccaaattcagttcaggtcttccttctgtggcattttccacttccagtttcatttttcccatatatgcacatcttgtttgtaatacataatttattatgtacataatacataatttggtgcttaatttgctgcttagttatatctagttggtgttttttttttttttttttattgagacggtgtctctttgccgcccaggctggagcgcagtggcatggtctcagttcactgcaacctccacctcctgggttaaagcgattctcctgcctcagcttcctgagtagctgggattataggcgcccaccagcatgactggctaatttttgtatttttagtggagatgggatttcaccatgttggccaggctggtctcgaactcttgacctcaagtgatccacttgccttggcttcccaaattgaggggattacaggcacaagccaccacaccatcccgctagctggttttgttgttgctgtttcagatccatggtctcacaatgtcctcaggagctgaatgtgacctataggtgggtggggattggcccacagatagatagttttaaaaatacaaatcttgaatttaatgccaacattggagaactggttaattacacataaaaagcaggatttccattttcacttgagttaaacaacacacctggacacactggtgatcgtgtccatcggtagcatcagctggagtggatgtgctgggcctcagcattggcagcgtgcctgggcctttgaaacagttgctcttagctctgcctcgttggccataggcatttgaggttgtggcctaaccatgtcatttcagttttgttactagctaataaatcccttgaagtcagagattgtctaataattttcttcattctcccactgcctggcgtagtaccggacacatagtagttgctcagtaaattaatttgttcaaatacttccgttgtgtgcagctgagcatatactgagcttctcaaagagccaggggaaaacaattttcacacaattcacacaaattaaatgattaatcttcgcaactcctttttgagattcacaggggatctacagcacgtgtagggattaatttatggtgtggaaagaataacatgtaatgaaagtattcccagctgcacattcagggaagatttagatgcacaagaagtaattactcatattggaaattgccccataggggttaacaccagctgatcatttactagaaagtggcctccacagagaggggtgtctggtactctctccagccctgcagccccttagaaccatcatttcttgtgaaccagcattaccaaattacccgacaccctcagtcaggccatctctgaccattgtacatcttttgttatgtagactagggttcatttagggttacttcttgtagaattctttttctgacccatctttaattgtrtaagaatatttacaatatactatttgggagaaagggaacttatgaagattattttccatatatttaaaaaataatagaaataacccaattgtgtaataaggttatagaagatttggtcctaagaacttcttttttatttccattgtgaaatagtcaagggaattgagcaagaaaaagattaaaacatgtaaaagaaaagagatgatatcaacatgtcattaacatgacattaacatgtatatatgtaaaatatgtatctaaaacagatatagatactatagataggtgtatctatatgataaatgtatatatggttttagatatagaattttcagtatacttasaaatagttccaaaatcatatatattgtgacagataataatactttaaaatacaccaaaataatacttattcagcaatcaaatgctagtgacacagagacactagaagtcagagctgacaacattgatttaacaaaacttaattaggaaactaaaaaccaaaacatttttcttataagaatgtcatgcactcatagttttcttatcttcagtttatgcaaaattctagctaatatggctttttggacccatggtctaaaagcatttggaaataagagcgaagctcgttcaagaattatactctgacccagcaagaagtaaaaacaactggacattgagaaaagatcagaaacattatatgaaacatactcacaactttaaaaaaaaagcaatgataatttttttaaaaaattagaggtagaatggggaaatcacattataaacatgtcatgtttatcttcatctttctggatgtatcataatattaacttttcgaggtttggtaaaaccaagctaagtttcagtgaatagtggcctggcacttccgtttacaaagacactgagggcataattagccatgacatattggcaaacttttttttyccttttattttctatactctaagatgtagtgttttccttctaaattcagttcaagtcttccttctgcagcactttccacttstgctcccagttttatttctcccttgtgtgcaaatcttgtttgtaatacataacttggtgcttaggtatctctagttggctttgttgttccatatctgaggtctcacaatgtcctcagcagctgaatgtgacctatagatgggttgggagtggccctcagatagtttagaaataaatatcttgaattgaatgccaatatttggaaactgtttgattacatctaaaaacctggatttccattttcacttgagttaaacaacacatctgactaccctggcactcacatctggcagcagcagctggagtggaggtgctgggtcccagcattggcagcagggcctccaggtccccaggacccttgagacagttgctcttagctatttagtaatttttgtttatctggtacccttaagtctgtcttttccccatttgtgtgaaaagccagtggagtaacaaaatgttgaaaagttccccaagtcgttaaaagaggatcatatataagtgtgggggaagtatagatagatagacaggtagatggatagatagataaatggacagatggataaatagatagatagatagatagatagatagatagatagatagatagatagatagatagaactggatgagtcaagcattacattttagttatatggaaagtttttggttccaagaagtatgtttatgtgtgaaacaactttttctaatagccataggcagcagtgttaaaataaaggtaacatttttaggccagcagtggtcattaacaaagagggaaaagtttactacagtgaagtttccatttctatagtgtgtacataggagaaaaaaacagcataaataaaagatgaaaactgactatttagacgagtcatgagtcctgccaaaataataggggattgcggcaacataagagacgaccttcaatcacttaaataccaacaacccctgcaattcagaggtgaggaaaaggcctattccaaatgaattataatcacttggattacttctatttcttttttttttctcccttcacagaggtaatgatatccatttgagatataattaggtttatttgtttcagtatgttttcagttataggattgtcctgcctttgttgactgaatgtatttggacctttaacatatttccaggagcaaaatctatacaaaaaattccctgcagagaaggctgcctccctcctcattcctatcctcccattgcctcctcctggccctccactacctccatccaccacttgtgttccatcaacgccatgtttccagcttactcttcctgagcttgttttcttaaagataagcaaatgttttcttattttccttctctgttaagcaaaagatagccaactatacatgtatacttttaaaaacaatgtctccttcctgtggtttacagacatcttttgtaaagtagagatgaattttgaccagtataatttgatattcttgcatagagatctttgtctaatttttttttacagcttcctaatctttattagttttaaccaatttccaatgaaaaagcatctcatcatttctagtatacccagtaggtacttcagtacatgtttgttaattaatgaatttatgaacaagaagttcatagatgcatagatgcatctcaaaggtttggattgatggagaggaattcttcttcataagtggttctgaaaggaatcgcattgaacagagatgcacagtggagcactgagaacattggcttgcctgaaacaaaagtttttgtattgccaaattgggggaatagacttgctgtcttaggtgaggcaaaaatcaaagttctttgaaaactgggtgtaagtttcaatggcaggaattaacatgataagggataaaataatatttgggcatagtacttatggaacttaacattagttgatgtaaatgctgctagattttcactatttaataactattgccattaaaatattgtggattttttttacaccatagcagaacaaatagtactgaattacctttccaaatatgagtaactagttttatgttcttttgacagtttggttatgtttccaaaagtcacgtaactgctttctctgggaagtgtgtgtgtctgtgtgtgtgtgtgtgtgtgtgtgtgtgtgtgtgtgtgtgtatgtttaaggcatataatactcacccataggcccttagcattatgataatgttcaatgaggttggtaaaagggcaccaaaataatgaactaattgaacaagaaatataaatgtggcagtgggaggtgaattagagggtaaccaagtaatgttagctttctatggctgtgtaacaacttaccacatatctagagtcttaaagagacccctgttggtgatctcaccatttctgtagctcagaagttttggcataacatagatagatgtgttctgtgtttggagtgccacaagattgaaatcaaggtgtcaataaggactgaaatctcattaggagcttggggtcattctccaagctcaggtagctgtggcagaattcaattcctatggttgtaggattgaggactccattcctcactggctcttccccggggactgtcacctgcctgcattccgtgccacagtgagtgctcccttcattttcaaagctaacaatgaacaatctgtttcttgttgaatttctctcatgattgaagtctccttcaccaggatgagctacgtctcttttaaggggtaacttgattaggttaagtctaacttaggttaatcctttcttaaagctacctatgtcttataacataacctaacaataagagtgacataccatcctattaatggattcctctcatacacaataggagggcattaaataaggttgagcatctaccttgggtccaaggtggtagatgattatcgtgctctttcaggtgtgaggttatgaaggcctttactcaagtggtagagggggaggataaaatgactaaatgcaaacacattttgaacagagttatcagtaagacttgcttatcggctggagaaatgaggaagacaggaatagtgaaaagtagttcaaaccaaatcaaaccattgattaatgcaaggacacgagaaaagaaaatgtctttgaccaggatgccaatgagtttggtttgatacaagtttagtctaacaggatatcagaatgagaatattgcgtaggtagttggaaatacatttgtgactgtagcacaaataagacctgagacctgaagagacaggtttggtgtacatcatattggagatataatcgaagcattgagaataaatatgcctttcagggaaagtgaattctgcaccccscccccgccccggccaatttatttgctgaagtttaacctccccagtgaggctgtatttagagatagggtctttaccaaggcaattcatgttaaactaggctgtaagtattgggccctaakgtaataggtctggcatgcttttaagaaaaggcagaaataccatgagagcacaaacacagagaaaaggctatgtgaggacacagcaagacaatggatatctgaagaccaacgcaggaggcctcaggagaaaccaaacgtccagatactttgattttggacttgcaatctgcagagccacgagaaaatcagtgtctgttgtctaggccgccctgtcagtagtgtttggttatggcatccctcactgactactacaaagaccaaatacagttcctaagaacagacatatatttaggaggcaagagcaggcaagtgagtgaaaggcaatcagaagtttaagaatgctgagtctgcgtctttgactatactacaaagatcagtagccttgggggttaaatggcctggaatctggtcttctctcttccatggacgcgctactttactttggcaagcctctttagctcccaaagcgcttgatgcacaaaggagaaatcatagtgcatatcttcctggtcattggaaggtttaaaaaagtttttgcatttctgtggccttttttttatgttgatatatgtgtatacaattaaacgatttcttctataaaaatcatgtataagaagtactagataaatatattatctctttttttcagaagttataaaactgtggagttctgattgcatccattaaaaaaaaatctattcttctttagtgcatgtctgtggatgtagctccaccatcagctccagtttgctattggtgtttaggtactgtcatctgtgtcctgacatgcattttattttgttaatgtataggttgaagacaaggttgttaatggttgttggtaggttgtctacaaaaagaataagtgggttacgatggatctgagtacaggttacagacctcaagctttggtgcaattctgttgcctgttagttggtcctgtgaagatgtggcagctcagtggtcttttgtctacatcctggctcttgactctttcttgagtgactgagcttgcccgataaaggttaactttagagaagtgaggtgttctaatctatgtttggttggttccaggcctcctctattaaagatgcatgtggaaaacttgaaaagtatccaggtgaaaggtttaaagaagtcaaataatttagacataaaaagaaaaaaaaaacgcagagagctgcataacattcttcagtctccattaaggagacctaaaataagcattttgcatgatcttctcttttagaaacctaaatgagctcccaaagatatttaactggcatcaagaggtggaatggataactgtaatacctttttctctgttggtctttgcaaatatgacagcttttcacatctctgaaatagtttagatggattctgatagaatgtgttttttttttttaaagaagaagaaaagccactgtgttcagaaataagtttttaaaggccgacaaaacacattgaatgtcataggcattcctattcatgtttgtattccatattttatgaagtaattgtgtatgtatagcactgttgtattatccagagtagatagtttcataaatcatttgcagctactgctctgattctataatgctactacacgtgttcagtacatttttgtatgaaaatttctgtattattaaaaaaagacagcagagaatggaaagcaaacatgagtgtaactcagcactaagtatgtggaaaaataccatgagtattttatataagtatgaaatgaataaagctgtagtgaaagctaggattttctgcatggaaacattgattcagattttatgtcattttggtctagctttactttactttacaattatgtgtaattagttatttgttacagatgtcttttgaacacctgtgtgctaagcagtaagtgtggtaggtaggaagaattcctgcaaagtggcctgcagcccactgtatggccatgaaaacacagacctatagacacacatatatataaaggaataaatatatgtatatatttatttaaaggaataaatacatatatatataaaggattaaataaagggaagtgataatgtatagtttatatatatttgcataatttaaagccaagttcacaataatgataatgaaaagttatatctaattaaatagaaatgagccccatatcttccagtgactttattcactgaagccactgaacacttgggtgcacctgggaaaaaaatagactgtttttatcgaagaagctgctcacaaagagggagaaaagaatagtgttctagtgtgcccattccaccttccacctaagggtaaaaaccagaatcttacccaccgggagagacactcaagcgtttcagattggaagtctcctctattcagccattggcctctctgcccctgtttctggcattgaatctaagtcgggagctcacagtgagccgtgtcatgggcagcgtcccaccatccagcacagtgtctctgtctgcccgaaggggctgagatgcctgatgcgtcttcrctgttaaggttggcatctgagatgtgttccagcagctctgcctccagttcacacctccttgcagctttccccaagagcaaccctttgccctgaccctgtgagcccctgtgggccatcctcccttcagcaaggccaactcctcttttcagtgcagtaggatgtggaggctctttttagctcctggaagagcgggggctggaaccaggccctcactgtcttggacacaccaggccatctcttctgctcccacatcaaggccctcagggcacatggcggggcagcacctcccagaggtccaggcttccagccctcccctcctccacctggctcagccctggctctggctttcttttcctgtgctctgagaatcttatacagctcaggatgggcacagggtcaagaaacagcttgcacctcggcagtttttccttaccattctccctctccccaagattgctgctttcatcaaggtgaaggccaagaattgtaaatatgtcctctggtgcctccatgctgacctcatggggttggggggtggggggtggtgggggggtgggagagtcactaaattagagagcatatgtcatcctgagggggaaatatcttcattagtacttcctattgtcacccttcccttcagggaaacataaccctgtaattccagggtgtgtcagttcagattccagaagaaaacagtaccctcagataggaggctgaagaaaacagttttaaaaaaaacaaagaaggatgtcaagacacctgaactattcatrgtgcgaagctgttactattgttaggtctttagggacaagaggaataaatgctgttcccagagctaatgagaattggagccctagcagaagggacatctggtggatggtaaatcctagagggttgcagtccccaccggaaccagagatttcaagcaagcagggccaggaaggatggagggaagccccagtcaatttctctctctctctctctctctctcccctccgtctgtacccattgacctcctggtacctccccttgtcaaaacccaactggaggttgcaggacaagggagcccaagtgatttggcctgtgggtgtcaacctctgagggcacagaacagaatcggaaagatggaagatggatggatgtgtagttgtgtgaaaatggagaataataggacagagaatccacttctagcacccacagctataatcctgatttcacatattttgcttgttgtaactactgacatgaacatacttgtcagaatctgagacttaatatttagtgttgagagtatgatttttagctaggactgggcatggaggtgtcactggactgtaattaatgaagcaggaaggatgaagagcccacagtggtatgttgctatattgatacatttatttttagatgattcaaggaaatttattctttgtctctccttgtcctatgtggtttttaattatatttttctgaaagtgaacttaataataagaatattttttttctgttactctgagaacaaccactatagattaaatgtgttcatgttacagaatatatgaatatattttctgatggagtttagatatgaacccacaataatttctttgtgttattacactgtatgcctcctaattcatctgtccattcatgtcacatctattcttttcactcttcaaacagaagttctttcaaaatccaatcttgtagaattgtgccttttttccttctttgtgccagatgtgaaagaatgccttacatggtatcagacacaggtggatggatacccttgtgcagatggtttaattggtactttgatatatcaatattactaccaggatcttgtaacggatgccattgatgaaactgccacagttgaaaaggacccagagctattttaggtcccatgtatattcttcagcagagtgaccaataccatcacagccagctgcctttgcgaaactaagatgcttacaaaaaaaaaaaaaaaagaaaagaaaaattctagaatctgattagcagagctaagcagttcctgttgtactgacatgtaggattaagctatggcttgaaattcacatgaaatcatggggattaatttcgactgggccttttctagttaaccattccagcagttaactcttggccccctttgccattaattttttccttgtagaagtatgattggacacgtcatttgcaatatgagaggcctggagatgtactttatttttcagattttattcttttttaaaaatggattagaatgatagatttggaaagctgaggtggcatggaaacgatgcttttttctagttaacagtaaatccttgggtagctgaagacattctgattattttcactttgacttttctaagtgaaattcaacatgagtttccttcccctttttaatttttgtcctcaagtaagaaaattttcttaaatacgtaaattaattggcttttttcctgctgggtataatagctgtatacatttgcaatctgagcacattttaatgtttttaaagtgcgttcatttttgctttacctcaatgtgattggcacataataatttggttggcaaaagaatggatagatagttgtggagtaagaaataagcggcatccactgcttctgtaaatgtttacttagggtccagagtgggaagtcaggcagctccgggggatttcagaagctgggttaaggagccagccagagggtccttaaagcctgcaatgctcagaaaggagatgagtgatatgagtatcagactcacataaaagcaagaagaacagagcttgtctccatcctctcctgcagtagaggctgtgctcatacccttcctggagagtgtgggcttgtcaaggcccctggctgggaggcagcgcagatagggagtgaggtactgggcgctggcatagaagggggtggggggcatagaagggggtggggggatgggcacattctgttttaaggcgactgtgggccttgacagctcttggtctttctcctccatcttttccttctttttacccatttactgtccctctcccctccttgttctcttttgctttgtttttgtttttaaattttatttaaaatgaacaaatcccagatacaaacttgctgtaattatttttacttttccaaaattgtagtttcatgggatatatctttttatttcatgtttctttgtagtggccttgggaacatccgaaaatttctgcatgggtatccactctcaattagaaagcccttcctgtattaacaatgctccttgtcacactgccatcagatggtgtccctgcctgtcaaggggcatctcctgaatttcagattctgacaactgcagtggcagccacctatgcagaagtcaaaataaactccaagggcaagcgtaggcttgtgtgtaaggccccactttgctctagaattatgaagttagtggatctgcctgctttcctgggaagtgaagagcaagagaagacagacaggaaaaatctgattgccagtgaggttcccacaactcctgtagtggggccaggtaatacttccgttttatactttgaattttgctgaaattattggacaattagttaatgrcattagtcctaataggagatctaaagtcagaataagttccatttggaggggagaygcatgtgtgtgaataaattcgatctcagctggcgagggatgctgtgggtgccttacgtggtatcagaccacagggcctgtgtgtrgccatgtcaggccttttgtgtaaatatagactgataaatagcaataattccatgatatcaaggcaatcgagtaaaaagtttaaaattctgtcaaaccccagtataaatggtgcacacataacaactgaactgattcattattttggccctaagtggacacagcctaaatcttcctctggtaagaaagcttggcaatctagaggaagaaagcctccatatgggtaccgagcgaccagcatttggaagagctccctgatgttgtcacgcacaagccccagcaccagcgaatgctgggaggctgcgtgcatgcygcttctcacacagattctgaaatacaacttgcctagttaatatattgttgagctgcatattggctgaacttatgtagggctgtatattaaatgtatgttccaaatgaaaagctagaggcagaggttttagctaataagtatggttactagggttagtgatcgaggaagcacaacccagatccaggtctcgttcagatcttgtcctgtgttttctgggttatcaaagtgagtgcagtatttcagtagtctctagatggaacttagtttgtgcttacacctgaatctgcattacttacatccctcttttccttttcttactcttttttctattcttttcttttatgtttttattgtattgtatttctctttttttttactcttattctattcttattctcttcttaatcttcttcagcagaaaacttaatacaataatgatgctgagcaagcacatctttaataacgtcagaacaaaaggttgtatttccttttccagttgcccaattaaatcgtgtgcaggagttaaatcattcctgcagtttcagcagggtctgtgatttttgttttactcagtcctgtgggcagttgaagtagtgaacaaagtctaaatttactaatcctggtattcaggcaagttattaatcaattccacaatttgtatttcttgctcatttcaagccacaggttcttctctgcctgacattgacattgaggaagaggtttaattagagtctctgcttctctctctctctctgkctctctcctctctctctgttcacctccttctctctctcaggccaagctctgaagaagtttgaggaagcttgaaagggtgtaggaaggaggagaatgggrccaggaaacagagcttttggctcgggtacttggagcctggccaagggttccagctgattcctcagcaccgggggctttcatgaactcttagtacatttgcaccgctggaaacctcttttctgcatctctcctgcctcccaawgatgcctctctattcagccgggttgcatggccccttctgatctctcctgctgccctaaagacttgactttggcttcttgtttccagggtcctgccaccctccaggtggccctcatgtctaagccctaagacttctcccagccgggaatagtggctcatgcctgtaatcccagcactttcggaggccgaggcggacggatcacaatgtcaggagatcgagaccatcctggctaacacggtgaaaccccatctctactaaaaatacaaaaaattagccgggtgcggtggcgggcactctctgtctcccttcttcctctgtctctctctctttctgtctctccacctgcccacatctggtccttggggaaccccagtctttcccacagccctggagtacaggtccacccactgtattcacattcctcctgacagcctgctctagctcttcaggctgggaggagagccctctgtgtccccatctctgagtcatcccctggcttccaccgggcttgaggtggaggaagagcactcgaaaaagtggaggtggggccccccaatgggacagctgccctctccagggcggtgatctcccactcacccactccctctccgctgggtctccttttatgtctgtgaactggctgagtggtccgagaactcagcaagtttccacctcctccatgaatggagtacatggatttagaattccaaatctgtgttttctatattttggtggctttgtttacattttaaccctcattcttttaatcttataaattaaaacttgggcccctttgagaaatactctttcccattcgggttctttccctcttcttatcctttcatccttttcctggggatgatcagsccatagggcctcaccactgttctgcctgaagaagggaagtctaatttcctgttggcttctgtcttattggcctctactgaagtgaaactggggatgttgtggaatcaattttcttttccttccctttacatctgatgttgaagcttgttaatatcttacccaggatgctaaacatctggcttacatattttcattttttgagccagcaccctttggaaatactgttattctcagaaagtctctttgacctcctccttgcccttcatgaggtatttactgcaccccttgggtccccagcgaccacaggactctgtgcatagacactctgtggggccatacctacagtattgctgctacccagtgttggaaatcaggtttttttgtgtgctgtaggagatcccagaaagaattagggcattccattggttgctttactttcacctaatcaaagagatctgggggtttttatwtccccctccccatctccatcactaccgaaagaactgatcctggtgggtctaaggaaggcagtggtgctgcttctcacccagctgctctcatccagaccccatcacacatcctgtgggtatccaccttcctccagctgattcagacttatcttcttatgggctctaggtcatcctcggctcttcccacttcgaagcttccatggagtagattcaatcctggaccattgtggctgctgtagattcaccaacatctgtgcaattccaagtctggttacttgaccctctgtttgcctgggattttttttaagtctctccttctctaaggcaatgagcctctgcctgtaggtggagcctttaaggtagaaagctacagggtacaaaagggtaatgacaaaagaaaatatatcaggtaatatattgaaatattctgctcctttatggtgttgcatctctggtgattaattgaatgtctttgaaagacggatcagtgccaaatgacagaataacttggaagaggccgggcgcagtggctcacacctgtaatcccagcactttgggaggccgaggtgggcagatcacctgaggtcaggagttggagactagcctggtcaatgtagtgaaaccttgtctctactaaaattgcaaaaattagccaggtgtggtggcaggcaactgtagtcccagttactcaggaggctgaggcaggagaatcgcttgaatgtgggaggcagaggtggcagtgaggcgagatcccgccattgcactccagcctggatgacaagagtgaaagtccgtctcagaaaaaaaaaaaaaaaaacaataataataatagtaataactaggaagatactatgaattgtatctggaagtggctgctcacttagaaaatgactcatcaggtttgctctatattagaacatcttgtttgtcttcaacgcttcatttcctgaccaaatcccaacgccaaccttttcctcttctataatggagaaaacgtctttggagattgttgtcgtagcggtgaataacctcagggtaacatgaaaggaaaagctttttaaaggtaaaaatgaaaaggggctctgttaaagccagggctttcatctttttacgggaaattctcctgtcagcttagctctcaaaaaatctttcatgtttggctcaagaatccttcttcacctgactttcgagcaggaggtgaggcatctcgaaatgtgtgggtcccatgtgtttccttgtgatccctgacaccctcccgtgaagtgctggagggatactgggttggtaatagtgatcaagggtggacgtggcaccagagggtggtggggctggaaagtggcatgattcctgcgatgtcccttcccccccatcccacccatccctcttgtgacatgctttttgcatctagtaccagagttggttcataagtgtgaataacatcaagaggcttgttccaggcaatckcttctgtagactggtacgaggcctggcagtagacgatgccaatgaactggcccaggaagagcaaagcctgaagcttaattatgaccagctgcattttagtgtccagaggtcaccatgagtttcttgccctagtttctaacatgatttatgatgataaccctccacatttctcycttctacccttgggattctcagattcatgttttatgtgcctccgtctcagcaaatgcttggctgttttcctgattctctgctatgtttaggaaaatcacccatgacatcgctcctttcttataagtacacacagttatcctactatctcagaacttcggagaacatatttaatatttaattccatgaatgctctttctaccagaagctatgaaagtgagcacttaactggctcagactagcattatgttcatttttagagttatcctatcccttttgtgattatcctgaaaagttgtcaatgtctttgccaagaaacttgcagctccttcttatgttatttccatgccagaaaatttgtattttccttctcctggactgttagggcagaactggaaaagttcaaggcagtctgcaaagaggaaattgccattaatgatttaaattagtactttcatttttttagaattaattttccatttgaaaaatagatctgttttagcttgaaaatctacggcattaatattgtcataatattactaactcagtggagaaatatacatgaggcaattaacttttggtgataaaaaattactcataaaaatcattgtctcttaatctgacatttaacatggacatttgaatatattatttgaaaaatctaacaaggaataaattatgatgttttaaatcaaagaatttaaattctattaagaaggaaaaaattctgatattttgtgttagatttatttgtatttccacaaaatgattaactcactaagaggccactcaagagtggaaaaatgacttgctcgtctgtttaagaaacttattcaatgaagtcttagtacaacagatatcttatattaaagcaaacaactatacttgacctgctgcaggggaggttagacagaagggagtttttcagcgtgtacaatccctgcatgcaaaatgagagggaatgacagtcagcctattgctgaggacaatggtcggtctgtggactggggataaagtgaaggagtcttggattcttcctctggtgctcaattctcatgctcaggacataggaggcgaataaaaatattcatgcagcacaactcagataagctgaaatgaaactttctctatttttcaactttctcacaagccctcatttccactctcagaaggaaagaaaaaaatcatactcttacttccaggtaggtcattctgtttcaatttagggacttagatatgcagtcacattcaaggttcttcctttccctttctcctgcccttgatgatcccacggctattgaaattgggagggtcaccttggtgtcttgctgccacagcagaggcagctggctatctgccctccagtaaggtacctagtccttggatgctctctccttcctcttttatgggcgttatggagtgaattgtgttcttcaaaaaatctttttttttttttgagacagtgtctcgctctgttggctgaggctagagttatctcggctcactgcaacctccatctcccaggttcaagtaattctcctgcctcagcctcctaagtagctgggattacaggtacctgccatcatgcccggctaatttttgtattttcagtagagacgggttttcatcatgttggccatggtctcgaactgctgagctcaagtgatccacctgcctcagtctcccaaagtgctgggattacaggcatgagccactatgcctggctaaaaaaaaacacctattttgaagcacctgggaatgtgaccttatttggagagatcaggtctttacagtggtaatcaagtgaaagtgtggtcattaggctgggccttaatccaatatgataagtgtccttagaaaaagrggaaaaaaagtgagacagacaagcacagaggcaggacgatgtgcaggcacaaggggaaggtggatatctacaaggaaggagagcaccctggagcaggtccttctctcccagccctcagaaggaaccagccctgccgatgccttgatttcagggtctggcctccagagctgtgagacagtgcatttctgttgtttaaacccctagtttgtggtacttgattactgccatcctaggaaacccatgtgtaggaaactacacttttgccatattccacatcctatgttgtagtaaaaccctacagaccacaacaaatctctttgtctcacatggccttaaagtgaaaaacagacttcacaatggtactgctgacctaagcttcaagagcccgtttgatcaaatgacaacaagctcatgtttctttgtcctcaaggggcttcagccttcctcagcagccaagcataggtatctgcaaatggcaagaatccttggaatgataaatgtatccgatgtttataaatggtatcatggtagaaaaatgtgagtgtttcaccatttccatgtttgtgggcttggtttaatgggtcctctgcttaggggctcatgaggctacaataaggggttggtgggggcctcggtgagggctccgtgtccttttcggagaagttcactttcttgcagctgtagaacttacgatgacttgcttcttcaagcctagcaggaacgtgaagtctctgtcacttcatgtctctgaacttgagaccccgtttcatggagctcacttryacacttctttttagtagttcaggcccgccggggataatctcccttttgctgaacaagccagccgattacagacttgacrtatrtctgaaaacccccctctccttggccctatagtgtaacctaatcacacgggtggcattcttcatagtcacagatgctgctcatagaaggcagatacacagatcagggagtgagacactcaagagctaccttagaccgctgcctactaccagyagccaaaaccagaatggatgtttttcctcttgttggctacatttaagatgaggatgaggataggatgtgggcagaagagtggctctggaccacctggcttggtatagagcccacttccaggcagggagggaaactgtaagagttaggcatattcagtgcttccgtcagtggggcttaagttcagaagaagattttagctcttgagcatgattctaatcatgaacaggattccggaataagacagaacctgaggcatttggcctgggaaatgcagtgggaaaattgtgggtcatggagccccaagcccaccccaagcatggtgaaatgtagaatccaggttccatctgctgctgggttagtcacgcctcgggtgtgaccagcctttgaaatgattggcatgggttgcccccacttagctgcgaattctacattaggcttttctctttcatttttcataatcaaagctaattttctcacattccatcccttcacaaatttctatttgtgatagctagttatttgttatcaatgtaaccctcccagttaatccttttgatttaaatagaagtcttccatggtaaataatatgaatcacaaaagaatgatgaaaatgatgggaattacattaaaatagcccttaaatccaaccttttcttatgttcataatttcattatgtccagtgatttttttgcaaggagcaaggtctctctctgttgcccgggctggagtgcagtggcatgatcatggctcactgcagcctggacctcccagactcaagcratcctcccacctcagcctcctgagtatctggggccacaggcatgtgccaccatgcccagctgatttttatatttttttgtagagacagagttttgccatgttgtccaggctgattctgaactcctgggctcaagcaatcctcctgcctcagactcccaaactgctgggattacaggcgagaacccccatgcctggcaatgtgcagtgaatttttatagggagacatcatgtcttttcctcacagacaaatcagaattgtgatatgttcctctggaaattcatgagcttgtctatctgcctcactcaccttcctggctggaagctttcgttgcgtctcatctgtaatctgttatcatttttctgagtttcacacatctgtaccattagatgggacagcctttggagacaatagagaagaattggagggttcatcttaagtgcttccaaattctaccctttaactgctttggttatagaatgaagcaaaatttagatgtgttaattaaagtagatatctgtactcattgctgatttattcagtcaaggtaagcagttcaacgtggttttacaagatgaacctggatgcaaatccagtgatatccctttaggtaagttatgcatctctttgagctccagttttgttgtccatcatcttatttcaaggagtcgttatgaaattaaagtttggagaatgtaggtaaaatgcttgatctgtttaaacgccagctacttggccagatattttaaaaatgaaaaagaaaacaaccctcactgctaggtacttatgttcctaatgaatgccttatcatggtctttctcaaagaagaactcgatattgtcatagcaaccatccaaaccacactgtgatacaagtttcttcttacttgagagcgatctagcattttgtttttgggagcaacaaatgagaagtttgccacctctgcttatgctaatcccacatgataaattttattggagtcagtattgcatgtataatgccagtgggcttaaaagtatgaaaatgagttggaaatgttggtgaagttgtagggagtttgaagatggcctacatactatcaggaaggaggaggtggtatgtagcacaaaggaatgattgatttctgagaaagaaaacatgaagatcaaggctcacggctataaagatttaggaaaaacaaacaaacaaacaaacacaagaacatccaaaaacaagtttggaaaggctttggattcaataattagctagcaaataaacgtgataaaacctgtgccctaatgtggcattttatacatttacagctctgtttaaaaaggaagcttccagtttcaacccagtaattttagctgttgtatctgatatcattttaaaattttggctgtgcagagtaatctctagaaagtttattgacaatccaaaacctgatgatgtaaatttgattatgctgccacgctgcattttgtagtctttggttgtgtggttgaaaccataggatgtgagctcccagcttacagttgagagtttgtctctaacttgtattttgcccatctctccatctatgcccccgccgccacacatttatcaaccattttgtcgtgtatttatctgtttgttgtctgtctgtgttcactacaacttctgtgaacatgctttggcttcaaagtggcacacatctcttctagtcatacccatcagataaaaggaatcagtgtagccaaccctaaatgttaaggaatttgggaaatcaggtcatctggtgtcggggaagaggaggaaacagatttcgatgaggtgccagctgtctctgctacaatacttatttatcagtgtggtttgatgattacaaataatatgtaagatatttagtaaatatggtgcttaatacagttcttgagagttattactgatattcattcattcaacaagcacgcactatactggtttcagtgtaattgcgaagatcctactatataactccttatttccccttattttcaatgcagaaatgaataaccccatgtcatcctacatttctttatttctttgatacaacacccaataataacctacacctgctttgtcttgaaataatgcagtcatcccctaattaaaatgaagtatctgtcataaaggaggtactacccatggtgcccagatgttatgtcaagagtatatgccagaggccctctcggaaaaaaaaaaaaaaaaaaaaaaaaatctccaaaatatctgtgaagatccctgatacatgcctgctgctatagaattcgagagggaccagtaaaatgttgtataattcttgtataaaatgaaccttcactacagactgggtggcttaaataaataatatgtttattttctcacaattccaaagtcaaggtgtcagtagggttgattccttctgtggcctctctcctgggcttacagatgtcttctccgtgtaccttcacatggtctgttttctgtgtctgtctatacctgaatctcatcttaaaaggattccattcatgttagataagacccaccctaatgctgacattttaacttggttacctctgtaaaggccctatctccaaacagtcacatttgggatactgggggtttggaattcaatgtatgacttgtgaggggacacaatttagcccataacacttgtagctgtgcagcatattggcagtaaatagcaacttgtgaggttggctacatagtaactgattaactagatgaactgctagtctgtggcccagatgtatacgaatatcattctcagctgtgaatgtcttcaaacggaggacctgagttgtccaatattcttgttcattttgaaaagaaaatccagtaataaggatatttatcaaaaactgcccaaacttcaaatgtaagtcactacagtggaattgctatttataggagaactggcaaagttcaaggtcaagatgtgagatgaaataacacaatatggccgggtgcggtggctcacgcctgtaatcccagcactttgggagaccgaggcrggtggatcacctgaggttaggagtttgagaccagcctgaccaacatggagaaacctggtctctactaaaaatacaaaattagctgggcatggttgcacatgtctgtaatcccagctacttgggaggctgaggcaagagaatcacttgaacccgagaggtggacgttgcagtgagccgagattgcgccattgcactccagcctgggcaacaagagcaaaactctatctcaaaaaaaaaaaaaaaaaaaaaaaaaagaaagaaataacacaatacataaatatacccagttacccttcaaaatctctgaaattactcttacattagtggatcctgggcccatgaaagcccaagagccaagaagtagctgttttattccttctttgcatttaggctgtggttgccattcatgaagttctcagatttgtttattttactgattttattttatttacttttggctaaatatatgtttttaatttttgtgaattatatgtgtacttagtatgtttgtgctataatttgaaaattttagaatattgttcaggtaaaattaaggtgaatctggagaacacgctagtgtgtatctttatttcagatagaggacactgagcttaacacatcaagcaggggtcaggatctaatacttttaatacagtaacatttattcctgcttgtaatcccagcactttgggaagctgaggtgggtgaatcacttgaggtcaggagttcgagaccagcctggccaatatggcgaaaccctgtctctactaaaaatacaaaaattagctgggtgtgatagcgcatacctgcaatcccagctactcagacrttgaggcatgagaactgctttaatctgggaggcggaggttgcagtgagccgagatcgtgctactgcactccagcctgggcgacagagcaagactgttctaaggattttttcactctatgcttctctactttttcattgagatagttacaaaaaactcataccatttccttaatcctctcttgtcgtctcagaaggcaccagatttactggagcactcacaaagaattctaaagacataaaaccatgcatacatacaaacacacacactcacacgtacatttcagttggattgaaatatgatttccagcatctctgccattccaaaaatggacacaaatcttaggtgaaaataaaaagacttattggcataaagataataaaagttagaaagcacaaatatatttttcttttctcaaaagagaggtgagtgagtggctcccaactgttcatataaataactgtgtgtaaaatgagcttgtagccagaaagggtaaaacataggtcagaaagaagttacaactaacagtgacaaaatgaagatggcaacatcatccataaagacattgacagaaaagtagaaaaaaaattccattctattctaagtaaagcatttactgtcattatcttttctgtcaaaaaaaaaaaagagagagagaaagaaagaaaggaaagcttatcaggaattaaatgagtattttacttgcaaataatttcccaggtgtctttttaaaattatcaaagtaatgtgtgcttagactttttaaaatttcagaaacattcaaattcctctcttccatcacttaatcccattcttcagagttaatcaaaatttgctatgtgtacccaataagttaatgcatatacagagtgatatacaacatacagacaaatgggctaataataatagtgcatgctattctgcaacttgctgattttatttaaaaaatagaccrccttcttttccgtgtacttctagagttataacaaatgtttaccaattgtatgtatgaatggcagccagcccaatattgatgactgtttagattgttgccatggtttttactgtggttgcaaaggacatccatgtacatgtgtttttgaggacatatgtgagaatttctgcatgtacatctaagacattgataaattctgccaagatagcttaatagtgtatccatttattctcattagctgtttatcataagcacttttatttgtatactttctaatatggattttagcagatgtgattccattgtttccatttttatcactttgagtgaacatctgagagggtgtggattttttttttaatatactcttcttgtatggaagtccatatctgtttgaagactgtaatatggacaggatctttgttgtaaaatgtttaagaggttttgctatgttgcctccatagtaaattagaacatccattaattctgcctttgaccttgattactcatgcagtgcttttgcccatgcgttgctctataccaggggtctccaacccccgtggcgccagaacctgtctgtggcctgtgaggacctgggctgcacagcagggggtgagtatgggcagatgagcatgacgctggagctcctgtctgatcagcagtggcagtagattctcataggagtgcaaaccctattgtgaactgcacgtgtgaggtatctaggctgtgtgcttcttacgagaatctaactaatgcctgatgatctgaggtggaccagtttcatccacaaaccacaccccatccccattgccctcatctgtggaaatattgtcttccacaaaaccactccctggtgccaaaaagattcaggactgctgctgtagactgcataactggattttaggattctacaaagtcagtattttgggtattatgcttattcactttagagacctcaaaactgtaatgagctgcaaaattttaactcatttgctatggtatttgactataattcttctatttaaaccatattggtaatctgtatttatacaatagctttctcatattccaaaacaaagatttcttttttataagcaactttggattttgctttcatttttccctcctttcttaggtcagtttgtaagctatgtgtaggatatagcaggttagatagctgaattcatgacagatagcatgaaatacatacaatttttcatcctaaaaattttgtagtaataccgcatttcttattttcttattttttttttaattttactttatgttctgggctacatgtgctgaacgtgtaggtttgttacataggtaaacatgtgccatggtggtttgctgcacccgtcarctcatcatttacattaggtatttctcctaatgctatcccttccctagccccccaccccctgacaggccccagtctgtgatgttcccctccctgtgtccatgtgttctcattgttcaattcccacctatgagtgagaacatgcggggtttggttttctgtccttgtgacagtttgtcagaatgatggtttccagctgcatccatgtccctgcaaaagacatgaactcatcctttttgtacaccatggaatactatgctgagttgtattttatggcatggatgcagtgtttttttctgttcctgtgttggtttgctgaggatgatggtttctagtttcatccatatccctgcaaaggacatgatctcattcttttttatggttgcatagtattccatggtgtatatgtgaacagctcctgcattcattgattttttggaagggtttttcatgtctctgtctccttcagttctgctctgatcttagttagttcttgtcgtcttctagccttttttttttttttttttttttttgagatggagtctcactctgtagcccaggctggaatacagtggcgtcatctccactcactgtaacctctaccttccaggtctcagttcaagcagttctcctccctcagcctcccgagtagctggaattacaggcacacgctaccatgcccagctaatttttgtatttttagtagagacggggtttcaccrtgttggccaggctggtcttgaactcctggcttcaagtgatccacccacctcaaccttccaaagtgctgggattagaggagtgagccaccatgcctggccttttagcttttgaatttcttttctcttgcttctttagttcttttaatggtgatgttagggtgtcaattctagatctttccctccttctgatgtgggcatttagtactataaatttcccccttgacactaccttagctgtgtcccagtgattctggtacattgtctctgttctcattggtttcaaagaactttgttatttctgccttaatttcataacttacccagtagtcattcaggagcaggttgttcagtttccagaaactgcaactaatgtgcaaaataaccagctaggatcatgaatgcaggaacaaattcacacgtagtagtattaaccttaattgtaaatggcttaaatgccccaatcaaaagacacagactggcaaattggataaaaagtcagtacccatcagtgtgctgtattcaggagacccttcccatgtgcagagacacacaggctcagaataaacggatggaggaatatttaccaagcaaatggaatgcaaaaaaaaaggagagtttgcgatcttagtctgataaaacagacattaaaccaacaaagatcaaaacagacaaagaaaggcattacataatggtaaagggatcaatacaacaagaagagctaactatcctaaatatatatgcacccaatacagcagcacccatattcataaaacaacttcttagaggcctacaaagagacttagactcccacacaataatagtgggagactttaccaccccactgtcagtattaaacagaccaatgaggcagaaaattaacaaggttattcaggacttgaactcagctctagaccaagcggtcctaatagacatctatagaactctgcaccccaaatcattcttctcagcaccacatagcacttgttctaaaattgaccacataattggaagtaaaacactcctcagcaaatgcaaaagaacagaaatcataacaaacagtctctcagaccacaaggcaatcaaattagaactcaggattaagacagaggattcttttcttttcttttcttttctcttctcttctctctttgtttctgtctctttctttctttctttttctttctttccttctttctttctttttctgtctttctttctttccctctctctccttctctctctctctctttctttctttcttttttttgttttaatggagtctctgtcgtccaggctggatggagtgcaatggtgcaatgtcagctcactgcaacctcagcctcccaggttcaagcgattctcttgcctcagcctcccaagtagctgggattacaggctcctgccaccacccctggctaattttttgtatttttagtagagtcagagtcagggtttcaccatgttggccaggctgatcttgaactcctgagctcaagtgatccacccacctcagcctcccaaagtcctgagattacagccgtgagccacctcacctcgccaacatttctgattttcagtggttactttccatttagtgactgagtatgaagatattttaggagattcaaacctttaaaaaattttttwaaaaaatctatttatagcaaatatctgtacaacctttctccagagtccccaactgttaacactttgccacatttgctttatctttctttgtctccctcactcacaccttcccctccttcctttcctctgtctctcaagaagctaaacataattgcagatagactgacattttgktcctaaacacttcagcctatatctacaaaggcaaagggcaatcttctgtgtagccgctgtaatgtgtgatgtaaatttcaaggaatttaacatcgatacaatgatatttcttttgtagtccatattcaaagatcctcccaattgttcccaaattgtcctttatagcttttttaagcctttatttatttattttttagcagttttaggttcacatcatagagaggaaggtatttcccatctactccctgcccaaatgtgcccataccctctccattatcaacatcccccaccagagcggtacattttttgcagctgataaacctaaattgacacattgtaatcacttcacatttatagcttacatgagggtacactcttggtgtacactctgtgggtctggacaaatgtataatgatatttatccatcaacatagtatcaccctgagtattttcactgccttaaatattctctgtgctgtctctattcatccctccgtcatccctcagtccctggcaactactgatattttcaatgtctctatagtgttgcctttttccgaatgtcgtataatacaacatgtggccttttcaaattggaatcatacaagatgtagccttttcaaattggttctttcacttggtaatatgcacttaaggttcctccatgtcatttcctggcttgatacttcatttctctttagtgctcaataattttccatgatctgtatgtctgatactttatccattcacctgatgaagaacatgttggttgcattgaattttggcaatcctgaataaagctgctgtaaacatctgtgtgcaggcttttgtgtggacatgattttagttttcaactcctttgggtaaatactccaggtattgctgcattgtrtggttatagtatgtttagttttgtaagaaaccaccagatttccaaagtgactataccgttttgcattcccagtagcaatgaacgagagttctgttattccacgtcctcaccagtatttggtgttgcctttgttctgggatttattctaattggtgtgtagtggtatcttgcgttaatttgctgctccctgaggacataagatgtggagcctacttctttgccatctctgtatcttctttggtgaggtatctgttaaagcctttggcccttttttaatgtttgtttatttatttactgatgagttttaaaggttgtttgtatgctttggataatttttttaaattattctgaccaaaagtttagtcaaatatacagatcacattcagttatcatgtatctttattttgctttagtatagaacagtcttctcacacacacctaatttgcaccttcaaaaatttgaattgtaagggtcagttgtttgcagaattatcctgcaacctcgatttgttttattgtctcctcattgctaaatttgggttaaactttgttgtcgttaatgctgaatcctttgtaactgacaatgcccgtgtgaatcttagttacagtgatgcctgccgaatctcccattgcagaaataaccctcctcttttgaaattattagggaatctgtgggcagatacttggaaactgccaaaatcccgattcccaccaatcttggatccatttgctgtagcttctactggtgatccttgagtgaattaattattatatcagtgccttcaaaaatatgattgtctgtgccgacagttcttgccatatttattctgttgttctgtatggaagaactctttcttactcctcacacgtatactttttaatattatcatatattcatggattttttctttaatgtattataacctgttatcaatctattcttttttgtatttatattttcccaaacttggccagtgggacctcatttgtcatagaacatagggtattggttgaataaactatgatttatccacacgtgaggttactgtatggttgtgaaaaataataaggaaatgtgtatatactactgtagaattaattgtaggggaaattaagcgaaaaaagtatataacatgctatcaattatctaagagaggtgcttaaatmcacacacacacacacacacasacrcacacacacacaccagcttctgttagasgtaaagcagaaatctaaaaacaaacaaaaagatagtgaatatattaaacagacaaaagtagaagtgagacatctttgacaattttatgtttttaaagtttgactttagaaacttgaaaatattttccataattataaaacagaattaaatattttaaatagaaagttctaagaataaaaaataaagtcaaaaaaatgaatgcaagtatctttagttgtaatcatagccacattattccaagtgactttagaatacagcagtttgactatacatctttaatgaggtacatcccaagacaaaaagaactacaagcagaaaaacttaaactatgattagtaatcaatttaatggtatcattcacattgtgtatataatgtagtctaaaataatgagtaattatgtgacatctaatcatttcattttcacgattttgaacaagagaaaagaagattaagatggaagacgaaggagattatttaaaaccctctactcctcggtttgaatgggaaatatcagattgaactcgtgatgtattttatctttaaaaaacgaacaaaacatacctcttgtcactgaaaaagctgacagacgtttatgaatccactagcaatgagtatctctaaccatccacatcgtcatctttaaatgccatttttatttgtcaaaatgatttattacaggtctagaacaaaaagtgttcaaagcagactggagtctcttgtcatacaggatggcagggaagctaccaaagactcttgcgcctctgccacagttcaggatcccattctaagatgtgccaattagctatagataaccaccaatcaaaataataagtacaatcgatggacatcattaatatgtgtgtgtctgtaatttcgttttttttttttgagacggattttcactcttgttacccaggcaggagtgcgattgtgtggtcttggttcactgcaacctctgcttcccaggttcaagcaattctcctgcctcagcctcccaagtagctgggattrcaggcatccgccaccacgcctggctaatttttgtatttttagtagagacagggtttcaccatgttggccaggtgggtctcaaactccttatctcaagtgatccacctgctttggcctctcaaagtgctgggrttacaggcatgagcctcgcacccggccttttctataattttttaataatgcttttaaaaattgcatttttattcattgctagagtcaacttattttgaaaatgtataaaccaagaaaataatagagcatttattctgccttcctatacaaaatttatctctgagtaacaaaatagctattgagggaaaatttatcttgatagaaatatgttatctaatagtttgagaagaagtgataatattaaaagatcaccattttacaattttagcgtatcttccataaagaagatacactacagccaaatgtagtcagactcaggcatagtcacatagtgcttccttcttgaagaacaaagcagcacccttacaggaatcccagcaaaacatattaagcctaaacctagtcaagcctgtagaatcaaatataacttttttttttttttttttttttgagacagagtcttgctctgtcgcccagactggagtgcagtggtgcaatctccactcactgcaagctccacctcccaggttcacaccattctcttgcctcagcctcccgagtagctgggactacaggcacctgccaccacacccggctaattttttgtatttttagtagagacggggtttcaccatgttagccaggatggtctcgatctcctgaccttgtgatccgcctgcctcggcctcccaaagcgctgggattacaggcgtgagccactgtgcctggccacaaatataamattttctataataaggacaatgwagaaacttgttcagtaataccacccatatgcaactggcaaaatttagattatgagaaattctacaatggattaacccatttttcttcaaatttaattgtaaaaacaggaagagagatgggtgagggaacttgtaaaagcaactgaagagaaaatgttgtgaaattagagagtgttgatggctgcacaaccttgcaaatattctaaacactgctgaattatacactttaaaagggagaactacaatatattagttatgtcttaataaaaaaacattgaacgccaggcacagtagctcaggcctgtaatcccaacactttggaaggctgaggcaggcagatcacttgagccyagaagtttgagaccagcctggtcaacatggcaaaaccctgtctgtatggcatatacaaaaaattagctggatgtagtggcacattccagttgtcccagctactggggaggctgaggttaggaatcccctgagccctggaagccgagactgcaatgagccctgatcatgcctgcactccagcctgagtgacagagggagacctggtctcacaaaataaataaatwaataaatacattaataaattaataaattaattaattaaattacaagaagatataatatacattccttccagtcccaaaatatggacttgtttggatctcgattcaaacagatttggaaaaaattaaaattatggacacataaatatttgatgccattaaatgcttatttgtaatttttcagttcctctaatggtattctagttaggttttataggaaaattcctccttcgtagagatacatatggatcatttttgttgagtaaataatatgatatctgagatttgcctcaaaataatataggaagggaaagtgggtagtgatattgataatatcatttatccatgataattcatactgataaaacaaggttggactcaagttgataattgttgaataaggtgatgaatagatatacatgggtctcattattctgcaacttctggataggtgagtaatttcccctcaatgaattggattttttaaaaattcataagtacattttgtttcctttatttcaactccaacatcatgaagctccttctcaccttcttcagccactgtgaaaaactcggtttccaaaaacatcagtaagtttagtaatttttcatcttaacataaatacaaatagtttctgaattcctacacctatatcataccagtaatcaacttagtaaataaagtacaaaatttcttttgggttcctttttttgtactaaaggatatacagagcactgtgtccaaaagttacttgaactacttttatttatgtactgacattgtcagctcaatatgtttctggtaattttcagttttagagtttgctttttttctcctttttatttagtaagtattgttgtgattttgtgaaacattttctgtgcctcacacctgaaactgtagatagtcacgttagggaaacatggctcccattcgatccctttaacccatttccctactccctcataggtaaccattttcactaacttcgattttcctttctacgtttccttttacaaaaacagctacttttgtatgtacttaattttctttgcttttgacatagaaagtcccttactatattctattttctgctttgttttcttttttcttcacagattgtacttgtcttctatggtcaagcatttcacttgtttctgaaaattttttttccttttttttttttttttttttcagacacaggcttactctgtcacccaggctggagtgcagtggcccgatctaggctcactgcaacctccgcctcccggctcaaacgagtatcctgcctcagcctcccagcctgtagctgggattacaggcacgcacaaccacacccggctaatttttgtatttttagtagagaccaggttttgccacgtgtgccaggctggtcttgaacccctgacctcgggtgatctgcccacctcagcctcccaaagtgctgggattacaagcatgagccaccgcacccagcccataattttctattataaataatcccacagtaaacaccttgcgcagatgttgttttgcaatcgcggaggtatatgattttgagtgttaatcgcaaccattggaatttgggaagcgtggcataaactcgcatgtggttctgttgggtagtgctgacctccccgacgtgcctgagtttccgggtcagcttcatcaagagcgtgtgttgttaagctctcaaaccctgaccccagtaattctatacagcgtattccatggctttaaaaacattaatttaattctgtcaaataaaatatatatattttaaagtgttcataatatttatcacaactagtaataaaataatacttaawgaaaaaagaagtgatacttgaggcatttcttgcaatgttgacaatataaaacacaattttaaagtggktttaatgggcatagctttggtgatccgatatcctttgtattcatgaaagagggaacccagagaagtgaaatcccgaccctacatgctcaaacagcactgtcctctgctcttcaaaactaaatcacttactgcagttgctggcatgtagccaaaccgagtgattcctgagcggtcccccctcccgccccctatggagcccctctggtgtaggatcctcatgagcagcagaaaggtctcaggcctgtggtgggagggacatggaggtgacaaggcccaggcctgcactggctaattagtgtggggctaattgacctttcacagtaattgtattgcctgcctttgggaaccagagaaggggcctttcagtatctttacacagcataatatttttgatcataatgaaaatcagtcataagaaatgtgaaataaattgaaaggctaaatcacaaatattcatcttttagaagtccccctttttttaaatgaaggatcagtttgaaaggatagtttctgttctcatccaattaatataaattggcatttagtgttcattgaaaactatggaggggaactggagttcaagtgaaaaaatatcactgggaacaattccctttttgattattctgacttactgtgaacatctctggctcatcttgtcttgaaacacatttcattgttagcagtgaccaaacaaaatagttcttagccattacattaaaaaacacctttaaataacacctttttttttttttttgagacggagtctcgctctgtcacccaggctggagtggactggtgcgatcttggttcactgcaacgtccacatcccaggttcgagagattctcctgcctcagcctctcaagtagccaggattacaggcttgtgccaccacgtctggctaattttttttaatgtatttttagtagacacgggtttcactacattggccaggctggtctcaaactcctgacctcaagtgatctgccctccttgacctcccaaagtgctgggattacagacgtgagccactgcattcggcctaacttattaaatcattgccgttttgtcttttcttggcatagaaaatacgttattaaaaactgtgatgggcttccaaccacatctgcttaaagccaggtgcagtggctcaggcctggaatcccagtgtttgggagtccaaggcaggagaatcatttatgcccaggaatttgagaatttgagaccagcctgggcagcataagtgagatcccatctctacaaaaaaaaaaaaaaaaaaaaactagaaaattagctaggtgtagtggcgtgtgcctgtagtctcagcaactcaggaggctgccataagaggatcacttgagtctgggagttcgaggcagcagcgagccttgatcatgccactgcactccagcctgggctgtaacagagtgagaccctgccttaaaaaaaaaaaaatctgtttgttagaagttattttcagaagaagcaaaaaatagaaagaatgccaagattgttcagcacaaaaaaggacaatttaaggtgttattaaaagtgtgtcttcaaagttatttaagaaagaactcaatgtaaaaatgttttaacattagaatctgttaacactattgatttttaaattagtctgatcattcttggctgattgtattccttttctagatagaaaatgtagtctattaaaaatccaaataaaaatcagaaatgttcagtctttaaaatgtaaagttattacacattagaaagkwtgacagccttccactgaaatgatttttttcccataagttattggggtacagatggtatttgtttacgtaagttagttagtggtgatttgtgagatcctggtgcacccaacactcaagcagtacctactgcaccatatatgttgtattttatcmctcactcccctcccaccctttcccctacgtccctgaagtccattgtatcatgcttatgtctttgtgtcctcatagcttagctctcatctatcagtaagaacatacaatgtttggttttccatccctgagttacttcacttagaataatagtctccaatcccatccagattgctgtgaatgccattaattcattcctttttatggctgagcagtattccatcatataccacgatttctttatccactcattgattggtggacatgtgggttggttccacgattttgcaattgtgaattgtgctgctataaacttgcgtgtgcaagtatcttttctgtataatgacttcttttcctctgggtagatacccagtagtgggatttctggatcaaatggtagttctgcttttagattctctaaggaatctccacactattttctgtagtggctgtactggtttacattcccaccagcagtgtagaagtgttccctgatcaccgcatccacaccaacatctactgttttcgatttttttattatggccactcttgcaggagtaagatggtatcgcattgtggtttcgacttgcctttccctgatcactagtgatattaaacattatttcatatgtttgttggccatacactgaaatgattttaagcattttgtatgaggaaatagagtttaacagatttagaaggaactgaaaatgaatgaatgatactgaagatattgaagacagccctacctactttacagaccatagacagtggtacagtaagtatrccaatgagtatagactgatcagtatgctgataaaagcacactggctgggcacttctgccaacatgtctacttatgtcgtgagcacagagaggtggacaatccaaggtgggatgtttgaaatagagcattgggctcagagccagaaaactgaggctgcaggcctggctctttcatttcccaattatgcatcagacttgacttgggtaagttactaacgccatctggaatgtttcctcacttctaggtatgtgcttaaaggatcatagagtcattcagtagacacaggggagtgtgttttatgaacaggtccctacagtaggtactacagacacagttgcagtattttttcttaaagacggtattgtctggtaacagagagcaacgcatacaaagaaactacaatacgacgtgataagtgcagtcttccctggggtgacgggatctccagaggtacagactttaccttgagccagcaccagcatccggagtctgcgaggtgtgttaccagctcacctataccatcttcttttcactttccatactctcactgattcctctgcaacccacttgttcttactttcatcctttttktttgttttgttttgtttcctytttaaaatcacactggactaatctttactttgctacctcctatacagccccgtcccagatcctgtcttctcatgtttttaacatttcagctatctggctcttctctgaatcattccttcgtacctggggtggttccgttgcagcatccaaaccctggtcttcaccatgggcccctgtagacttgtcctagtttgtctgcctcatccaagtctccacttcctctcagcagagtcaatgaacaccagcagaggagtcgatggcctgggttcctaccctggcttcacactcgggagctgggtgttgttgaacccatcgtgaacttctctgtggctcccctttgtcttctataaagtggaatcaacagcaaccacaataagtaatctgtaaaacagcattatctgtgccaggcacagttctcttggatttacacactatttctagctctgtttacacactaactttatgtatgttgtcttgtattctttgtcttgctataacaaaatacctgagactgggcaatttataaaattctgaaagctgggaaatccaaggtcaaggtgttggtattcagtgtctggtgagggccttcttgttgtgtcttcacttgctggaagaggggaagagctaaaagggcaaaaaggacagaaagtcacttgcactgccttataagggcactaatcccattcatgaaggctctgccccatcatgatttaatcaccttctagaggctccacctcttcatgcaatcacattgatggttaagttgaaacaaataaattttgaggacacattgagacatagcagatggtgatagttattccctcatcagagtgtgagaataataaataatttattatgtctcaaaacctgtaatggtctgcaatatacggctaagtatattctatatgttttttattwttaacataactattttcataactcctgaaaacaatgtattaataatgtggtattgttaacaattttagaatctcattattaatcattttagagatgatmtttgtaactctttattaagtgcttggaagaatctgaaatatttggatcttaactatgtgccgttgaaggaacttctttttggaaaaagaaaaatacatcagttttttgtatattattggataatgtccaaccagatgagagttgatcattgtttggcaaaaaaaactcccatggatgttttgttaatactggtatgtttccatgtcaaggatcctatagacagaaagcccaagatactgatccctcagtctcccatgggtcatcagctgtgcttgacagtgtaagaccaaacccggttacagaaatacctacttggtttgtctacactgaagaatttgttactgccttacttgttggattaatatattgttataaaaaaagaaagaattgtattaagggttttctctttgacaggtaatattttatttattggagaaacaaagataaataagacattgtttctgctctaaggtagcctgaaaccatattggagcactctgatgtcttcccaccgaaaatctctttcttcccacatctgaggaatttttttgtatactaggagaactaagtagtatttggggcttttgcgtggctgtacaactggactgtatccaatgtactgtccatggaatgtggctttgaactgaaccagtgtggtgtgtgagtccactgtctgtcaaaggcaccgcttctggaaccaagaagattttctgtaagagtcaaagattaagcaattaatgatttcagaaacagggatgccaactgagggaaatgcgtcctataagtatcactgtaactactgaaatctgtttgagaactttcttttcccctttgcagctgtaccctgagcattaggaaaatctggatttgaaatcttttagatttcatcaacatttgtcacattttacctgtccctgaaaattcactcaggttcttcacgtgtttcatggcatctggctatatggtgatataggaattatttttttgtatcgatttttagttcacagaaagttggaatgctaccagagagattgtcacattgatagcttctgcttattctgccttctctgtatattttccaaacagaagtgtgcagctaaacagaattctgacaccttattcatgtacaagattagggacccatsctctttagttttctgaaactcataaatggtaacaatactaccaacratgtatcattgcggatcgggatctgagctctttacatttccttaaatcttcaaaacagccttcaaagttgatatattattgtcaatggcagaaagctgggaaaggaagaatcatttgccaaaattcatacagctaataaattatgtagagcttgagtccgtttgactttaaattctgtgtcctttctttcttgttctgctggttccctctgtggcactttgggcactgagcttatgactgtttatattcattgattcattcactccttcattctttcttacttcccttcagtcattcactttttcaaacttttagaattcatagatatgtttctacatctcctggctccaaagcactgtgtgaggtgttctgatgaatgctactatggccaagttgctgctctcaagtatttctaaaataagttggaagataagactcagacacagacacacacacacacacacacacacacacacacacacaatatatatgtatatactgtccaagctctaaccactgcaataagaagagcacagtaagcaaagatttttagattcagatgagggagaaaggtgttacttttctctaggaggatcacaggaagtamctgagtcctgaacatggaaaggtagggaaaaaatgtggatagaaacctcaagataggctagggtgctaattctccacttttccttctgtggcaaagctcacatgctcctgtgcaagtccttgagtatactcggatcctgatgcccatttctctgaaacgacttaggctagaggctgtgcacagctggaggagtgctgcctgacacggagctgatcatggacagtgatagcttgtccaaatagaatggaaaatagaggactgtctgccattattgattagaggacaagcagaaatctcagtgccataaaagtatgccatcttctcatgtgcctacaggtcagcgagggtgcccgcggcctcaggctggcttcagctgcgggtccctgcttcatgctgtgagtgtggctgcacttggtcacctcagtgggttggactcaggtctgggccatgtgtgaacaggtagaagctttctgggaagttctgttttttgcaacggagtcttgctctgtgcagtgcagtgcagtggtgagatctcaggtcactgcaaccttcgcctcctgggtttaagtgattctcctgcctcagcctcttgagtagctgggattacaggcacgcaccaccatgcccggctaatttttatctttttagtacagacrgggtttcaccgtgttggccaggctggccttgaactcctgacctcaagtgatccgcccaccccagtctcccaaagtgcttggattataggggtgagctactgtgcctggcagggatgttcttttgatggaccttagcagcgggacaaatataaggccctggttcaaccacatctgctaacatccctttggccaaagccattcatgtggctggacacagattgcagggaggaagtggggagcatgatgtatgcgcactaatgtacaggcgtgcatgattttgaagaatagtttaatctgccacatgtatcatataggaggggtaaggaagatgaaaaatcaaatctagatcatgatttagaaaggaaaaaagtacaaacacacttgaagaacatgggagatgttacagtccattttacaagtaatactgagacactttagaaagattatgtagcacacacccagaattcttgtatgtattggactggagtatggcgatatcagatgtggggagtaattacaaagctattatcatgaggaaggcctaaaacggggaggtgactattgagatgtaaaagagttgaagatgtgaagggtaattctgagacagaattgctaactgttggtgccttgccgatgtcaaagattaggtaggaggaattcaagatagtgattctcttgcagcccgttacaaaacatgggaggataatgagatttttaggtgggaggggaaggctcgaagcgggtgatgtgggggatggtttttcctttgacagaaactgggaagtcatgcaggggagcacttcaggtcagagaatgatgcacagtggcctctgctgagtaggagcagtcctagggagagactgggagctctgagaatggggaggggcacagggcctggggatgagacggagccccagggtgtaagagtagagaagaggttggaatgggatttaaggacgaagggtgtyctggtgccctcctgggtggaggaggcagattctagccattgtatttggggtcakgggtgttggtgagtgctgggcaccactgttcgagggacattgatggtgagggcaacagaagagcttgagaaagcagcagggaagggcatcattcatcgctatgagttatggatgcatttcacttgagtgttcttggagcattcctaaaatgacaatggcaagaggtatttgaaaggcattggtttatttgtatttaatttaatttaattttattttttgagacagagtctctctctctgttgcccaggctggagtgcagtggcatgatcttggctcactccaaccttcgcctcccaggttcaagcaattatcttgtttcagcctcccaagtagctgggattacaggtacatgccaccaaagccggctaattttttttgtatttttagtagagatggggtttcaccattttgccctggctggtcacaaactactggcctcaagtgatccgcccgccttggcctcccaaagtgctgggattacaggtgtgagccactgcggccggccacatcgatttactgagagagtaaggtccttgctgtgtcttaagagggtagcaagcatatgagtaactgcttctatgtagtagatattattttttggttgggggggtgggggtggcgttcaagtgatcctcctgcctcagcctcccgagtagctgggattacaggcgcacgctaacacgcccagctaatttttgtattttcagttgagatggggttttgccatgttggtcaggctcttctcgaactcctgacctcaggctatccacccacctaggcctctcaaagtgctgggattagaggcctgagccaccgcggccggccctatgtagtagatattctgaaactagaattccatttagggtagcctagttcttgtgctagcaaataatctgacttttaatttttatgctacaaaatgttaaagtcttctgttcctacgtgtcaatatgtagatgcaaaaccttttcgtaaatgttagctggttttcatggttaaatcgtcagaaagagaatgaaccctgggtggcaagagtgtgctcctgtcttgcttccccaccagtgtaatgatgtgtgtgttggtgcccgtggagcggtgtgtgtggagcctactcaaacgcattcatttccgatgctttaaagaaatgccctctcattgataataactcactttctgtacttttgtaaaacagagatgaatgacatatcaattctgatgtcaatcagttttactatttaagaatatttttcgtagccaggtgtggtggtgcccgcctataatcccagctactcgggaggctgaggcaggagaattgcttgaacccggcaggcagaggttgcaatgagcggaaatcacaccactgcactccagcctggatgacagagtgagactctgtcttggggggaaaaaaggaattattgttttcactgtgcttatagatccagtttggtaattattttttcctgctagattttatgtccttttgaatatgacgtcagcattctattgtgtttcacgtattcccaaatttctgtttctggccccagttcagtgttgtttgtctaccgtgtgtagtgtgtaactgctgtgggcaaaggagcacctaagttggtcagttacatgtcacttttgcttcccttctaccacggaggrcaagttaaactctatctcgcatttcatgtttgacatttcctttttttttttttttttttttaccttgctcccaaacagaattgtgacctggatcagcagagcattgttcacattgtgcagagaccgtggagaaaaggtcaagaaatgaatgmaactggaggcgacgaccccagaaacgcggcgggaggctgtgagcgggagccccagagcttgactcgggtggacctcagcagctcagtcctcccaggagactctgtggggctggctgtcattctgcacactgacagcaggaaggactcaccaccagctggaagtccaggtaattggaatgctctaagattattaaagcattttgtttgtttgtttagtgcagtctgcatggagcatggcctcaccgggtgcatatttagtttatgatacgttttggattggagtctctaattcactacaaggagacatcactgtaggtggagtactttgatgtaacatttgagaatgcatttattgtaagtactatgaaacaggttttcatattgagattaaatataagagatatgtttctagtgatgtagaaaaattctaaaaagcagaaagaactctaaagctaatcgagccatttgtagtttctaaagccagatatgccaatggcaatgacatccttagtgtgaaaggactcttccttctctctatgctaccacccatttcaaaatgcttttctttggcaaagattgttattgtttagttattttaaaaaaattaatatgtgcctcttagtcttttattctctaatctaaatagtcaaaggtgtaatagaattaatttttactgtgtttgacagaagacacaaaataatcacaatgactttacagggtagaagttgattttcctcccacatacaatagatcctggcagttgtgggctggtatggccttcacagtgtcagaaagttctggggcctgcaagatggaagcctaacataataagaaatgcctcctactaaacttactaaataaaatttaaggaacttaaaaattttcgatgatcttgcaaaaaataaaaaaagataatttccaaggacaagtgaaaatgtagaaacaacatctttaaatacaggagtagataagcccagaaagtaaggcattaactgatgctctggtgatcttgagatgattgtgggagggaaagaggctctgcttcatgtgagctgggcacctcaggtctggaaagaaaaattgagaaatggaaataaatgtcaaaaatggggaaaaatgagataaatctaaacccctgcaatactcttgtgaccagaataatatattaatataaatatcgaacccaagcccataacaattctgacgtttcaaccagagtatgtataagatcattctgacactgacacctctagagaatactcatgctccaacattataaaccaaacaatggaaaattccaccttgagtgtgtatgagaccagaatatgccaccccaaaatatgccactttagcataagtattattttaagctgattattttgagaaacagtagacacaggaaaagctctaaaaacagagtagaagtgacccttttgtaagggaaatttatatctaccaaggaagtctccatttgtaagggtgtctccctctccttactaggatgaggaggacagagtctctggagactctgatccttgagaaggcaccaactgaataatctgcctaacaaaccttactcttgtcttctcctctccctttcttcctttgccattgaagatggtattcaagcctgaattttaggcacctctttgagatttatgcattttttctgggtgtctcacatgtacagttgtccctccccatcaacaggcaatacgtttcaaatcccccagtgtacgcctgaaaccaaaaatggtaccaaaccctatatttactatgtttgttcctgtacaactgtataacagattggatttattatgttaggagacctatctactagttctttaatttgatttcccaaaataaaattcttactaaaaataaaaaaatcacattgtttagagcaaaattaaacctttacttattatctgaatattaaaaacaatttgagcacaagaatcctgttgtgtacatattcaygttctttaatacatttcctagtgcatctggctctactctcttatcaaccatattcatctgaaaattttagtcttcttattttgttttatcataaaattgcccttggtcttctccagaattttcttttatgagaatgaacttagaattattgacactttcaactgactctctctctctctctagaccataatattttaagaaaatatagtattctctctatatagggtctgaagtaccagtaggcactgagaaaattctgctaaatgtctaatattctctttatatttttaaattgaaatgtgtgattatttcaacccaaacaatagagaataaattctagtaaatttatggaatgtggtaaatgacagcagccttcagagtactgtatgatctatgatgatgcgctgtttcaccttgactttccactcatgtctgagtcacatctaacctctgatcaccctgtttctcatttacccctctgtcttgtggcctgccagccttgtgcttttggcaggctagggactggctcaggcaactctacatggtgcagttgggggctgcagggttgccatcctaacacttctccctgcaccactacacactgggggcaacttcctggcaccctacatgctgctactaaaaggcctctgtaaagwtatgttgcatctgtaaagattgggaaaagagagatggtgcatcccaggtcaactttcagatttaactctgtgttaaactaacagctaaactacaagtaatcctctcctgctcattagaactggagggaatccttttcagaactcttaggactctcccttattacttgctattttgtactccagttctgacttcaccttttaatctctttgaggatggagtttttgtccaattaactgtagttttccccaaaatctcttagaagagtggtgatacatgtttactaaattgcttcaaattgtaaacatagtcagtcattcaacagaactcctgtgcatttagcttttagagcgaatgctttatttaaaattatacagagaaattgagatttcatctcttcaaatgtcttggttcattcttggtttgagttaagactgaatggaatgatttgaaatgactatatgcaaacagtatgcctatatgattatttttcttcactaaaaatgatagcgtaaagttactagagcagagattcacagactctcatgtgcagaattatcttgcatgtttttccatgtttctttgatggccagaatggcgagaaaaaaaatcttctttcattctttttctgtgaccagaaattttgatgtatttgtctgggggtagaggccccaaaatgttggtactgaccatactctgagaaactctgccctatggctaaggttttccagccttacaattatggatcctacctgttgttctcacggaacaatcggacgctgggtgggagaacagaggcaggtcggtgagaggtgaacacaccaagccaatcacagcagcctgagaccattcctctttacgtacttcacatattaaacacataaaacatctatcatttgaaaagatgaaaaaaatccttggttatacaatgtttgaaaacctgtgcctcagaaaaagagattaaaagaaatcccaattttctgtgcttccagagtcttcaattttaacttcgaagaatataagtgctggctggacgtgggagggctctaatgggtgaatagctgggctgtagcctcatatgttgtcgaaacaaatggaaacttctgaaacccgagaaggtgcctttcaagtatttttagttggcaaaagataagtggtcaacatgagaggtgataacatgatgtacatgaagaaccagttacactgttggtactaagaacgcaagcatgtcacactaaagacttgtaagaggacgtcaaagaactggaacgagtcattgaagtagtttttacagcagtgccactcaagctttagtgctcatcagaatcacctgaggacctataaaagcacagatgactgggcccagaccagttggccttggatggaagctgagaagttgcgtttccagcaagctcccaggtgatgctaacaccgcgggcccaggggctgtgctttgagtagtactgcccgaaatagtaaaaaatagtattccttaaaatatggtcagtgaataaaatctatttttactacattttcaataagaacgttgagctgcacctgggctccagggtgcctgtgtgtaaattaccttcatgtgttattggtgtttcctaaatgaggcgccattcatcatctcctgacagatgagatgaagctattggacctagcaaaaaaataggaggctcctccaatatccgtcatacagttaacgaactacataaacaaataacgattgagtccttactctgtgccaagcacagtgccaggtactgggatgtagcagaaaatagaaacagacaagatgcctacctcaacggagctattctatttggagcagctagtaagtgtgtgttctatcgagaaacagcagagtcaaggggacaaagagtattggtggggagttccgtaatatacagcagccgcgaggcctgtgtgatgagctaaactgtgaggagggcaccctcagggagcatccatttgtgtgccaaatggcagaggcgacagcaactcgtgagccccaggcaggcccccgcccagaaaacgcagcagccagtatggggtggagcttggagcaggtggagctcggagaagaggatgtcagaaaaagggcagggtggagaggtcaggtagggtctgctgggcccaggatttgaccctgttgagaaaatttgacttttgaacaatggagtgacatgatctgacttcaggaagcctcatgctggctgcttgtgaaggaactgcaggaggaaagggtggaggcaacacaacccggaaggttttcaaatcctagaactgctgcactgcccagaacatcgcgaacgggccatacctgcaggcggtgtcggtgagtgcttgccgcaaacctggcactatagaaaccctgtttccctgaaatacctcttttaattccttgcagccttgtaaggtagaccatgttcatatcctctttatagatgaggaaactgcagagaccacttgaggaaccgacccagacaattcaagccgtacccagggaccgtctcacttcagagcttatgtaaaatatccagtagcctgtgttttcctgaatatagctatcaggtgaaaggaaattttgcatttcctctagatgttttggttagaaagtagatatagtcttaaaatggacctttttgaagagtcatgttaattgatttcagccaagtagtcagattttaaaactatatcacaaggtatactactttttcagaattttttgcttttgagaaaaaaaaaagaaaaactgtggccacgctggccagtctggtctggaactactgacctcaggtaatccactgaccccggcctcttgaagtgctgggattacaggtgtgagccaccacacccagccccatgtttttgcttatatgcttccaaaaggagaggagacatgtcatgaaatagagcgggaaggagtgtcagcatgcaattgacaaaaagctgcggagaggaataccatgccggggcagcacaggctgaggctggccccgtctaccttgtgcttttgttcgtgcctgtttgggttcatgcctctgtgggaattgttttgctttttgtggttggttatctgttttgaaacataaagaaataaaaagtaactgtgggggagagtaggtgagaaatgacagcattggttgttgaagttaagtaaagtacttgtagggagcctcaaaatgttttgatttttctgaagtcacctctgcaaggtcatattgtgatttcaaggggaagggagacattgcattcaagactccatgaggcctggctggacagtgtgctcttctaacgacaggcctctacaaatggtagtgtctgggtgtccctctcctggaggcctacatggccagtgaagcaaatcatttacatcttttactcttcaaaccctgaagtgtttcagaggacactgcccatatgccaagatggggagatctgcacttgacaggaatgagcgtggaggcagggtatttacagctggggaggtccatcttgggaatcatctgagcatcgtaattattgcagagtctgccaaaaatgcaggcaggctgctggattccactttcttaaagggaagataaagaaaaaatttcaaattaagtggtagaatttaactgtctgtaatacactcttttcaatctttctaaatttgttctgagtaaataaggactaatggaaattttgtgaaattttatagaaggtgttattttgtatgacctgtagcttccaaacatttcatacataaatcaagaatttatggtctacttatgtaagaaaaacagaattaataaaatatctattatataatagaaaatgaaacccttatgacaaggaaaatatcactacattcttttttagagtactttttgataatttcacagaatcaggcccaaactcctacaccttcttcatctatttgactataattaattttccaaatgatacctctgatgctctgtaagatcttacaattcttcctcaatccccaaaggttgactacctttggtgttagaggtgtgttattagattctaattctttgcaaattaatgctcaatcttttctgtgcatgataattaaactcactagagtcccagtgcatcagtggggttgtgatttgcttcctgtaagaagggaatcaaatggccgataatttacttcagtggattaaatgaaaatcgtttgaaccagtgtttaccacagttcctggtatatactacgcactgaatacagaatttttgttgctagaaaatgcagtcaaaaagggtgacagacattgattttgaatccttgagcgcattcatggtacctgggctgtgatgtgtctgccatgcaaatgctaagccgactggcagtaagtgtgggccccggagccaagcaacttagcccgtcttggctctacttcttgctacctctaggactcggagaatttactttcttgcagtccaaagtgtgatctgtgggccagcagcagcaattgggagtttatcagaaatgcagaatcattggccccctatcagacctactgaatcagtaaccttcattttaataagatcctcaagtgaatagtgcactgttttgttttgtttttaaacataccaggccacagtttccccatttctcatacagagataaggaaaaagtacctaactcatgaagttgatgtcagatacttcgtgacaagggcctagagaaaggcctggaatataccaagtgctgactatctgttatccatttcagttatccctttgctttctagttcacatgtacaaaggcccaatattgtgctcaggctctaaaatactacctaggtttacagatccagggctacctgcctgaattgcccccagaacaggtgctaggtccccaacccatacttgggagacgtcaggttactctagttttggggtcagggtttttattttattttattttattttattttattttattttattttattttatttttgtatgaatctctttgtttacttaattttaaagtttgatcacctccaccacacatttggagctaaattagaatagtgggtgctctatgataatgatggatggcatgaggaataatacttcccatggctgtttttctggagtgttacattttcgttgttttccagccctgaatgatgtatggcatatgtatttgttttccattttatgttgggaaatgtagtactcttttttgagtacttcatccaaaaagtggataaattttctactgggacttgctcaaaggaccctttggcgatgagtgtgtaccccacttcatattttgaaagagaagattagctagggataggtcacagatataggtcacagggggcttaacaaagctggctctggcagtggatgaaggatgggggcagttaggaacaagttagctttcagcaagtgggtgttcattgtgcaatgcaaacacagctcttattctaagtgagcaggaagacggtggacacagattcagattgaatcaactgagcactgttttcagatcagggtcagtgcctcaaacaacacactgggaactgagtcctgctaatgtgtctttttggatatttcctttttttttttttttgagatggagtcccaccctatcacccaggctggagtcaaaggtgccatctcagctcaatgcaacccccacttctcagattaaagcaattctcctccctcagcctccagagaagctgggattacaggcacccaccaccatgcccagctaatttttgtatttttaatagagacagggttttaccatgttagccagactggtggcaaactcctgacctcatgatctgcccacctcagcctcccagtatttgggattacagatgtgagccgccatgcccagcccgtctttttggatattttcatgattcaaatacatggatctttacctagtcaaagacggtccttccttagctgcaagaagaaagtgtgtatgcatcttcatgaagttgttctgtttggagataagacactcttctctaaccccctgaaaactaaggcaaacattttaatctagagcgatagcttaggaaagtatgatttgaaagttttcacagattgttgtttgccatgtaatttctttattgttacaaagaacataaagtcacagcttggtgagtgatactctggcctgagtggttattttaaaaagctgcttattgtgtggacttttttataccaataaaagatttttgatgataaatagccagccagactctttgatttctaattgatggatatgaagttgcctcttttttaataatagttgactcatttaatatttttttacttcattaactctcccattgtggcatcattacaattttggtggtgtctcatatttaacaaatgaatacaatcttggggaaaggtggaccaagaattctaggactagaagttcctacaaatagtgaggaaacatacttcaaattgagcgtttaggatttccttttatgaaaatgagaatgagtataccttgcatattttaattaatacggttagcatagttgctgtaacagttatttattttggatttgtccatttgtgctggtaaagtagaaccatagcttttattcatttgcttaatccattctcttcatgccaagaagaaatgttatgtcccagtaaaatatggacatcttcagtgacaagcaacagcagtcatttagtgggttgtatgattgctgcttattatggagaaacdgattagattagattagattagattagattagattagatttgttgcctgttgtcaccagcatgcctgtttcgttaacagagccatccactatttttcatacaggtgatgtttccagtttctctttcaattaccatttcgatagatatgctcctctcttggactccacggcaaataatttttcttgtttctgtgaagaaagaaaaagtactctyttaacatagttaatttaccaggttactgtagacaacagcgtcctgrccaccagaatagcacacgcaggtggtaggctgcccgctggaaggcaggctccaggaagcaggggcatttcctctcactctgggctgttgcagtacctaacacagtgctgggcacattgttgatgcttactaacttaataatatgtgttaaatgaatgaaaacaacatttgtttattcactcattgataagctttttgaaaatgggaaatatagttcattctcatccaagattcccaattgtgggtgtcttagcccctttgggctgctatgacaaaatacaaaatgagtcagtggcttataagcaacagatatttatttcttccagttctagatgctgggaagtgaaagaacaaggcacctttaaagctgatgtcagccgaaggctgcttgctggttcatagatggtgccttccagccgtgccctctcatggtggagggagcacagcagctctccagggcatcttctgtaagagcacgtatcccattcacggtggctccatactcatgacctaatcacctccaaatttcttatgtctgaatgccatcacattggtgattaggtttcaacatctgaattatttggggacagaaacagtcagaccatagcagtgggagaagtttgcattcctgaagcagggtctagctcttttgtcagagacagacagatgacttaaccattgcagtcaacactagaaggtaccctgacttcaaaattctatatacagataggcaaaccttattcctgaattcttcacctgacaaatatccatgggaggtttatgttgcacctgcccccaatacagtgatgtatcgtttagtgctaccatgtttgaatcacagcttcctaacagctacattggttatttccccaaacattaaaattcaatgtgtgacagctctaaaagataagagtcagcatgtttccttccctctttatgcacacttgcttcttcatttctagttcttttcatgtgccctagacttttcttactttaaactgatagggaattattttagaattctcacaagagaaaatgcaatttcgaccttttgacttagtcatttatactctcagagtttatgataaaattatattacagatatacacagtagattatctagaaggatgttcaacactgtttatattagtaaaaaatggaaaactatcaagaggtacaaccataggttctgaatgtttggcagttctmtaaaatgaaacactatggatccattgaagatgatgttgagaatattatttaatggcatggaaasacaccacatgacaaaattcaattccaaattactgagtagtttgtgatcttactctataaaaaataactaaccatatatatccccgtttatgcatgtgcatacataaagaagaatattaaaatgcagatgcaagatttaatagcagtttcttcttgtgatgggattgtgacttatttttatttcgaatatttggtttatatgaactttctagaatgaatatgtattactatttaagataagaaagaaattcttcaactgctaagcatatctaatatactggatcccaaggtctggaaatgtggctgcttggagactgtaactcagcactcccgcctagtgggccccggagtgacttcatttccttagggccttttacataacctgggctcccctttgatcatcatattccataatggttgaggcctgagaatctctatgttgaaggtttcacaggtgattctgatgagcagccagttttaacacttcatgtactagtgttttcctgtctcctgatcctcccactctcccctcttttcaggtagagtgtctggatcattcatctaaacctattaactaggagtacgtttgtggccactcagattgtggtctcttaatactgtttttaactaaaaaagacaaggaatcattgaagaatagaagattttaggcctgggacaaatcatatgcaagatgaaccttgtgtatcttgtgtggctatcttatttgaaagctagtggagattatgaaatcagaagggacatacttgaaggacacaggggctaatgaagattcagtgtcccaagatgggataatccaagatgaaaacaagtgtaatctaagacaaaaaagttattgaagacttaacaagtcataattttgctaaaaaacccaaatacattagaaactcctggaaataactagagccctaaaatcaaactcaggaaattgataattaaaaaaataaaataagggtttatctagcttttcctgtaagaattctatttcaaggtaaccaaatagccctagtagttgaggaaaatttttctttacagagaagtttcagacaataattggagatgcattgcgaaattagatattcaccattttgcaagtcctactttattctgccaacagatataaatagatgaaacaattagatgaaagtgaatgggttgatataagtgaagggaatctggctgatgccatgtgatcaatcttaggatcagtggaagtgggacaaccagctagttacacattatttataattgaatctgggggatggttactcattatacaactctctgtacttctgtgtactcatcaaaggatcaaaggaaaagttctttctagcatgtgtgtgtgtgtgagagagataaataaatgggaggatattaaaccattgactttggggttatctgttacactggatggaaatctttaccaaacaaaaatgtacaaggtatctcagcctctacaaagtggtacagctccctgccaataggaaaacaagctcaacgctgcaccaaaaggacatctagttgtctatttggcccatttctaagttgtggctatttttttacactccattccctgcccccccccttataaataatcaaaacggttttcatttgtttgtttttgagacggagtcttgctctgttgtaacccaggctggagtcctgtggtgtgatctcggctcactgcaacctctgcgtcctgggctcaagcgattctcctgcctcagcctccggagtagctgggagtacaggcgcctgcaaccatgcccggctaacttttgtatttttagtagagacaggatttcgacctgttggccaggatggtctgaaactcctgacttcaaggtgatccctctgcctcggcctcccaaagtgctggattacaggcgttaaacactgcacctagcccacaaaggtttcgttttgttttgttttgttttgttttaatcacagaaaaatgctattttcatccagatgaaacatggccttattttttacatagttccaatgagactgttaattaaccagataggcctgcttgagtttgctttacaaatctatagccatataatttgacccagataattaattctgcctgagatttttttttaaggaatcttagatttgacttttaaaagcctttattatttgcttttctttctcaaagctcgggaaacaattccaagacattctctccaccatattttgcctgcactgtatatataaattgggatgaattcctttcttcttgaagttctcaggaacaggactctaatagccaggtagtaaacctgatttgtccactgggcttcgtaggcactagctacgtgtctcgtcagttttccggactagcgtgccgctgtgtttgatgaagtgagatttattctcatatataattctccatgtgtatcctttgttgcataatcaatttgttcaattgtatcctggtaagatgagaacaaatcctaattgaacctatgttaataactatgttctcatgaaaaagtaaggagaatcagtaaaagtatttctttctgcctttcgaaggatgctaaaaatcagatactacttacagttttttaaattttatatgcaaaagcagctggtggctcacgcctgtaatcccagccctttgggaggccaaggcgggctgatcacgaggtcaagagatcgagaccatcctggccaacatggtgaaacctcgtctctactaaaaatacaaaaattagctgggtgtggtggtggtgcrcctgtagtcccaggtactcgggaggctgaggcaggagaatccactgaacctggaaggtggaggtggcagtgagccgagatcatgccactgcactccagcctggtgacagagcaagactctgtcttaaaaaaaaaaaaaattatatacaaaagcaatagtctattatatccaaagtgatactgatgaagaagaaagagaacttcatatatccataaaaattaacattaaatgcaatactaaaaacattcaaaataagtagccataatttaactcatcagttcatttgttcttgtgtaattaattgttattttttggatcttgggttaggtgctagtttcatgaagaacatctatttccagactaaaataagtcctggaaattctgattcattccctggtacagtctgaaagttgttgagctgatgtcagctctaacgccagtacccaagagtctattctttgaagtatcagtagttcagagtatctggcacactcctttctgagaagtctggaaacaggagtatacgctgaagatacaaccccaggcctgtggtttatagcacagttctcaggcaagcatcagatggagacagaaaccagtttgatactaataaaaggctggattaattactacagtgaccagcaatatcagaatgacgagtgtaaaataaccctttgtgacacagtgtatgactattttataagagtttgatcaatgtttctccggagagtaagaacatatatataatggacagcatgggctctgatgactctccttggtcttcccataaaatgttcgattagtaacagatttctgtgcataacatttcatgtacacaaactgaacccagggaaggctgagcgtccttctgatttgacagctcattccatagctcttctgtagtggggaggtgattaagaaatacaaaacccttgaaacaaacctaaggctttccagctcctctctccaggragcctgtgggagattttaaagccagttttaagtataaagtatattgttgaatttttatggtctatatttttaaattttagatctgatcatggggctggggggaaattaaagtagttgtcagagtagacttggtcgtttggctataataaaatcctaggtgcctttaattatcgatttaatcaaattaacaagtgttcaaaaataattgttggtaaatgtaatatgattgcagggaatcttggttcattcacaagtgaggaaactttgcctttcataattgtagatttttattttctaacactatgctagaatcaacacaaagcagagattattctggtgggttataaaatctctgctttctggtcatatcacacaaaagggaaaaatagtatttttactatgccttggtaagaattctaagatgaatttattaattcaactaagaaaaagactacttttaattttgcattaatgcattggaaatataggttttatgagatcattttcccccttaatttatctcacaaataagccaatcaaaattaggtgaattttaatatattttatagcttcttttcagacataggtgttataaacaaaagcagttaaaattcacttccctcaaattttccacaacttgctgtgttctctcaagttttatctttcacggtgtcatttcatatactggtacaaaacaacactttgctttagggaaaaaataccctattcttttcattcttgaaaaagaaagctcatcccattactttggataaatcgttgtatttttctgttactgtttcttctatttaagtctcagccaccaaatccgattataacttgtattcaaaataagatctttgatttcacaaagaaactggaaagtcataataggagagctgtgtgtcaaacacaaacattttagcagactaacaaagctataaatatatatagtacaatttttagagctacaggctcctaaagtagcaaaactaaaacaattaatgtgactcaaaaatatagccattctatagtatgtataactaaagggccaaaaatatgtaaactaaatattatgtctgtttatcattgcttttgttttcagccttaatacaaattacctagctgtctgaagatcaatccatgtttgcaagttatatataaagatataagaacctactacagaaaaacttgccagaattattattctatttagtcagctaaaaatgtatatttttcaaaaaactttaaaattatgtcactgtaatgcaagattttgtgattgaaaaatagtttgagaagtacgagaagttcggattaagtacgcttttcctgggaaaccaaaccccaacctgttaaaatgtaaaatagaaaccttatcacatatttaacactgaaaaatgagagaaaagtttttcctttcttaaacccaaattattaaaactgttccattgtccaaagattcaccatatgtatgtgattggatttctgagcaagcagtttctataagaggagatttttccctaaaaatctagaacacttgaagtactcagagtttgctttattttctgtgaattttgccggtattccatttgtatatgtcatwatttatttttcttcaacaaccaaaatctattttttgtggttctggaggccaaatgtccaagatcaaggtgttgtaggtttgctttctttctaggcatgtctctttggtgtacagatggccgtcttctccgtttcctctcacggggtttcctctacataccctcttgtctggtgtgtaaatttcctcttccyataaggacagtagtcagattgcatgagggctcacccgaaagacctcattataattaatcaaatacagttggattaggaggtgctgggggttagagcttcaacataggaattttgacgtaattcagcctgcaacaagcagggaaacatttcacacaacggaggcaacagcttttgtgaattacagatatgtagacgcaaagccatgtagagaatttatagcttcagtcctacaacttcagtcatgcgtcaaaagaagatagagaatcacaaaaatgtaytagtccagacctcaaagagctgttttcctccccagtgggcatatgatttttaattgatctgaggtcaccaagagataagtaaacacaagtgacttacacatagtctctgttgtctcttattcaacaaagaataaagctgtgtcatccaggtccagagattgccagtcagactatcaaggcaattcccaatcactgtgaccaccaaagggaaatagattattgtgagtctgtgctccaagcaaaaccaaacacacarattcagaaaagaaaaaggggaaaaagtggagaaccccggttgcagatttcaagatctgtctgacttcaggaactattccttagtatattagtccatgaggcaaacttcctggaaatgaaggttatttggtccatttgagcgtgacctctaaaaccattaaattataatttccagtaaggtaaaatagctgttttgctattttatattatattatattagatattatattagatataaaatgtacaagtgtcaaaaattttcttcaacctattacttaatgtgagaagcagcaagctgtataaattggttcaaaaggctttggaaaaattagtgtcttgattatagataggtaaatatgcaatttaataaagagatgttagcataagattgctagactagatacaaatcttgtcaagtgtttacagggcaataaaccataatatttgaggttgtctgctccactggacagaaattctttgtatttccactggaaaaaagtgaaccactgctcctaccgagttgtaaaatagcccatataataaacctacatcrcattgaaagagtaccagtaatctctttggwttaattctaagtttcaaattttttttgattattaagagaatgaaactaaaatagtcctatttaatatgtaaaatgttttggtaaatatactttgctccctgcaaccattacatcaccagagagatacaatattttacgctcaagagaataataagtatttccctttcttctaacagtttgtgaaacatttacacttacattatctcttagggccataattatcattccttcttttatggagaactgagagtaaagatgaaattgttggccaaactgtcatagctaaaagatattgaggctaagattggaaccactgtcttttgattcaaaattccatattctttgaattagatcaaagtgtttatgtgtacttgattagattcattagagtcatcatgatttggaagaatcaacattaattccatataccctgatgcaaaaacaaccacttcaccccaagctcttccaaaaatctttttttatttttttggtaaaatctttgagtaatggtttcccaaataaagagatgtctactttccatggcctgttcatttggcgtgaatgcatatacctgttgacaggacatacataactgacagaaaaaataattttgacagtgtttggagctactcaatgagaaactttatataataatttgaatttgtcaagaagttctataatccttttatatatttttaaacacaattttgtgaacttgggtttccaaactatcttagacccatttctaaagctttttttttccctgtcaaattagttccaggtgaggaaagagcatattgtgtatctccatctctgtactttaatacagaataagattgaatgtgcccagccctagaccacaacctggcttcttactcatcacctccctgggaattccatcaaaatgcaatcagtgatccattcaaaatggcctcttgmatttaaggtacactgatgttgtagaatgttaatattcgtaaccacttagctgctgaaccagacaaaacagaatgacaaatctagcaatgcagttactgttgtttacattctgcttgttaggttgcattacaaaattggatgccaagtatataccaagtgtttctaaagagcaactgtttttcctcagtgtttctatggtttacaataattggtccaaagggagctatctggttttatgtgtttttactcagctgtttgacagttgttgcccataactgcaaattattgatagattgatggcaccatatattcgtgaattacatccacagtccttcatgattggaaggaaacagtaattcttgaaaagatggaaacaaaacatttctctaaggaataatatctaatttgcattgaataattagctcatcatctttcttttccctaagaactcactgagatgtgggatttgatgctagtcaaaaatctccattatcctccttatagacacaatgaggttacactaaaatatgcatattaatttttgcattctttgtagatcttcagcaaacttatctttgaaagtctttgaagatagtagctaatttaaacaaactgagtactatgtactagaaacctctattaaactcgtattaaatgtacctgttatactgatacttcacactgacagataaaatttcaatgacttttttttcaaatgatcaacctgtgttaaaaccaagttttaatacgtttatacttgaagcatttttgtgtgtgtgatgttaagcttggaacaatattcccctttttctcttttgttaactaggagagcatgctgaagagctgtcattgataagtccttgaatgtamtttgatggcttcttattaacccttggagtctgtgactgctatacaacttcttagttctaaatgcaaaaatttatatcccctcatgaccttccagcaacagcagaatgtgattttgtaagacattagcataatggaaccttttcaataaaatgataaattgagcccatctcaagaaaacagaacacacactggtaatttattgcggtcattgccatgtggaggaccccattcatagcatatgcttttagctctgatgagaacagtgctgttcttcagatcctacaagtctgcaagattggctgataaatgttttttttttytwaaggaaccaacagctctttgggtaataggcatcattacatgacataattatctcacaaacatgtctaattattctattgttttcaaggctctttcatgtaaatgtaagtgttgaatataattccagaatgtacagacccctttgtccttaccatgaagatgcagttttctacggtaataaggttgattgccattttgcaacagaaggcgaaaatgcagtccagaaactaaatatgttggggcaaagaggagctgcctctctgtaggtgtaaagcctgcaacaggtgagggtagacatgagtcatttttgtccagatgtacctcaaagttgtttcactgccagatgttgatggcatttgttgctgtgagtagtttcctttaatttagcagataattgtgaaaatgttatcaaaatatttttgcatgagttaatagttgattgttgttcaagaggcatttacatctaggaggcaactctttgtgtatgtattcccactaaatggtttatgtacttaggtacattttacttgggaaggatccatttagaaaataaaggaacacattacttcaatagcatatgtcgctctgactactaagaggttcatgttaggcagtctgctttctgtatgaactgagcaactttctcagtttctggcctgcattttctgccattggaaaaaggtaaccaaccttaacactgtggaaaactgcattttcctggtggggacaaagggacccgcacctcctggattctatacttagaatgaggaatcacacatacaacagtgaaatgaggtcacccagtgtgtgcatgagtctttgtgtccatattttgctctgaataccaggaatgtcaaactcaatgtaaaacttggtggtaatttgtaggttgtgaaaaattttattttttcttctctctttatgcaatttcttattttaaaagtgtcttttgtggctccttaattttaaatgtgggagtttattttagaattatccatggaatgtgttgtaattgaataaataaagtagtttgaaatatggactgataaattatataggtgcttgttgggggtggggggaagccaggaaattcagcttcttttaaattccttctagaaggaattctactttactagaactaaagtgacttcatcaaagttgaagaaaacctggcatatctgtgttagagaatttgctgatataattgagaaaacactgagtttcatgattattactacatatagaattcaatagcctgtatatatatgttggatatcatcagacataatacatttctattaaaatataaacatttgtgtgatgaagcattcaaagtttaaaataaagaaacttagggtagcttatactcttgaataaagtagctttcatttaggatagggaaatacttaaagtgacaatgtttctttttttcccaccaaatcatgcctatcaatataagtagggataagacctagatattataatttgtcttaaaacactttaaccacttctcacttctcaatcacaacctctctaattcatttatctccataaaatgatcttatctctacttgaactcattacactttactcaattgctttatctagcaatttattatgccaattctatgtcttttttaataaagtaatgaatatctagatgcatttctcaaatactgtttgcgttagcagttatatattgtatccttaagatttggtgctatttacttacaataacattctttcacaaatctaaataatgtagaaaacctyttaaggaaatcaaaatccagttatattttcctacatgatagactaaaataataatgatgatgataacagtaattgtaaaggcatcataaaagacattagacagaattgcagtagaagaggaaaatgggtcagaataacttgttaagttttaatcaactttaacatacattttctaatttaaatttctaacattgaaaggaaatttaaaaagtcaactccaaatctgctttagagtaaaatggctaaagtgcctaggagagatggaggcagggcagttctrtagtcttcaccacagtgattctttcaccttcttcaaaacatcattctagatgttttatgcttcacctttttatcagtgtatatgagtgaaaactcatcatatatgaaaaagaggcctccaaatgtgttgaactgaatggtactttggtaggtaactctactcttaagtattgatttatttccctctcttttctcagttttaatgggttcaccctaatgctttagcatttactcttcactgggatttggacgcaattatacagctacaggttgacttctatggtcttgattcccttgctgtgaataaggaggtaaacaatcagtatgatttttcaatgtacaggacaactttgcatggtgttattgttacttcctacaattaatatttctatatttattaaatatgcttctcccacaggcttcatttgctagcctaatttttcaaaatagaaataagttaattgcttctaatcagtaggtagccatgagacacatagcaatttttcgttaatatctctaaatttttcccaaatgatgaaattcctcttaaaagtaaaaacattgctgccagtccacacatagggcatgcgtgggaaggaaagaaggagactgagaaatgttggaaggtctgttctgtaacagcttttataccgcaagatgtcatttgcatagtcttcgaaaacacttattggatgatagaattaataatatactttcaaagatcttattttaaaaaatttttaattgtttttctctggctcctcatttgctcagagctgctggggagcttcccccgactccttgaaacaaaccttaatggcttggttagcaaagtgtcattcaaacctgagcgtaaaacctgccggttgggattattgacattcgtgaacaaatgcaaatgttataaatttcttaaccttcataaagatttactatgatgtgaccttggacctggccatagatctcatgagaacagtatggggaagtagtactcatgctgtkatattaggaagataacttgtgaacacagactgaagccaacatctgggaggcctgggttattgttttatttttgttttggctttattgttttaagacagctaagttgtatagagtagtgattggaccaaaatattaaaaatataaaaatagtcgagcccactggaggccatgagaacacccgtttcagctggtggtcttggtggtcttctactcatgccattctccctaattagctttgcactgtaatgcctgggaatgggctgcaagcagaattctcaggaggcttttgctcttacgctgaacatagtcttgaactttctcacccatttgttctgggttctttccttttcatgggttctcctgacatgcagttgagacgctcctcaactcccacgaagccgagatgccgtgggagtggaagtgggttgtatcacagctctgcgctgcgttggatggctgactctgggcttgccgcttaaccatgccgggcctctatttaatcatctataaaatggaaaaaatgaaacctttacatcataaaataatatgtcttttagggatttatgctcaaatatcttgcattacaaaatagttaaagaggtttgtaggaatctataaaatgtaacaaaacagaaacaaattagagccaggaaaaatatagataaaatagaaaataaaatctggggagatgagtcggccaacctgcaagctgtgttcctgctcagtgagaaaggcttgtggacaaatgtagttccagttttccaggagatgagcttgccatagagacgtattactacataccatcaaatccatagtgtacttactatactaattgtattcagtgatttatctaaaatattacatttaagcatttccctccttctctgaagtgtacattcagagaagtatgctagcgttttctctggtcatttgttggatacttgtgcgcttcattttgtgcatcattaaggaaatgtcagtgatcatggtggtctccagtatcatagtaagtaaacccttctgtcactggtrcacagccacgaccagaggagacccccttcgggcactgcacacgtggcccgtgcctcggcatcatcctttgcttcctgctccacgtgccttgctgcccacacagctgtgcctggcacattgtacctccagtggctctgggcaatgtgtggggagtggacatttcagagtctactctgagtcttctttctgtttctctaaaccagaaaaacaacagaatattctaggtcacaaccaatgcagcagaatgaataaaagggtgractttggggtcagccaggtagtgggtcctggcccagtcatctggcctcatagaaggccacttaactcccagggtcttggctccttttccagaaacaaggaatactaacgtcttccttgggtttttattttaagaattatgtrtgtaagttgctttgtctaggcttgatcagaattagagcttatgtcttcattacaagctattaacatatttatgtatagtcacgtgtcacttaatgacaacatacttctgaaaaacacatggttagacaatcttcttgttgtgcaaacaacatagagtatacttacacaaatctagatggtatagcctactgcacacctgggctgtacggtgtagcctattgcccctagacaacaaacccatgcagcatgtttctgtactgaatactgcaggcaactgtaacacaatggagagtatttttgtatctaaacattaaaaagtagggtaaaatacaaaataccaccatatacacatgccatgattgatgcagatggggcacatgactgtatgttatagatttaaaataccaaacacatatacaagccatatggcaaagtatgacagttggtacaattgtaattattaacaactcattcattttgctgatgaggatattgagaggagtgcaactacaattcaggtttcctatttcttcctcatggcttctttgtaacctaccacgtgctctctacctggataatgtaatatgtgcgttcttgcgtgtatgtacagggacaaaggagatcctctggtccctggactgagactgcctgttttctttcccaccagatggccagtacgtatctgggagagataatgaaatgcaccctcctacctcacttttttttttttaaccaaatatctgatattaaaatatcagatatgcatttatgacagttcatgttcacagtgaaacaaagcaccctaaacccactgcctttttgaatccttttggtgactgcttgcttattgctaaaatgttcttccttaaaactgggatgccataagcatgcctcctttctccaccttctttttgtgattgacaggtaaggcagaacccaagaagtattttcaacaaacttatttctagccattcggctgcctttgttgttgataggtagagcacttctcattcctaacaaagttgttcagaggagcactgaggcattgcaaacatttaacagaccactggagataacatgaacaaagaaactttcaataatatgaagaagaaaagcaagaaatcattatgtaaattgtttcactttgtggttaagtggtggtggtggtgctgttttgttgttgtttttattcgcttcactgactctttttatgtactaggtcttgccctattgtttgcataaatttctttcatgatttaaaattctttttgttttctaataatcacatttttttccatgctaaatttatctttccaagtcataaaggagatgtgatgagagactaaggaacaaccaccagaactattctaacctcgtaaaaagcatttctcattaaaaaccctgtcaaataaaaaataaatctcaatttagtaagagtagacgttattagaaaggattattgcaggggcttagggatgggctattcgaatagtgggaggaggatgggtgcaatagaagaatgctctgaccataagatctgcaggcatctcaagggttaggcaaaaggggcttttcttttcttttcttttctttcttctttctctctccttccttccttccttccctccttctctctctctctctcccattctttctctctctttccttccttcctctcctttctttctctctctctctgtccctctctctctctttctttcttttttcgaaatggagtttctctcttgtcacccaggcggagtgcaatggtgcaatctcggctcactgcaacctctgcgtcccaggttcaagcgatgctcctgccttagcctcctgagtagctgggattacagtcatgtgccatcatgcccagttaatttttttttttttgtatttttagtagagatggagtttcaccatgttggccaggctggtttcaaactcctgacctccagtgatcggcccatctcggcctcccaaagtgctaggatacaggcgtgagccaccacaccaagcttgggctttcttttatacaggggaataaacaagctagtaagaactggtgtggaggagtggggtggaagaaagacatatgggatagtaaatgagagagggttttaccctagggccagcttcttctcaggagaggctctctgctggctggggttgaggtcagggttctgaggatagagagaaccttcaccaaatttaaccaataagcatttctgattcatcagtagggacaagcaatccagctaatcattgttgaggcaaaggataggaattggaagtctggccttgtcctatgtagtcaacgggtacaagtgatattaatgtcccttccagttccaagtgcagtttagtgctttgagaatattattcagagattcacttatagcagttacatttttaccagtgttaggtgacacatctaattcatatggggaaagggggacctggcagtaagctgtttttgatcacactgaagggtgaggagtttctttctttctttctttctttctttctttctttctttctttctttctttctttctttctttcttcctttcttccttccttccttccttccttccttccttccttccttscttccttcctttccttctttctttctttctctctctttctttccgtctttttctttctttcctccctcctttcctccctccctctctctctctttctttctttctttctttgagacagagtcttgctctgtcacccaggytagagtgcaatggtgcaatctcggctccctgcaacctccacctcccggcttcaagcagttctcctgcctcagccttccgagtagctgggattacaggcaccagccaccgcgctagtttttgtatttttttagtagagacagggtttcgccatgttggccaggctagtctcgaactcctgacctcatgatccacctgccttggcctcccaaagtgctgggattagaggcttcagccactgcgcccggccatgaggagtatttctttaattttcattgttttccaggggctcagacctcaggtaaaattcaatcttgacaatatgcattctttatatgtaatgttcgtagatagctataacatcatttgtccacaatatcagaatgacggaggcatgtcgtaagactcatttatgatagtgctgcaagtcacatagatattcaaacaatattaaacatcgcctccagataagaatattacctggctaaaaaacaataaggcaatgtaattattacacaactggaaacacactcagattcccagtttacctctcacagtagaacttttaaaagcaatctggacagtaggatttagtggtaagttttggttcttcatattttaaatttcaaaaaaacctcacataataaaagacaaatatcccttaagcctctcattcagctagtttcctttgtataagaaaaataacatactaatccttttataccatttttttcataaagttatattttattcacctaacactggtaaaaatgtcactgccataagagaatctctgaatactattcccaaagcactaaactgcacttggaactggaagggrcattaatatcacttaccacccactgccagttgtttttccagatgaaaaaactggaggcacattgtgccgatgtgctgaagtccacatagcctgtttgtcatgctgtcatttctcccacaggacagctcttcaartgataacacagacggtgtctgtcaccrcagtctgccctctattcttggttctgcatctgcagattcaaccaatccataaaaaatacttggtggaaaagcagtaaaaaataacaataaatataaaacataatgcaaattttaaaataaatatgaaaagtattarcacagctcttaccttgtcataggtattacaagtcatctagagatgatttaaagtatacagtaggatgtgtgtaggctatatgcaaatactctgtcattttatatcaaggacttgagtgtctgcagaccgtcgtatccatgggcatcctggaaccaaccctcctcagatcctcagggacaactctatattatgttatataactaaattaaaacatatgacttgtgtcatttcttcyctggtaaatcttttcaatgaaccaactgaatcaaaccttttagtatataaactgaactgaaataaatcaaaattcagaatcctaaagccmgctcactggggcctggctccacttttcctcagttctgtctccccacctctgccccaactcagtgtggcccagccttgacatgatgccaggggcattctccctctgagtccaaaacattcttagttgcaaattgtcgtgtacctgttctcactttcccatagtatcctaacaacacattctctgcttttttcccccatcctatgttaggttcaatactatgattctgagctgcatctttttcttttcctcatagaaygtgtcaaaatcacatatttatttttgtcatcaactcttcagtatatgtcttagtccattttctgttgctataatagaataccacagtctggataatctgttaataaaataagtttattgggctcatgcttctagaagctggaaagtccaagagcatgccaccgrcatctggtgagggccttcttgctgcctcacatggttagaggacaagagcatgcatgtccattcgtatctccttctcttcctatgaaaccaccagtcctatcagggtgtcccctctgcgatgacctcatctaatcctagttacctcccaaatgccccacttaaaattaatatatgagcttggggatgaagtttctaaccacatgaaatctggcggacacgtccagtatttcttgaatgtttaaataagtgagtgtattcaataaaatggcttccccaaaagtggaaaattttttcgttaattattttttaattgaccatctttgtctataaaatgaggaggaggttttttctcctcagatattagagtcattttaatggcttcacagtatttcactttccattaacataactgaggctattagtttttaatccaggtttttgcatttgtgacactgcatcagtgaacatcttgtatgtgcatatttgtatagcatttccttagaataagttccttcaatctgaattacgagatatgcattatcttggtgtattttcagtcaatacattccttaatgtatcatatagaaatacttgcatatgctttgctttaaaaatgtctatattttttctaggattcacatccaaataatagccaatattaatgaataacctttacatatagatattggagatgttttaaaaacctcttggagagttaatattgaaatgacaagatgtgcctctttttgcagtattcacatgactttttgtacacaagggtgactataggactctatcaatgggtttcttttagaagtctccatgtggtattattttactgtaaggaaatatagttgttcattagtgctcatggtgatatttgtgcaaaataaataaacacacttttatgctggtgtgtatttcctcttttactcaattatttaccatgacttttttttttacccaaacataagttttaaatattgatctctgttaatgagctgcatcagaaattctccaatctgtattaattaatatcctctaaagcctgtagtttacacaccacgctttgtgcagatactggcattaaacagtcctgtaacatataaatgcataggaggtcttggcgggattttttttcttacttgattaaggcagcccctgatcactgacaaacttgtcaaagcccctgtgatctaaagaccttgaataaagtcacagcagagagaagaaaaaatcacacaaagccttttgctaatattaaaatgtttgaagtgactggcttaatctcaaccttgaggcaaatcaatgatttyataccaagcggctgctccattatatgcctatcctcagaaaagtgaaaggaaaagcaattaatccaccacttctgaggaaaagggtccattttccctgacattcaactggccatttgataaactgagctatatttagtgaggaagatggggatgaacccccaggagttggggagtgaggaggaaaggtcgcctttctcctggtcatcatccttttacccctgcaaaggaaaggaaggcagcccctgcagaagaaggggacagtagccaggcatgggaggggagctgcaaaggccctgagcacatagccttcaacaggcactgcaggtcagcaacagtgccgtgagctaggctcagaaaataggagtcaggagatgcagaaattgtcaggctagccaaatccctatgtggctgctcataccctacatacccctcgtttcgcataatcttgagataaagcctctctccctgttctgggaaagtgataccttattctgacactatgttagaaattggctttccaagggctgtgaaattaacctccctgagaggttaaggggtatggaagtggtcacagtgacagacccccatctctaggtgacaggtgatgacactatgatactgtggacacagcagccttaacccagccaggcccttattagtgaggtggggccagagaaattacagagcactgcatttccttagttttccttctgtcttctctgggagagattgccttgtttaattcatatatatttttctctctctgggatgtagttaatcatttgggacagcggatcaggtggttaaattaggcttcctgatttgggaatgaataggtaactctctaatttcacaataccaaaacctcagcatattcggtattaacctattgaatgggattaccacacaagtatgattttcctaggaccgtgctatgtgtatggctgttattttcccaaatgatcaaattgtgatatttcactgtcctagatacagatccagcaggcagctgatactgtctgctctgtctttccaggattccctctcacaccttatcactttgttgcagttctcagtataaataaaatgcagttcctcatctgaagagattttggggagttagggaacaccactgttaaattttttcccaatgacttcttacccatttaaaaagtatgcttatctatttaggcataactgaacttcacattctctgaaatcaatttgtaattacaaacactatttataacactgggacaataaatttggttttccctttcagaaagtaaattttctttataaacattgagaaatgttagtatttcagtttacatggagggtgatcaggagggttggcttctgtattagggaggatctctcagctctctgaaatattttctttggaaactaactgagtttagaggagagagagaaggagagggagaaaggaaaaggagagagagagggaggcatatttatctgaggtttccagtgaggagcgaatttcctcttaatttctgagaaagctgataagctatctatggaatgccttcagcacctccagcatttgtcstacaggaaccatcagtccaatgaatttacatcacattggggagacaggtgtctgaacccacgatgttactttgaaatattttttatgagatagaaagaagatcagaaagctacaacagagattttaagttattttcagatgggcatgcatagaatttttataaagtactgctttaaagagccatggataccttctcttcactgtgacttggtttgcctggtgcaagataggagcagtcaattaacagagtttcttgtagaatgcaattcattggcatgacagcaaagcaagaatgggattctctccaggctgttattagatttctgtgaccctcctctattgttcacagttgtgtagattcctatcttcaagttatgtatgctgttctgtattagaacatgaaattgaagtcagtagatcagtcctaggggacacattgttctgactaacagtctctggtgagcattattcaaattgtgatcagagcaatcactaaatataagtggagcaagtgaggaagttggttatcagctgagtgccttcctcttcactcttcccctggatcctcccagacttcaagcccagcttgcctcttgcaggattatttcaaagagggtgtgcttcttcccacttgcttctagccaaggagctggcttggtatacagcaaatgcagccagctacatcctgctctgtgaaccgtcactgttgtcatacttcttggctcatgccaacagatagacacacttacagttaatttgagtattcactggctccatataggccaataatataaaaattgcttcagtaagatatgctcatgcatatatacatatgtaatgactacttgatttcaacctacaaccttgctattcaaagttatgtttatttgcacttcagtttacctttacaataatagaatataagaattgtctggtacccaggctgtgaaaagggatgcacattcaattatgtttccttcaataaaggaaagtttacggagtgcaggctctgtggcggagtggttctaagtactcagatgtaatggtgaaaacaacaggcaggattcctagcctcatggagctgaccttatagtgggaaagatggccagtaagcaagtaattaaattaatttgctatataatttgagctagttatgagtccatacagaaatgtcaaacagatcgaaaggatacaggtattggtcgtttgtacaaaaacagactatttctgaaaggcttctctaagtcgagtgctggatagattgagggaactagctgtgcaatgttgagaggaacagtggaaaggaagagggaatggcaagtgccaaggccgagggcagatattgagtttggtgtatgtagatgtagagtggctggatctgggaatgaactggtgatctgggagaggggcaggggcagatgtgtgtaaagaatatgcataggtagccatcagcaggtgctgagcaaaggaataatgggctctaattcatgtttctaaaagaaaagcccagcctctgttggagaaatggctcaggcaggctgaaatggatgcaggtaatggattccaggtaagagcaggtgcttgcgtgggtgacgcttgtgtcattctgaaggtggtgagaggtggtctcattctggagtgatcttgatgataaaacctacagtatctgttgatggattagaagctgaatatgatggaaatagagaaattaaggatgaatcacagttacttgaacacctgggtgactgggggtgtttttgttgggatgggggagactaggcagaagcaggttttgttgaagaacaatcagggattctaatttgggcatagtaatttagagatggcaaggcagatgagtcagggagacaatttgctgtacaaatctgcagctcaaagctggaaacataaatttagcaaaaagcaaagggtagatacgtaagccataggactgagaagatcacttgagcagcgagtttggatagaaaacagaagtggtcccatagattgcgctgtggtaccttccatcatttagaggtgtacaaaagatccagcatacaacaccgcaaagcagcagctactggtggtgcatgtggaagcttgtggctaggctgatgttactgtgggttctattcttagtgatggtacttgagtccaaatatctggaaggattttgaaaaatcagaacagtgcaagattggagctctatttaaagacacctggaaataatgtttgtaaaccaatatgtaaagtgcaatattggactctgctaggcattaggtagagtcaattttcatgttttcgcctcattaaagtgaagatttttaataagctttgaatagctgtttgaagatatttataacttcaatmagctcacatatttatcagacattaatttcaaaccatttaacgatctttcagcaaagtgagatgagtgatcaatggactaagaactttttcccctaaatttcttgtttttcattttaatgaatcataactttatttttcaaattttaaatgagcattcacatttatacaggaaaggattagttctgggactctcattaccaatatttgtcatttttgaaggtggagagaagagtctctagtccctgtctgtacgtgtggttgaccaactgtaacatcggggacccacttatgctttgcatctaaaatgtagtgctccagatttctattttccacaaaatatactctaagaagycaattccacagcccttatgatgaatttctcttttgaattttgaatttagtgattttgtggtttgtgcatttcagttgaaacacgtctctctaaagcatacctgcttcagtagaaataaagactaaaggcttctctcttattacgtggttcaatccctcttgtaatttgctttatgcccaggtccttgaatgagctcagcgtagtgaggtttctacaccttctatttggagaattctctctacgataaacattgtgtctgcacattcaccaccaaacatgagaaaatagccctcacaagaacacattgatgtcactcaggtcactaagtagttaagttttttttttttttttaatggaactactggtttttaaaatacaacatcctttgtccatctttttggayttcccccaaatttcaatagaggaacacaaccttagtgttttctgtccagaaggcatgcacgttttctgtatggacactagggatggtgagaatgcatttgccagctttgactaagtagctaacttcacttttgtttttatgtcacatagggcataagaatggtagaaggctagtgcatttttccctactatgtttttcaagtttaagagtgaggggaagagagtaagattaattaatgtcaaattagacctcagctttgtaccttcaggtagaggtcaagcacaaagtgaaaatcaacaccataatttcataatttgggactcacatatttgcgccatttctaaagtaaaacaagtgtttgtgggtgtcagatttattgatcattgagagagtctcttacatttaaactataattggatatgttttgggttttcaaaaaccatgattttcaggaactgtgttctaatggatatagatataaakggtagagagagaaaaaaaaagtagctaaattattccagataatgaaaagcaagataaaatttgcagtggtttggtttattacattaaggtgggggaaaaaaacccttattttcaaagtgttgcatagctaaaaatgaatgcaatagtcaatgagtaaagggtgtggatgttaagagaattaacacacacactaaaatttggactttattacagagaaatcataccaactacgtaaagatgtacatatgcggaagactgtatgcaagtcccatacgtatactaggatagttacgtaaagttaaatgtagatatatacactggttatccattgtgctcctcctgctgtatgacaagaagactgtgcatttgcaggagagccagccaggcagccagccggctgtcagcactttctggccggatcattagcgcagcaagagaatgaacttctgtgctcaggattaggatttcctcataagtagcagcatataccaaggaggggactggagccatgactgattttgaagaactgatttggcctgagccagtggctgaagcagcgagctgcccatgcctaggaattcttaggctcaagttaatcttgttatactcatggagtcttcgggcagttcacgacttcaaaagattgagatcagcctgaccaacacggtgaaaccccgtctctactaaaaatacaaaaaatagctgggcgtggtagcaggcgcctgtagtcccagctactcgggaggctgggacaggagaatcgcttgaacccaggaggcggagattgcagtaagccaagattgcagcactgcactccagcctggcaacagagcaaggctctctctacaaacaaacaaacaaacaaacaaaattcttggtgttcctcctgcacaaatccctcccaaatgtctttgcagaatttctcccaaattgcagtaatttgacccacatggctctgctcgtgaggactggtttcatgcttgttgtgggcctttcccattacagtgccattgtggaaggaggagccctagggcccctatccacagcacccaggaaggggtgcagcgcagccttggaggggagcactctctcctttctggtgcctgcgtgtctctstctctctctctgtatctgtctctgcctctgtcttgtctgcctgtctgtctcaaagcgcatagccctgattyttatttttctgcttttctcagtctctctttttttatgagtcttttctttcttagggtaagcactgactctttctccttaagttctttctaacctgcccagtttgatctaattttattattattattattattattattattattattaaacttattgatgccttctccctacctgtatgcaatagattcccctgggggatcattgcttccaactctttccatttgtatatacatatggtttcctaaacatatatgtttaggaaataaaataataaaataatagaagtataaatatataacaaaagwatatatatatatatatatacagccctacattaacagcagtcattttctgtagccagcagtttacattagttaataactatttcccaggtaaatccacattgtccttttatatgagatttccccatatatgttttctgaagttaaacacatcagctacatctactgtcaattttgttactgtgggttgatacaacaaaatctttggtcaaagcacatttattaagcctctgctgtgtgttcagcattggagttggctccatggagggtgcagagatgaggagctccaaggtgcatagtgttggggagatgtgcacagcagagatctcaggttctccaggtctctttggccacatcagtgtcaggttagtatgaaaaagaaggttagattaacttagaaatacttttcaaacttctgaagataccaaagagatgaaagaaggtatcccgatctctcagctttaaaaatagaccacaataacatgtaagcctgaatttctcaagttcaacaggtgctatggtttgaatatggtttcttctcacagaagctcctgttgagtcttggtcaccaatgtaggtgtgttggtttaaaggtggtgggaacttcgggaggtgcttgggtcataaggtatttacagtcatggatggattaatgccatctgacaagagtgggttcttacttttgagggactgtattagttactatgagagcaggttgttataaagttcggtcactctttgtgttttgtcttttgcacctgctcactcatagatgtgctctcaccacgtgttgctgtctaccatgttatgatgcagcccagacagggctgcccaatcttggacttcccagcctcaagaactgtgagctacataaatgttttcttgataaattacccagtctcaggtatactgttataaccacagaaaatgaaccaagacaacaggcctgtctctcccaagaacaccaggagtttcgggtaccactaacccagggcatctcagatgagtatggttttttataaaatttgatcagmaaatggctttgcactgtgtaaaactcttatagcagctcagagcaagatggcttgggccctggggattgcagcaacaaccttaattttttgccatgattttctccctagggcgtataatactagagtggctgggtcagggtgggtccgtgcccagaaagaggatgcagcagcatccaattccccaggcctacttccctcaagatagattccttccagaaggcctgcagcctctctgttaattccctttgattggcttctctcctccaactgggaaagtataaatgacggcacgcatcaagctttttctccaacttgtccttccccacatgcacattagtggatgtaaattcagtcttgggtcactttttgagggggatgcattctgagtagtccaccgttaggtgatcttggcattgtgtgaacatcatggagtggacttacacagacctgcatggtatagcctcgcacacacctaggctacatggtacagctgttgctcttaggctgcaaacctgtacagcacgtgaatggactgaatactacaggaaattataagacattggcaagtttttgtgtatctaaacatagaaaaagtacagtaaaaataccgtattgtaatgttataaaactaccactgtatatgcagtccattgttgaccagaacattgttaggcagttctgtaaactcagtgtatctatatgccaaatatagctcagcttggtcttagcttaaaccctactaagtcaaataaaatatcgttaagagataagaaaaggaaaaaaaaatctttttggggtatggaggagtatctatgaggggccatcgactcaaagcttattgtggtggtggaaggcacaaccaggagcttgagtgactaatttcagatgctgacaccacaccacgaacacagccaaatcagtctttgtagtccttcattccctgtcctttaaaaagggatacattggaataatagtaatatttatctcatatgattcctatctcatattacaaaacgacaacaacagctcttggaacattgttaatacacaatatcctaggtaggcaatgaaaagtcaacaaattttacaggtagagctgtgggaatgacatttcagggggaaaaaccaggacataagaaagagatacaaaggtaggaaaatgtgtagtgtatttgtagaaaggtatactgtgctgtttctggagcattatgtttgtgtgtgtgtgtgtgtgtgtgtgtgtgtgtgtgtgtgtgtgtgtgtgtcacgtgtctatttggaataagccaatatacacatacgtatagatgtcaatagatttaatcaagcattgatttaatttagtcaaataccagcctgtagaattcttcatcccaatttaattttgtttacaagcatatctaggagttccagcctgtcacaattactgcagtttatactgctgctactaatagtgctattagcagcactattattatgattaactgcctctactgagcttttattacatgctagctacatgccaagagtgtcaatcacatgaaattcttaaagtgccctcctattatggtcttctattcacaatatcaaagacttggaaccaacccaaatgtccaacaatgatagactggattaagaaaatgtggcacatatacaccatggaatactgtgcagccataaaaaatgatgagttcatgtcctttgtagggacatgtatgaaattggaaatcatcattctcagtaaactatcgcaaggacaaaaaaccaaacaccgcatgttctcactcataggtgggaattgaacaatgagatcacatggacgcaggaaggggaacatcacactctggggactattgtgcggtggggggaggggggagggatagcattaggagaaatacctaatgctaaatgatgagttaatgggtgcagcacaccagcatggcacatgtatacatatgacatatgtaactaacctgcacattgtgcacatgtaccctaaaacttaaagtataataataataaaataaaattaaaaaaaagaaaactaacagtgaggtgaagtaaaccagccacacgtattagtcattttttgctgtgtaataaattactactagtgcagtggctttaaacgacacccatttatgatctcacaatttctgtgagtcaggtcccgcatttcctcaggtctgacccgcagacattgtgagcagtgcttaactgcatcctccactcagggtctcacaaggatggatcaacgcattaattgggccatgttcctttctgcagtttgggattcatttttcacactgacatgattgttggcagaattcattccctgaagttgtaggactgaagtcctagctttcttgctggctgtcagccatggttgctttcagctccttgaggctcctgcaatgccctgacacgtgggactctcagcatgatagttcacatcttcaaagcggkcggaagctctatctccrtatcttcgtttccacaagatctggactgtttttctatgggagcttctctgattgggtcaggccgacccagggtatctccttttggattaattcaaaatcaaccgatttctgaccttttgcacatctacaaaaatcctttatctttggtatttaatataacctcctaataggaggatatctgatcatttttacaggtgccacctgcactcaaggcgagagggttacttacataggacatgtatattagggggctggaattttggggattatcatagaattctgcctcctatgttgtccaaagtggtaagagtaaaaggtcgttattcaaaccaaaaccaatgttttacctgtaaaacattgcattaaatctacttttatctttttcatcctttgcatcttatcctccaactggtacgtcatcttagaaagtgtattaactgttagataagattatgtatgattgaattagtgtctgaattctctatacctttaatgttctgttgattcttttgaaaatccttcctttttagagattatgtccttgtcaaacccagactgcaaagtggtaaagcaaagatttatcatctgacattttttccaattaatttgcatctgctgaaaatctttttctgaacttattgagttttacctgaatatttacatctcctctcttgtgcccactagtattctactgtaagcttcatacatttttcaatcatcttattttgagtaatgaaataaggccggagaagcatagtctatgtcaaattttggcttgggagactgaggtatttggctgacgattttggagcagttgagcctagctctggccataccactgtggcatcaatgggaatgttcagagttctctgctgctccaaatttaattgaagtctatgaattactgaataaagcatgcttatttgaagagtttaatagctttggtttaagatagcaaagtgagaaaccagggcttcaggaatatcttattactgttcatagtccagtaaatttcattcatcagccaggttactgtcacagcaatgacacatatactcagtgacaaacagaccagaccaattgaagaaggtctatttcattttgctgcaaattcagtgtcatcaactagcagcaaatgcaagatactgagctgggcactaggactgaggcgaacaaggaagaaaagaaataattccttacgcactaaatgaatacacatcatgggaagaaacataggcagaatatgcatttttgtgcattagtcttaaaaaagaaactattccagcaggaaccagtctttcacaccaaagcattctggtatcatgagggaagattttctaacaaggcatcagattggttacattaccattctccgctcttcactcatctaactctttgaaaataaacactcaccagagaatgggatagctggccaaagccatgcaggataatttagctcaatacattcacaatacatcccatttcaagaggagagtgaaaggatgaattgtaacgtttattgggaacttagtctctatatgcctgtttctttcactgcaaatccctgctgaaatccatgactccaaatttcagtcattcggtaagtgttgcctttttgagtacttttccctgacggctgcctgcccctccccttggctgcgccatgagtagaccattctgtgtccatgtggagttccgtttcctgacctctgccttgaacttgcatcttgacttttttttcgttgattgatttagtccctcttttaccttggttactggttgggtctctgatttgagaaactacctgttgggttatgctcactgcataggtgacagattcctttgtacctggtttgctgccctctgctttgtacttgaatcttcacttcttacccttgattgatttagtcactcttttacgtttatgttgaaaatttttcccccatgaactctggccttgctgggctcattcctgaagattccagactgtagttgcctgtttactcccttgtttgtttcttttgctatgccgaagctctttaattatgcaggtttaattaggtccctcttgtcaatttttgcttttgttgcaattccttttgaagacttaagcatacattctttaccaaggcctagaatgggaaggatattttctaggttttcttctaggatttttatagtttgaagtcttacattaagtctttaatccatcttgagttgatttttctgtatggtgataggtatttttctgtataggaatcaccatacagaaaaatgaactccaagatggattgtctttaatccatcttgaatttcattcttctgtatatctatagcctgttatcccagcaccatttattgaatagggagtcttttccccattgctgatgaaacaattttaatatatgagaggatatwcacagattataggcaaataccacaccatgttatataaaggtgttgagcactgttggattttgctgtccataggaggtcttggagccaatcctytatgtatacaagggagcaactgtacatgcctggcaagggtattttattttatttactattctccaacatcattaaaggcaaatactattagccctatttcatatgtaaagaaactaatcatttaatctctaaaatgtatttactcatggaccgaagaatcaaatcaaggaaacactaatgaatctaaacaagtgttttaattgaagatacccatttgtgaaatggagaaggaaagatattatctccctgaagtatgtttttttttttttcctccatgctgcggaggaccattggatgatgcacaagttttttcatctttattttaaaactcaagtgcattttctacgtagtgttgccttttactgttcattctgaataaaaatcatctctggcagaaacaagatatagtatctatgcaaagatccagctggcctgagtttgtaatatgcagtttaatatagaaatgaaataaagccaataatgaacagtagaggaagcggaagagctacagtgcaggtggcttgtcagtttttattaatttttctagacagggagtcacctatgcagtattagataaagaagtgtttgacagatctctgaatccactgcgttctagtagattttgtgaaagtttctgtcagagcaagtgaagtctttggctgatttcttattttatttatttagttatttatttgggcaagaactctctctgttacccaggctggagtacagtggcaggatcatggctcaccgtagccttgacctactgggttcaagtgatttctcccacctcagcctgccaagtagctgggagtacaggtgcatgccaccatgaccagctaatttatttattaatttttattttttatgtaggtagagacagggtttctccatgttgcccgggctggtctcaaactcctgggctcaagtgatccaccttwcttggcctctcaaagtgctgggatcacaggygtgagccaccatgccgaggtgtgtaactaaacaggcatatggttggcaactgagaaacagaaaagaagtaagaagatggatgttctttaattcgctgccacggaggaacaygagtggaggcccatgtgcattatctaccaccccatttgtggcaccaggtcctcacatagggagcttcactgttaggttcccagcactgtctcaatgtcaccccacaaagtagggtgytttctactcctggaatgcttattttgtgtccactgaactgataccttagtctcatgaatcttttaatgaatggtttccatattttgctatgcatgcaatttccctggtaaacttaaaaattaataactaataaacgaataaataactcatgtccaatccccaaccccagataggtggatttgcacagaggcactccagaacaggcctcactgtttccagccccggctgccatgctcagcaggactctaggctgccacacacctcagggttctgccctctgcagcatgtactacacagtgctgggcttcccacacctagtgaacgagtcacgacagcctcctgatgtcatgactccagggcttggggcctctctcagcaggaacacaggctgcacacaggagttctccacccctgctgagccaccaccatcattcctgctgcccagtgtcctyccccagaggggcttccgcagggagcggcctggtcagcaccgccttctggaaagcacctccatcacgctgctccccagcaagtgctcccagagactctaaagtttatgaactgtggtccttcctctggagggctgtggctggctgttgccacagcagcttagtcctctgaaaggcagacctgtcaccccggcgtgcagttctgtgctggagctgtgtgggacatgtctacctctcaatcgcaccctaaaccacctgtttcttttgcatagagatcctgccagaatgttttcccacacccctgctcacctcctacttagaagtcggatagattaaggattcctagatgctgttagcagggataaaggatagggaagaaaggtgaatattgcttacttattgagagacaaccccaagctggagccttaacaataccatgatagtgtttttgtctcccttgcgctaataggaattgtgcttctcagtagaatcttacatattcctctgattgatgtatttattaatactcttttaaaaatttaaaactgggcatggtggctcatgcctgtaatcctagaactttgggagggcgaggtgggcagatcacttgaggtcaggagttcgaaaccagcctgaccaacatggtgaaaccccatctctactaaaaatacacacacaaaaaattagctgggtgtggtggcacacgcctgtaatcccagctacttgggagggaggcagagtcaggagaatagcttgaatccgggaggtgggggttgcagtgagctgaggtagcaccattgcactccaggctgggcaacagagggagactgtgtctcaaacaaacagacaaataaacaaacaaaaaaatgtaagtagtgggaccaagtctgagaagccagagcagtaaggagaaggaacatgtggatgygtgtgtttgtttttctgcttccttcttcctacccccacacagaggctgtagaaagggatgtggaaaccatgcatatcaggagagagactgaggggaacaaatgattgggccttggttcatgtagcacatggagaatgtgtcaagaggtgctttttacagtttttctgatatgaatcattttccttgattaaggagagattcttcgattgtagaatagctgcattagttgagcatatacatttatacaaggatactatatttgtctgtacaccgaaaatcttggtgtttgcaatatcaattaagtattaaagtagaactaagtctattgcaggcttcacctggtataattatcatgtcctaattattactgccagttaaattaaacctaataagaagtatcagtttcttccaaaaccctgattttacccccaaagtgattttccttacttcaaatacagaaccaaaagaaagatttcatttttaaatataattttgctggctgtcaaaatcattgtaatgcaacttggtctcatcatctcatgatgggctcactgtgtccgtgagtggctgttcatcaaagtgtcctggctgtgtggccgtgtggctttaacattaaagcccaatgatggagcttcccagacaccgtctgtgagagtctaactagatcacattcctgccgccagatggtttggacaggtgatcaaaccataggtcatttcctgaaaaagccaggcaaactgggttttttttttttttttttttttttttttgagacggagtctcgctctgtcgcccaggccggactgcggactgcagtggcgcaatctcggctcactgcaagctccgcttcccgggttcacgccattctcctgcctcagcctccggagtagctgggactacaggcgcccgccaccgcgcccggctaattttttgtatttttagtagagacggggtttcaccttgttagccaggatgatctcgatctcctgacctcatgatccacccgcctcggcctcccaaagtgctgggattacaggcgtgagccaccgcgcccggccgcaaactgggtttttaaaagaaggacttttcactgaaattagattgtttaattagtttggaaaatctagttagaaagtgaagatggcctttcagacaatgatagtgtttcctgcagatagtggctgcagctattccccatcctgtccatttgtccatttggggtccagaagggtttaagttcattgcccttcagttttcttgtgacagagtctcactgtgtagcgcaggctggagtgcagtggtgcgatcttgctcactgctacctctgcctcccgggtcccggttcaagcaattctcctgcctcagtctcccaagtagctgggattacaggcatgcaccaccatgccagctaatttttgtatttttagtagagatggggtttcaccatgttggccaagctagtcttgaactcctgacctcatgatccacccaccttgccctcccaaagtgctggtatcacaggtgtgagccacygcccggcctgcccctcatttttatttcagttttgctcctgtattcagtgatgcccatcaaaagcttcatcctcaactccaaagccaattagatagaataaacaataatttcaatagtcttaatactattaaaataagactccatttcttaatgatgacacgaacatggtggctgtaatgtaaccttccctgcatgatgtggttaaatgaagatttataaccaatttacatttaatcttttgacaacattcatttagtatcaccagataacagaagctgagaaacatttagtttagaatcctgacactgtaaaaataattatcaaattgcatgtcattttaatgggcctggaagaacattcctcattatattgtcacagagattaagttattttaaggccagttgattgtgattttatcttttgcaagctgaaagacttttttataccacaccattagtttcaagtctagttatttggttcctccacataatatttaccgtttttattcatcaacaccagggagaatgcaataaaatgtagccttcaccttcaaaagaatctaaagcctggtaggagagataaaattatctatgggatattgtgagatagaatgtagcttacgacccctaagaatgatgcaactcaaatgtagtgggcatttagggggaggggatttacattaaatggaggaattaagtaagacttcctagaggaagtggtatttctgggcccaataaggttgcagatggggaagtaggatgaaataaggattcctagatgctgttagcagggataaaggatgaggaagaaaggtgaatatttattgcttacttattgagagacaactccaagctggagccttaacaatcttctctctcctcaaaaataagatcctaaagtataatttacaaaaggtaaaattataaagcaaatataaagtgaacacatgtaaaaatttttatttaatcttttaatgaatgagggacatcataagataccatgaccaattcagagagccttgagaaattagggatctatctttctatctatctatttatcaactaagaaatttccgccaggccacacattttgggtgttatctgtttcactggacagaaattatttgcatatgtactggataaaagtctgcaaatatacaggtaacttccctggaaccttcaatctgtgttaagaaggaattcattcccttagacctgtgttgcccaaatttggataaccactggacagaactggctgtttaaatttaaattaaacaaatgtaaataagatttaaaaatgaattccttagtttcaggaaccacctttcatgtgctcagagccacaggtaaccagtggctgccatccccaactacacagagagaaccatccaaccctgaagaaaggagaggaggcagtctgtgctgtggtttctgtcttgactctctagggaaaccacgattctgctgctcaaaacctaggatactggagatagaaaagatggtacagctgaaacaaagtgcgtgcaattggaagtcatagaactctgggtgttgaattggccccacctctaaacttcccttcccttccttcaggtgcctatttgtttgatctgttcccctttgaaggtcttcctgcagtgtctcctggcaccttggtgttcgtgtgtgtatgctgtacgtctgagacctgaaccaagctccagagagataggggatgtgtctggggtcactccctaacagcattgagccaacaccttttgatctagggtgcatggctgccttctggcctcctaagggtatgagtggatgcatctggatagaacacaggatcatgggaaagtgaagctagaataattccagaataggacatcaaagaactttcaatataagactctattacttcttactattcatatgtgtgtgtgtgtgtgtgtgtgtgtgtgtgtgtgtgtgtgtgtgtgtgtgtgtatggtttttttttggaaatatttttactatagtaataattctacaaaatatayattttttttatttttttaaggcagggtgtcattctgtagcccaggctgaagtgcagtgacaccatgttagctcactgcagccttgacctcccaggctcaagcaattctcccacctcagcctcctagctattcctagctggaggtacaggcatgtgccaccatattcagctatttttttgtttattttttgtagagatgaagtctcactgtgctgcccaggctgatctcgaactcctgagctcaagctcaacttgtctcagcctcccaaactgctgggatgacaggcatgagccactgtgcccagcatcgttttactattgtgagcatgctaggctccttcccagttgtgtatgcattgtgaaatacccttcacggtgtttcggaatacatctcagtgttattctaggatttgaaaactgttaaagggaggcttgtcttgattgtttyattattttctcacaaactactagtgttgagtccatgagatttcccccaatatttattgttaacattattgatagatggcatcttgataggtttttaatattcttctgtttctttaggaccaccaccccactttctaaccatcattctcccttttcccaaacaacccaatcctttttgcagacaagattaaagtacatttagaaagctagatactgactgataaattatcaatttatatcttcattttttttcctattgactgctaatatagtcatgcaccacataaagacatacagtcaaggatggaccacatatataacaatggccccataagattttaattgagctaaaaagtttctatcacccagtcatatcatagccctcataatgtcacattaccttttctatgtttagatatgtttaggtatacaaatacttaccattgtgttacagttactgttacagttactgcctgcagtattcagtacagtaacatgctctacaggttcatagcctaggagcaataggctgtaccatagggcccagctgtgtactaggtgatgccatctaggtgtgtgtaagtacactctgatgtttgcacaattccacaatcgtctaaggacacatttctcagaatatatccctgttgttaaacaatgcctgactgtatataagcatgtttagatttctctaagtttaccttttatagaggcaatgargaatacatgccggcctgtgactctgcagcattctcaaagcccgatgtttttcttctttaggcagagacaatatcaaaagtaaacagaaacattactgtaatctgtagcacaggccgagcaacyttcctgtgtttttaaaatgttgagtttaagcgagctttcttaatctcaccaatttcttaattacttgatcattcacagggtttaatgtcttcctgggacaacattctttttggttgaaggtgggggtggggaatagaagtgagaccactgacatgaaacttgcccttgagaagcttcaaatctcgggggattgctgacttaaacaggtgaagtcactgcagaagatgggatagctcagcctgctacagacattcaacttgaagggaacttacagcaaggagtgtttagggtaggagagaggcggcccctgagtgaggtcttagatggattcctggaaaccttttgactgagatactcatgatatagaaagactttcrtggtcccacagtaccagtgaagagtgtttcagctggagttattccagtgcagacttttagaacaatatgtaattcatagtcttatcagtcttgattaaaggaaaaaaataatctatgttttccccccagcatgatgacatcaccatgtgtttctaacttatcagtatgttactagagaaaaatatgtcttctcctcttttaagaggtagtagagattttatgaatctcmatcaccaccaaaagcttttggaaatcaatactagaaatgatccaaattttttaacattgaatgttttgtcttatttgttacaggtgaaataagatgcttaaagcatcgaaatttgtaagaggtttattttatgttagcagtgaagataggaaatattatatgtaaataaaatatttatacaaaactaattatattggctattgaagatgaacaaagaatgtgggagtttggaggctcacaccgtgttgctctactctcttaattaatgccattcctctgagggttcatttacgtaacaggtttttctaacacttagaatgtttttttaaaaaattttaaattattttttaaatagcaagaaaagtactacttctgtaaaaataaaaaagaaattgtattgattctcaggtcattccatggattccatttcttgggataacattcaatttgtagaacatgtgctaatctttgaaaatgagacttaattttcctcattggtaattgctgtacctgcacattcttactgaatgccagtgctttaaaacattaatgggaatttccatgaaactgttagcactgattgcatgagggatgtgggggtagtgagccagcacctgcagtggtgtttgtgactgctggcctgggtccataattgccgatctgtgtgtaagtgccactttgcaagagccatggaatcagtcccctacagtattttgtraagtccaccgtctgactcaaggttattatcatgtggttaaaaggaaagcttgtgctttctaatgaggaaggcttacctgtaaatctctgatgaccccgagtgctgtcttggggacaccattcaacccattagcttgtgttttctttgttatgaaatgctgacaatcgtacctacctttcaaagaagagtggatgcaaatttaacaagtctgccattcatattaaattttgaaatacatattgaatcccctttagtaccattccacaaccatacaataaaaaaagcttttattttggaaatacttttttttaaagcatattagccaacttgaaaattttatcaactggactagatcatgtaattgtttattattttccttcctaacttttctgcagtccacccctgtatctcttacctcataataaaaaagtgattcacagaaacaaatatgattctagaaaaatttcaatcaattttgggactttccatcagggtttgtgttccataatattattaaatatttaattgtaaaggatttggttgggaatgaagtaattttaaaaagaattatttaagatttatatttcctctatttacaaaaatgcagtggatttaagatggaaatactgtctaagaatcaacatttattaaacaggaaagtagccacctgaggaagtaggaggggtaaatgcctacagcttgaagaatccgtgggaggagcttgagttcagaatttttttggcagcaaatacaaataaacaacatgtgctgaacattccatgtatagcagacattgttctaagtgcctcacctccattattatttttaaaatccttaccacagtctactgagttagatactattattgtctactgagacaataatagtagacatataattgcagatgagagaacaggcattgagggccagctgatttcccaaaggtgacaaggccaggccagggtttgacaaagaggtcatggctccagagaggtgctgcctctttattttattttattttattttattttttattattatactttaagttatagggtgcatgtgcacaacataccagtttgatacatatacatatgccatgttggtttgctgcacccatcaactcatcatttacattaggtatttctcctaatgctatccctccccsctctccccaccccacaacaggccccagtgtgtgatgttccccgccctgcatccaagtgttctcattgttcaattcccacctatgagtgagaacatgcagtgtttggttttctgtccttgtgatagtttgctgagaatgatggtttccagcttcatccacatccccacaaaggacatgaactcattcttttttatggctgcatagtattccacggtgtatatgtgccacattttcttaatccagtctatcattgatggatatttgggttggttccaagtctttgctagtgtgaatagtactgcaataagcaaacatgtgcgtgtgtctttattagcagcatgatttataatcctttgggtgtatatacccagtaatggcatggctgggtcaaatggtatttctagttctagatccttgaggaatcgctgcactgtcttccacaatggttgaactaatttacactcccaccagcaatgtaaaagcgttcctgtttctccacatcctctccagcatctgttgttttctgactttttagtgattgccattctatctggcatgagatggtatctcattgtggttttgatttacatttctctgatgaccagtgacgatgagcattttttcatgtgtctgttggctgcatagctgtctgttctatggatgcatagaagtgtctgttcatatcctttgcccactttttgatggggttgcttgtttttttcatgtaaatttgtttgagttctttgtagattctgaatattagccttctgtcagataggtagattgcaaaaattttctcccattctgtaggttgtctgttcactctgatgatagtttctgctgtgcagaagctctttagtataatgagatcccatttgtcaattttggcttttgttgccattgcttttggtgtttcagtcatgaagtccttgcccatgcctgtgtcctgaatggcattgcctaggttttcttctagggtttttatggttttaggtctgacattttagtctttaatccatcttgatttaatttttgtataaggtgtaaggaagggatccagtttcagctttctacatatggctagccagttttcccataggtgctgcctctttaagccaagatggacataccccaggctatagagatgtcattgtgaggaaactggacacattatctgcagcattgatggtttcttccatctacatttatattatggagtttattcaacttttggaaagctgtgactttcctggcaccaccttaactgtgcccatttcctggcccgtatccatttctgaaagaaaaagcaactacatttactctttttggctttgtactttgttatttatttaaacctaattcttaaattttgcttcactctacagttttgtcttggtatgggaaatttcattattattttcaaaatgaaaaatgaaaaaataaattggcaacaacaaccaaaaaatcagaaaaaggtattagatttaatcagcagtttttgcctcagtaggtcaaattattgtgcagatacgttaatttaaaaccccagcaaaaatttgagaattaagttataacttttaagtgtagagtctccttagagattgctaagcatgttttagaagtattttttagaagtacattcactggatggatggttatgtaattggaagctgtttacaatatagcataaccttggttactccacaggagttaagtttatggctcgttmaaagcatggaacaggcagtttgattcagttgggtgtaataacctattggacaaggtttggagtgaagagtgttcatgtaataactgtcttcctttagaatagttctacttgttggtaaacttagaatttcactttttctccttaacattcagttacaccaagtcctatataaacatttttttattttagttcttatrtaagtaatttttctaatgtttaattttactgatttcaaatatgatatcccaacaatttaaagggtgtctggttggtaggaaagatgttctagatattgaatgatcatggctgcattctattttatatttgttgccctgacaccaccatgctcacttcagttttcaccccattaaaaatatgggagaatttattgacctagcaaatacctattgagtgtttattgagttcagggaacttcactagccatttggagcatatgaaatagagtgaagtgttacacacagagaggttgtatccatagaaaagtttggacaggtacagaaaggtcaaggtgagcgcattgagggccagtggtgtgcacatgaggtcccatgagccttcagaaggagagggaaggaagcgttcaactgaagagagtggtccactcacatagtgagacggaaagatgggcagacacggggccatgcgctgagtgggatgttaggacggtcaagtgaatcggttggctkcatgacctttccagagagtgctgactgtggctccctagagggagatttctagtgagataatgaagcctccgtgtttgacctgcccagtttagcaacttttcccccagtaacctgcataatggtgaaatggtcgttatccccatctttttcttttttggttggggggacagagtctcgctctgtcacccaggctggagtgcagtgatgggatctcagctcacttcagcgtccgtctcctgggttcaagcgattctcctgcctcagcctcccgagcagctgggactacaggggtccggccaccaagccrgctaattttttgtatttttaatagagaaggggtttcatcgtgttagccaggatggtctggatctcctgaccttgtgatccgcctgcctcggcctcccaaagtgctgggattacaggcttgagtcactgcggcaggccgatccccatctttttaaggctccaaagcaaggtgtccttagaagaggtgattcaggaagtccagtccaaatgaatttcatgtggaaccactttggactatttctgtacatattggttaaactagaactaatgaataccttcactcaacatgaagaaaagtgggttctctctccataatgtgtaaagaagcgcttgctggacatcagaggtggtgctgattctgttcatttggtacatactggttgtgtccttgtggagacgtgtattccagcaaatgtggtcaagccctgctgaaggccagcacccagaaatacagtagcaataatcctgatggatgatgaggaagaaggttctgtgcccctgctgttacttctgaccagatccctgtcccgggtccagaaactctggccatgcatctattccacaggagaatccagggctccaccagaactgaggtgactccctgcatgactaggcgcagggctgaactgagggaatatggcaggtgtaactgaaaaatgagagctaatgacaccagcagcagcattcttgatgtgtaagaaacaaggacaactctgtagtcagaaggaggaaagagggaaggagctgaaaccaccaatagccaggcttggcaatgtggggggctttggacaaaggcttgggggacgcctcatgccagcagctccttatcagtagctggttctgtggtgttggtgcaagccagctgttcgaagaggatgagactgcactggctactttccttctcttagatgtcatttttagggaaatatcatatgataatggaaatcaagggcagaaatcatacaagaagtgccagtctaactgtaccttgagcatatgggtcagatttcaaaggtggtgatggaaatggagatggagccattgctgtccaggtgcgtctcaagaacagatccccttggtgtaggaaataagggcacatgatggcgagaaccttttctctgcttctagcactacggaagtcccccctgtttctgtcctaccccagtgccacgagtaaaaccttcttccttctccttctctcgggccaacattatttttatatgagcacagattaaaacaagctgtttcactgcccagtgagtctccgcgttgtcagttgaagaggggaccagccacaccagtggtttttattctcttcttctgtgctttctagtttggtagctgctacccacagacagctatttaaattgaaactactttaaattaataaaactcagagagtaattcctcactaagtttcaagttctccataggtagttgtagctaatggctacatatgctatgtaacgtgtgtgtgtgtgtctgtgtgtgtatatattaatatgagatagtgcaaatggagaacattttcatcattgcagagagttctcttgggtgacattgttctacttaatattttaatagctcatgtgataaatatcacttaaaatccgtcctgttcctgctgttttgctctgttacaatatgttgatactgaacagtattttaccaaggtaagaaatatgttaaatcttactctctccccacctagaaaacaaattatcccagcaattaaattctcagtgacaactagtgatggaaacttctcaggttaatgaaaagtttccattagaatcagaacgactcttcytaagtatcctgtcttcaacccttaagcctattatctaaaatacataaaagaaaaatgataactgtaaagattatactggtttctaaaaaatcccaagcaaataaaatatactattttcaaatattggctctattcaatatgttgtaaacattgttatttcagcaacttttttgaccaagaaaagaaaggaaaagagaagatttgactgagggttctgttaggcaaagcgtgagagaaaactaaagaagaagatggacttggccgggcgtggtggctcatgcatgtaatcccagcactttgagaggctgaggtgggcagatcatgaggtcaagagatcaagaccatccaggccaacatggtgaaaccctgtctctactaaaaataccaaaattagctgggtgtggtggtgcacgcctgtagttccagctactcaggaggttgaggcaggagaatcacttgaacccaagaggaggaagttgcagtgagccgagattgtaccattccactccagtctgggcaacacagcgagactccatctcaaaaaagaaaaaagaaaaaaaaaaargaagaagaagatggacttcttaggctaaggaatggtagaaagccagtggacctctgaatggccacggtgactcacgctttaaaagggccctgaactcagtacacttttctttttaacttctctgcaggaaaaaaaaaaaaamaaaacttctgaataaaattaacatactttatttgcaaaatcattacataagtagacttaacctcctggcacatgacaaagtaattatatgagttcgttgatgttttgggttggaggaaagaacttggccgtaggcagatatccaggagaatttggtaaatctgggtttataaacatgagcagtttcactttctataaatcaagccctacaagtggattgaatccttcatctgatatttttttctaaattgtttttttctgagaagtacagtgtcacacgatgcagcattccaggaaggcatctatggtcaggagaagtttgagatgtcctgtgcttcatcctttcatttttacagagtcactcagctctgagaaggggtatggtcaggggacttgtttaatgtggcttcacttagcaccacctaaattggtttgacgagagaatccccaatattttttattgtcatcttttattagcttgcaaaccactgtcattttctgtaatgcctacttaaaatatacctgattagtctatgaatagaactacaaaataaccaaatcacttaaaaagctaaatggttttatatgaaaaacatccctagttttaggatgttgaagaatttagaggtgaagtagcatgatgtcagaaactgtgttacagatccttcaaccaaatagtttatacatgtagtatatgtgtacacagctatatgcacacacacgcgcacagggaacccaaacgtggcgaaatatctgcaagtgatgaattacaatgaaggatgtgatttgtacaatttttgaaatatctctctatgtttcaaaacttactatacaaaaagaggaaactcttatgaacacaaacataagctactttagttattgggataatcaagaagctgccatacagaagagttgattaggagagagaaaggattttaaggtccaagaacaagtgaaagggtgagattcatgctattgactagagacagctacataccacaagaaaggtttctcaggtcatttttggaattgccttgccattcctctaagagttatgactccatattcaagagtttctactttaggcccttcagccaggccgatgggaaccttgcccagaagattgtcggggtgttatttgttttcatgcctgtccaggtcacagcatgacacagaaaaccttgccaacttttaattgtgttatgtagctaaataaatagggaagccgttctggaggggctctcaagatttacctgatgccccagctgcttgaccaagtggagccaacagcttgaaaagcgctgcagccacgactggcctgaccttgatcttccttagactggctgttaatccccaacttgtggctgggtctggaaagcagtgtgtgtaatagattgcatgtcatcttgtatgcttctagggcacagacattggcatacagtattttctgaataacttctgaaggacttcagcgaaggtagtagcattcggaggtggaaaagttccttagctttcagattctgcgttgatatatcattagctgaaacaatattgcaaacatcactattgccttaagggagagagaagagtcacttagtttcctgcaatttctgagatgcttcttttaatattgtaaaactcttgctaatatgctctttcaacaatgctagcgtatttgcagccctgactcccctttcaaagcttttgcttttcctgttccttttcttcctccttttttctttttattgtttgacctttacaaaaggttataaaaattgtgaaattggatttgttcctgttgctgataaaggttttaacagtaaaggttcttcttctaagcacttcttcttctacgcacttcttagtgcacgtcagaattgtcacagttcttgtgatcttttgatactctgcatgttgcaaatatttatgttacaaatatttccattaacatttacttacatattacagatatttcagtcagttgttacaaatatttctataacattaatacatggttctatgctgcatttatattacatgtgaaacattttatgtcattattatgtttgctaacagcaatgtcatatttatgtacttgaatatgttgtacattagggcattaaagttacacagaagtgtcagaaaatagtactttcacatcaatataaacatgtatttacattttatcttccatttcccactggaaactaaatattaatctttatagagtaataattataaaatatattgcaaacaaatgataaaaccatgaaactttacatctttgttgtgcttcagattttgcaaagtattgtcacctacagtattaggaaagatagctaaacaaatgataatccaatatgtctgcaaaagctctttttgtaaattcgggaaatgaagctgcaaaggactttagaatctcatttttttcattrtttttgttctagttgtttttaatagatcatatgcatttgtgaggctgaagattttcattccaaatgttaaaaaaaaatatattatctctagatgcctctgatgatcatagtaaaatttcaaagaaacttttatgtcatgatctgttatattatccacccaggtaaggattaaaagaaaaaactatttagtaattttcaaaatttagaaattcaggaagaaggttgtatttctggtaagtgcttctgaataaagttaattcttaacagatatggaagtataaattgattaaatttccctagtttacagagtgtccctatatggtgacagttgagagaaatgatctgagattgaactattgaattagttgtttgttcaccttttactcttgaaaatgtattatttgaatggtgtttgcctaggtagagagatcataaatgaaatgcaaaccatccatttctgcacatagctgcttggtctctgaaagttcctcagcgttggcctcttttcttattttatgtgtgactgtgagttagaaagtcaaccctagaagcccagcaaactgtgatcatatcatttatatcacgataaatgggctggtttttctctgtagatattatgaggaaaaatctgcagtcttcaaaactgtgtccggaagcacgagatagaattcaggagcatcctgaaagaattcctgtcatcttttcaaacttcctcggcaaagagtgcctctgattttactgtgttgcagatacacttgcccgattctcttggcagtaggctgcttactttgctgagtaagtcacagggctgttggcaagagagagaaaagatttcactcttggagcataaagttagattttctaaattaaattgttgtattcccattggaatatttattccagtaatgtttcaaaatgttcctgaagactgagttttaaaatttgcctctaacaagcttttaaagagtttcttgtctcaatttagatgcagcattattagccacttcytctgctttttcttctccagcaggtagatcaatctacaacagcttttatgtgtattgcaaaggcccctgtcaaagagtgcagccgggaaawctcagggtacagtgcarcacctgcaggcaggcaacgctcaccttgacccaggtaaggaaatgcagtgtcagcatgagactgccaggaaaatgaatgtgtactaacacattgcctttcagtttttctaatgatgtatcacccgtctttgaaaagaaaagacattctcttctgtggttgtgatagttaatgatagccgaagtttcgtttatgcgcctttgtcttctggatttctttctgctctgtgaaagtttagattacacagggttgtttccccattactttatccaggcctatgaaaggaagtatggagagtgctttggcagcaaaaagaggttgggcttctgttacggtgtgattagaagggaccatttaggaaccttaggctgctaaaaatgttttgtatcttgatctgtgtgatggtagcatggttatatacaaaagtcaacattcactgggctgttgcgttaagattggtgcaccaaatgtacgttataccttaattttaaaaagtaaaaaaagagtatggatcagcaaacagtatgcatataaagcaagggtcagtcaactgaagtctgctgtggccactgcttgtttctgtgcagcccctgacgcaaagttggtttttatggctttaaatggttgggaaaaatcaaaagatgaataacattatgtgacccatgaaatttacattctcatgtccataaataaagtttaatggagagccagccccacccatttctgtacatgttgcctacagctcctttcctgctttaagtgcagagtggagtagctgggaaacagactgggtggcctacaaagcctgcaatacatactcactggttctttagagaacaggtttgctgaccccgatagaaagtgtcaggttccggctcggtggctccaagggatttggctggatgtgatgtggttgcaatagagggcatgcaggccgagcgtgtccagtccccgcggtggagagaacacagacacgggggtgtcaaggacacagtgctgggggcagtcaggtgtgcaagtgtgggtaaataccccaggcaccagccaggaaccccagtgatgactggcatgttcagattctattctgcaagctgacggaaaccacagcaaaattgtataaaccagggtgatgtgtcaaacgctattgaggacagttcatgctgaggacagtttgccattagacttgaagatggggacaggtgaaagacaagaggctaattaaggcgcatttcatctggttcgcagatgaggagctgtgggccagggtcaaggtggcagccctgtagaatgggtgttacggggcctgtgaaagaactcaaaagatccacctaataaaggagaaatcatggatccatcttctcaggcctgagaaaatggtggaattacagaaagctgtgattcagtgtttcactttgatgaacatttcagctgtctagagaaattcatttatagagtcaaagccacacaagaatgatgcccacggggctctttctgggacagttcttgggcagctctcctgccgggcagcatgctgcaggcccaatgtccccaagaggggttgcttccacttgctcctctcctctggctttctcaacacaagacacaacctcatctaccccaatctgtgcctaagtcctgattgctttaggtggcatatatgacctatttataccaacttcctggtattcttggtaaaaatggcaataaaaatgaatattgaattccaagctaaattcttttcaggcattatctggtttaattatttcataagaacactctcagttaagcattattagtaaccctattttagatgtgaggataataaggcttaaagagattaaggcatttgcccaagaaaagaggaacttatgagtgtggacttggaggttgaacctggactgtctaatctaaacatttaactcctttagcttttcagcttttttttttttaacacacagatataattacgatagatgtcacatactcatatgtccacagtgatcactcaggtgatgagaagttaggttagatgtgggcagtagggggcggtgaggacagtagtggaagggtgaggtggaattcatgttgaaaagtcgcttctgccagttgctggcaagaggtgagagggaaactcagtatggctgtattgttttctttttaatcaaaagaaatcatcaatctggaattttacatgggatttctcatttaatartatgctttgtgtgggaaaaaaatagaaaaacagaaagaaaaccaacctgtagcattggcctaaacataacaagccaaaatagagtgttgtggggactaaatggtacattaatagtaggtacttaccagagcctgacatgtcgtaatcctcaggaacagtaaggcttggctgagaggtgatgacctgtgagcctaagaratgctcacagcctcttgatgcagagcagtagaggtaggggtggttttacttctctgaaatcagttagccagagccagtctgccccattagaatcctgacttcctttgctcttacctatgccaacttggtaatatctattcaatggtacaatagtatctatttccttttgtgcagattagctcatttacgaagagtacttagaacagtagccagaacataaatatttagaaatgtaaaattctttattgttattctattaatattactattttatgtatgtatgtatatatatttatatatactcatgtatgaaatcaatctaggctttggctaactgatttcagagaagtaaaaccacccctacctctactgctctgcatcaagaggctgtgagcatttccatctcaggctgaggctctgtgatgatgtcatgccaccctgctccccaggcccagcatcctgggagggatgttcaatccctgtgttttgtagtctcggctccacctctatytccaaagcccagtcatgtgaccacctgggatttttctcagttcccagagatgctccacctttgatatttaaattcatgctgtttcttccccaagcactgttttctgctctgcatatcattgacccttctctgaagtttttctagagctgttggcctctcctctcttcatttcctacctgaggggccaaaatgtcaactccagtattgcaggtatcattcacttcctgcccttcattctaccaaagtgtccttacttgtctatgttcgaagagcctgtaagccttgttataagatcagataactttcagcttgggtctctagtttatgtttaacacctcacaaagtgccttgtccatagaaagacacgaatcaagtaatgctgaataaatagcatttgtattcgaaattttctatgttgactccatgaattcataccctttagaaattctgtctggcatcatataatgaaatgaagcatagcaattatgatggcttcactacagtgtactgatttccttccttatccttatattcttgtatttctatttttctccaattctcatccagtgtttttacaaagagactccatgaggttaagtaatgagcccaaagttacacagttcataaatatcgaagccaggagtgaaaaatctgctttgtatttttccatagccctggcctttactaggatatagtcctcactatacaaatctagtaatcagtgttctattttctaactacttcccttgtacttaaaatataactgaaacatactcttgaaaaaaatatgcttatggatttagggacaattaaatcaaagataacttatataatccatattttagtacagtaactagatctagtgtagctagtccataggagaagatcagatgtttcaatttttcaataacaaaaatacacattcagtaacacctacaaataatatttctgtggatcagccgaccagtcacactactgattcaccagcaaatttaggctttgcaataatggagtaggtgctaaactttgccaagtgtaaagattgctgtgtgaataataggcaattctgaggtttcattttctagaactttataaggatcgataacttacataattgtctctgatcaagaacaaaaatacaatataggatcttgtgtggctgactagttataggtgagcagcatgtggtttatgtgaacttcagcaagatttttatacctaaggaggaaaactggaacctggttagccacctgggttatttttgaaagyataattgtattttttctcatttggaaaaatcagtttgcaacgagatccactcatatcatgagtctaaatggtaatcttctaaagtttttattggtgatttgttcttaattctaacatttcctgaatgctatttaaaatttacatgtaataataatgagttgcttttcaaatgtgatgctccagtttaatcatgtttcacatttaatatgatactctaacaaattgtaaaggaaatggatagttaattttgtcctgatgttaggcatggggaactgatgtctgaagttttcacctgacctcataggtaagttgagaaccaacccggactcaarttttcttcatctccatatcagaatatcctctttcttgcatggtgaccttgatcagagtttggactagactataatcctttagaaatatgaatgcttactggaaaacggtgaacaatagctaattggcaagcattcacttttcatctgcttcttcaaaagtcatccactgaggtccatgcagaaatgagacagagttgaacacacaagggaggttgttttatatgtgcatatttaattctgattgggttcctgaccaatgaaattaataatttaaaataactcatgtcattgtttccttgaaatatttccctagcaccaatttatatcaacaaactttatcagagactgtattaatttttaattattttgactgggctggtaaggttaatttgactccatggcaatggtaagtctgtcccttggcatgatttgaaaaccaagcctcctccttcccctgaaggcttctcactaaatcctaacagtactctttctgatcatggctgaggagtcctgtcccttgctactatcattgtcttggccatagcccatatttcaactgacttgtgcctcctcaagaaagcaaagcccctgggataggaagtaactgactagtctttggaacagaaaattggcttaaaatatagtaaggctttttatagagtgraatacttgattgactttaataataattagaagatagaattgacatagaagtgagctgagagcacatacagcatctggtcttgaaatattttcctgggagcaaaattctccaggactctagttctgattaaggttatgaattgctaatccctccaggacaaactctaggtaaccagagttatccaccattaacatctttttgtttgtactcagtttattggtcttaaaatgaatcagaagccaggagattactgtagccaagaactttgggtgaccccctccccgctacaatcaccgtaattactttatctcaaaaagaactttatctttgccactctaatgagatactctgccatggaatagcattaaagctaaaaggtttctgatgagaaatggtgcaataaatagagtaagatgtaaagtgcctggcatgatggattttgtttaaaattagtttatagattaggcacaatttatgtgaggaaatttattaagaaatacagtctaaatgtaaaatcattcctaagcttaatatttgttacagattaattgttggccaggagtcttcttacctctcttgttatcaaaattactctcacatttatgtaagaaattcaagtcttagaatagacctaagcttactttctagttttcacatggggtgtttttgcctaagtgtgtgatatcccctctttgcttattgtagatttggttatcaggcgtttcagtgctttgaaagcacagtggaggaggcattacgcattattttatgttattgacagtatttgtagggcatgttttggatgtcccgacagtgagagtggaaccggccaccatgcattctgttttgcatcgcgttacagtgttaaatctacagcgaagctggtttctgtgtggattcataagctccagggtggaaagtgtgcagaacacaatgcatgtctggcatctaccaaagccagggtggcccccgtgttcactgtcgcccttcacgccaccatctgttctgccacgagatttctcttggccttgtggacgcttcttacttcatctccttttcacgcccactctctttgcttgtgttctccttggtccttatcacgggctctcatccacacacaaatgatgcacactcacctcgcaaagagccagtcgatagagaagtgagaaaggttaaaatattttcctctttttcccttttaccaaagctaatacttccaaaagagccaggttaaggtaaaaataaacatataaaaaacatagtaaacatataaaaataaacatataaaaaaggattaccataaagaacttaaaattttgatgatttattttttatacatgtattattcttgatagtttacatttagaatttgcatactgtatacaatatatatgtaaaggggtctmcttaaagacggttgatcgaaaccatttcagggcatcagtatcagccagtagaaggaatttaaaattgtaagtaaatgctgctactgccattttcttgagactcattttgataattcatgcctgggtttcaaacccgtaaatgttcttttccaccaacacacacctcatatggataccattgaattttctcacttactattttgctgatttttaccacatttactaatataaggaataatattgttttgaaacattcttttggaatttattcaagtatttttattgtattctgtatttgattattctcaaaatggtcaataatttcttagcagattttaatgaatgatcaatttgttgaaagttatgaaatacaggtgaattcatcktcttaagaacgttttcttctttaatatacttgtacgtctattgttataaatataacctaaacttcaaaattccatatgggaactcttggcttataccgatttctttctaatctctattttagttgtttttctgttactccagatttaaaaaacattttccaaatcattttctttgtttgttggtttaccaaaaatatgtttcttttaatcagcttttaggatcttctgtattttatattgaatttcmaggacttttcaggttataggtgaacacctcttctcttcctaggagcattttagggatgttcattgtttatgcccctgctcccttctgcaacagctccaggcagttgtacactgaggggccaggaggggacctgaagagctcaggacaccaaagaccacactgtgcagttcataaataatcaaattttagaacttttgagtaaacgattaggtaagttggccagccagtgaatcagcctttggtgaatggattttcagcagccttcctagaaccaactcctacaaatggccataggacacacatgtataggtcacaaaagcttcatttgttcaaagacactaatttttaggaaaacatcagatcatttgaatggctctcaaagactcctccaatgtttagctgagggtctcatggagcagaggcatagttaagagaagaagaggatggaggggatagacgagttcagggaggagtgatagccgaaggtggactgagtaagtattttatcaaagtctatgtggggacctgggcaaaagccagagtgatgcacattcagctttggcgaagagggagaaacccagcattgatctgaaataagtaaaatggtatctagctgagctgccggcaattttagccaattcgttgttactcttctgtatcacagaaatgcgtacgttgagagcctttgtcctttgcctagtattttagaattaagattttatttatcatatgttattcattgggatgatgtcagttaattaaagtctagagaaatgtgggtcaatgttggtaattcattgacttttcaatccagctatttattttcatccagcccacagtagtgctagcctttcattgcttctttaatagagatccctctgtaatgataactgttttttgtttgtttggtaatgattttactcactactctttaagaaaaagrgagacagaaaaagaagtcggtcttgcagacgcaagttccccaagtgtacctttagaatgctcaaaagctcagcatcatgaggaccctggagagatgggaacataccagatgtcgctttgcattttgttgtgtagagtgtctcagtgtttttgttttgatacccagccatgcgcttgacccatgctgctagtttgaaattctcaaaattgtgggcaggaagttaaaagcatattactctgaaaaagtatgtgtatatattttaaaacatgttacttattgcattacttccaaagtacatggttttgttgtatgtatactataaggagtgactactattatagtgagaacctgcttytacaaaaaatagaaaaaaaaaaattagctgggcgtggtagcatgtgcctgtaggcccaacaacttgggagaccgaggcaggtggatccattgagcctggaaagtcaagggtgcagtgagccatgatcatgccaccacattccagcctgagtgacagagcgagaccttatctaaaaaaaaaaaaaaaaaaaaaaaaaaaaaatccctataatttattgaatgcttaccataaatcatgagctaagctcagactttacctaaatatttaattgttatgatatttgtatagtgctttttctaatttcacatatgcatatcattatggcaatgaggtacaccaagccagtattacttactttttatgtaaaagatattaaaagttttacaaagtctgtcagttagtagtgacatgcagtcattaatttagataattggaaattggttaagtgatctacaatcttattcattgtgcaggatgatacatttttaaaatatttataagagaaatatttcttgatactacatagaagggtttgagaaaactcaacctaaagtacctacaaagcataaaagaaaaaataaggttctctaaagaacgtttttcatatgtcttattgtttcattttacgttgtagttacatgtatgtatcatgtttaaaaacttggttggtttgtttattggttcgtgatgctgtctcctggcagggatcaggcactcacacagcagataaacccatcaggacattcttgttgactcacacactgacggggctgtttctagctttactagccactgtccttcatggcatagaacagagcatcaaggcatcaattctgtgtgcaaggcaggataacaacggacacagcagtgcctgtctcttctatataaaacagataattctggccgggcacggtggctcacacctgtaatcccagcactttgggaggccgaggtcggtggatcacttgaagtcaggagttcgagacgagcctcaccaacatggtgaaaacctgtctctactaaaaatacaaaaattagctggctgtggtggcatgtgcctataatcccagctactcaggaggctgaggcaggagaatcacttgaacccaggaggcagaggtttcagtgagccaagatggcactattgcactccagcttgggtgacagagtgaggctccgtctcaaaaataaataaatacataaaaataaacaaaatggaaaaagataattcttagaagcctcctaataggcctctccttacagctcatcatttataactgggccatatggccagtgatagtaacgaagcatgttgaaaagcaagtgtttgccacatggaaacagaattgccatgattggcttagaccagtcctattttatcccctagtctgggcccattccatctccaaaaaaaatcggattcctatgagcaaggacagagggtgagaagcacgttgggttggcaatgatcagcgactatcacatttgtaaatgcatcaccgttttagcccactttcctgaactcatcagtttctttcctgcgtggaaaccctgctgttctatgccctatttgtatcactttgcctgtactagacttggctagccttgaaactgtttttgtgtgtgaaatgctacttttctccagtgcctgtttctacacatagatgtacctycctgagtctctgcagagtgaaactgacatattatccgtttgagcactgaggagctttatcaagacttgtggaagtaaaaactacatctgtagggcagtgggttaatttatgtgcttaagaagcgaatggctcaaaaatctcactggggaaacataaatagaatttagtagccttttcttcctacatagtagatcctttgttgatgctttataagaaacaaatatcttatcttacagtgataaaatgtgcggggcaggggagtctccctgaaaatactgcttcagaatgaggcaagccagtacagaccagtactgtgatatgagtttgcattatgaatgtatgcgtgcatgctcttccatctgggaatatccagctacctgcgtaaatgcatcagtaaagccgggtgggaaacggagaggttaattgactttacttgggtcacccggcgagaaagaaaccaaactgagagtttaatctggggaacttgagctcagattcttgctgaaagcactcacattgagtcacattagttttcttataaggttgagggagagttgacacttactctgcaggctttccctgaaaagagtaaaattcactggactctgttttctaaagtggggattaagattctagaactggattagaagtgaaacatggagttttcccttgctgaaaagaaaatggaagagtattgcgtactgggaaaaaggaaattatgaaaattaaaagggaaatgctcatagaatatgatttgtaaagtgactagttagccaagtgggtttgttgtagggcacgatactcactgatgccagagtctatggcatgcactgggcatggtccacttgaatctctgagtatgattaaaacccttcagtcatttgttggtatgattgaactacgggttctcccacggctagtttcaaagaattatatttctgtctagtgtcagaatgaccctattttttttaatgtgttatgaatcttcagttgtgcatacagaatttcatattaatttagaatgccatgctaataagcgtacactcagagatggccataatttaaagctagcagtagtatctcatggagaaatgaactctactcctcccataatgagaaccatgctctttgtctttgtctctgaataggatatttttatttaaagtactttaggtaaaggtcagtataaaccaatatgacataatatgtctattgttcaatgttatcataaaaatataaactttgcataaacagagttcatgaaataaatggagtatgaccaaaaaattaagtcttgattatttgggtccccctgttctgggctcccttattagattcatttccttggggcagggaccatactttggtgcttagcatagtgcctgccacatagtagatatttttattcttattactattattattatttgatgtttaagatgtttcatgaagtaaattaatggtaggccaaggtatacaatgactatgataatgaatgatataatagtcattgtataccttggcctatccataatcttagaataggaatcaactttgcagtcatctaatctcaattccctcctatagaagataattagaataggaatcaactttgcagttgtctagtctcaattccctccgatataagatacttagamtaggaatcaactttgcagttgtctaatctcaattccctcctatagaagataattagaataggaatcaactttgcagttgtctaatctcaattccctcctatagaatataattagaataggaatcaactttgcagtcatctaatctcaattccctcctatagaagataattagaataggaatcaactttgcagtcgtctaatctcaattccctcctatagaaggtaattagagtaggaatcaactctgcagtcgtctaatctcaattccctcctatagaagataattagaataggaatcaactttgcagtcgtctaatctcaattccctcctatagaagataattactcttacatgcttgctttgtagtcatctgactttgctagagcactttgagtaaaggaataatcattgcttttcacaaaactgttttcattgttaaagagcttgagagaaagttatctgacctaaatgtttccacccattcttctagttttgttatttaaaaaaaaaaaaaaaaacgaaatctaaggaatgttccacctgtaggctcttcaaatgtttaaagcagctacaatgatttacttcctagggctttccttctgtattaaasttacgattcaagcattaaaaagggacagagtattctcctgcctcaaagaagttttcttttcaaagaacagcgttggagccacgaaaggtatggcaagactatgaaagaagatcctgaaattagaaggtgaatgtgctcttaagtaggaccaggagattgctgttgggttgtggatagggcctatgtggacattgatccagtactgactgtagagaaggaaaaggcagagtgtacacagggccttctttgtggaatgatgttggtgttcaggttggagaatgaagaggcagggttggaaatgacaattcagagcgagcaggtgtggcagccactgtgtcagacactgagcttatcaccagggttggtcatagtgggacgtgttgagccactggaaatttcatgcctactggtgatttttgtaaagcagctcccggtatatctgtatgtctgctgataaagacatacccgagactgagcaatttacaaaagaaagaggtttattggatttacagttccacacggctggggaggcctcacacttctggtggaaggtgagaggcacgaaggagcaagtcatgtcttacatggatggtggcaggcaaaaagagagtttgcagggaactcctctttttaaaatgatcagatctcatgagactcattcactatcatgagaacagtgcaggaaaaacccacccccatagttcaagcacctctcactgggttcctcttatgacgtgggaattgtgggagttacaatttaagatgagatttgggtggggacacagccaaaccatattaatgtccaagacaaaccttttgtagcttcaactgcacaacccatcacgctgtatctggtggtggttccttttactgaggattcttttgtctcctctaaaggagtttccatgtcctcctggcagatagcatttttgttgaggccatggatgctgctgacacattctttggtaaatgtcatgttatattaatagattttctcccagggccaaatggataactttaagtttcaattacagctttatttcagtacatagtagtgtccagtctcttgaaaacaaccaactaaacaaataaaaagcttgccatgtactcctgctgggcctgcattaggctgggcacttgctggaggggtggtgtatattggggtggggggcatcctccgtccttccccaccttgaacttgctcccctgcactgccattttgctctcttctgtttctgatacctcagtgttgaagcacaatttaggagcttagcaagagggcacaggaaagttctcactcagctgacactgtcatgggatatgtttaagctgtcaagtgtaggaagtgtgaaaagcaaactttatctcattggctcctgtacaagttgtttagaggtcaccagaggaaatgtctgcttcacctccaagcatatactgatgttcctcctccggtgatcacttctttctcagctgctggtttttcactgttatccaccccgattttctctgttggagtctccttggtcttccaggacatcttgggtagaaactaaagtggtttcagtgcagctctttttcattttccattgggcattctcatacatattttgttttaacaaactctgggatcacagactaaacccaatataactataccaacaaagtagctagcctttaacattatcaagtgggactcgggtcagacctgaactcactctctgtattagtcctttcttgccttactgtaaagaagtacctgacactgggtaattttcaaagaaaaggagtttaattggctgatggttctccagcctgtacaggaagcatagtggcttatgcttctacagagacctcaggaagcttccagtcaccgcagaaggcaaaggagatgtgagatgttttacctgtccagagtgaggaggaggtgctacgcacttttaaacaaacggatcttgtgaaagctcactcaccatcccaagaacagcaccagagggatggcgctaagccactcatgagaaactgctcccaggatccaaccacctcccaccatgccccacctccaacactggagattacaattgaacatgagatttgggtggggacacagatccaaatcatatcactgtttctccttaactctagaagagccatatcaagctctctgagtggagtctttccatagaagcccttttcttccacaaagaaatcaccttcaaacattatctccactcactccaacaaaccaatctataaatatgatgttcatgagatgtttcaaaatagcccatgtttggaagaaaaggatgtactttctgcttgatttggctttgagcctaaaactgctaaaaaaaaaaaaagtctgttaaaaaaattatgtcagtgatgtttagatttgtaaattcacataggcaatcagcacctcttttggtttatagtatctcttgtatctggctttaattgaaacctccaatttaatattctattacataagcttttcatgtagagccttttacagctcaaaaagtattttcacacacattgtctttattgatttaataaccatgtgaattgggtaaggttgggaatcctgtgactattttacacccaagaaaactatacaaggttcacagagaataagagaattaccaaaggaacagtgtgaggtgggctctcaaaccacatgttttgaaaaaaaaaatctaaagattttctccttctgctacatagcctcttctcttaacagggagctaaatatctttagttggtacatcattatttttaacactacttgctccgtagagtccctaaggcatttaaaatattttaaatgtgcaggatcactgtcatccttttcttctaagatgttcttatatttttctttgatttatgttttgaaggctccatctttgttgaggccatggatgcygctgacacatcctttggtaaatgtcatgttatagatgttccagccatctattaaattccatctcatggtatcaggataagaagagctgaaaattagctgaaatgtggacccttcgtaccacagagctgctgtcatttagactaagctgttactcactagtttttcctggagggaaaaagattttgaaatcacttataatgaaggacgcagataacaccggaacctcttgacctaaactcttgtccttcctgttgttttgtttccttcgacaacatgaaaaacatttaataatgacttygattactttatgtttaatttggagcagggtattcagccgtaagtttttgtttcctttatttggaaacctatgattttgaagaaggggtggcaggagagtgaattggcacaaatgttaggttctatatattattcaagtttatcatttagtggggggaaaaagtaagtttaccttgtacagcttgaaatttagtgggcatttattttcaaatggctatgcattgtattgaacttggaaaattaagatgagtttagaaaaaatatccataacattggaaaatgtgctgtggaatacatagtttaggtgaaatatgtactaaataatatcacaaatctaggaaaatgccagtatatatgttcagaagcagagcccaatacaagtttcataacgatgccacttttgtctttattagatgaggctttctttgttaagattagtcagaacagaagaccaaggcagtcaggagcacccccccacccttattttaagatkacagttttgtgtataagagttttgaaataaatgcttcatttaggagacagaaactcgtattgttaaaaagtggagaaaattggtttactttaagtttctcaaaggtttatataccaaaacttctcaatattgcctggcctactccaaacatgcagatttcagaatctttaaagcacgtgtgaaatgtgcatctttaacttcagtggggatcagcaaaagggaagtcaaaggaggctggatgtattagtccgttctcacgctgctatgaagaaataccggagaccgggtcataataaagaaaacaggtttgactgactcacagttccgcatggctagggaggtctcaggaaacttacgatcatggtggaaggggaagcaacatgtccttctacacagggcagcaagagagagaagaaatgagaaccgcacgaagggagaagccccttataaaaccatcagatctcatgagaacttaatccctatcatgagactagcatgggtgaaatcgcccacatgattcagttacctcccaccaggtccctcctgtgaaacatggggattatgggaactaataattgggtggggacacagccaaaccatatcagcggggcaagcccaaatttgtaaatgttggaagtaatcaagagaaagagakgacagtggatgttttttacttcactagactctgcccttttgtgaagcctcctattatgcaatcrgtaatttttgcttattgaatattggatttgattgattaaaaggacaaataaagtacaagatcctggatatgtacattaattagcaaaagttgatacagagctgtactgtccaatatgtcagccactaggcacatatgactttttaaattttcatgaattaaaattaaagaaaattaaatagtcagattatcagccacagtggccacatttcaaggactcactgggcagttgcaactagaggctgctgcattcattgtagtttagagcattcctgtcaacagaaaattctcttagatagcactagttcaggggattctccctggggcagtcaggtgcacctgtttggatttttagaamtagtaagtgtatttttctaaaactaggaagaaagagctggaaaaaagttacttggctattgcataaatggggtgtatggtagggatcgaggggcggcatactgcggcaattcaagtgttagtaaagttttatggctattgagcccaaagcttagaaatcagacaggccttgccttggtcatgcagtcagcagtgacagatcagatctgggactaggaccaaggttgttagtttcccaacttatagttttatcaccatattgaattccttccaagatgtatactttggcatataattttggaaccacaaatctttgatttttataagacagagaggcttacagtctttccctccccataccaagacaggaggggaggtgactttcttacacagagaaacctacttcataggctgccatctgtcaaggacatctccttcaccttcttatcctcagagtgggtcagcaaggagacccaccagaagatgatgatggcagggaaacagctccatgtggcctgtgtgagttccctgtcagtagcagctgtctctcagatccctttgggctgcagcctgggttctgcagcagaagaactcccaatgccttacatgtctccttaggacctcatttgttctccatcctcttacatcttccctatctgaatagcagccaccttccaatgcatgtggttctcaatgtgagaacacattgggcctcccgacatttaaatgctgaaggtagcaccgtgcttctggacaggaatttatctgcttgagaccacatggttatggaaaatgttattttgtcaatgaaatgcaaatatacattaaccaagtatccttacatttatagaaattcttttttatcattatttcttcaaatcggcagaaaagcaccaaaaaaaagaaaaaaaggtgtcagaaatgacccaataataatgcattttagaagtaggtgaaaagcagttttcacaaaactttagtttacttgaacgtttcaaataatacaatagttatttagttgaaggttaaatttaagacagtgtgacaaagagatacaaaatgagcatatgctgttggaaaaatggtgccaatagacttgctctaagcaggcttgccacagaacatcaatttgtaaaaagggcaatatctgcaaattacaataaagtaaaagtgcaataaaatgaggtatgcccacacatgttttaataagagaaaaattcccgtgtactcctgcgaggatcctgggatgagcccatgggagctggctgagtggtagtaacttgccatcccatgtttcagactgaagtgttagatttgcatgatgcttgggtgcctgcacaccctcctgacacacagtgatgttttcccaggtggttcttcactgtcccatgtcagtagactcccggtagatccaccccgcccagttccatagacaggcttcagcstgacggcaactacagctagtgccacttgtcctcaggctgagacgcttctacgtgtaatataaaattctattatattttataagtctgtcttcaatatctctgaatacagcatttctcctcaagtttacacccattctaaatgtaaaygcagattgaatcatgattttaagtgtagcgtttgatctccaggcaacatctgtgtttaatgactagagtgtagtgtatttggaaccatcaagaagggactagtacagcagtaatacagcaaataacagctccaacccctgtctttgtccagggtagaaactggtggatgcaaagtaagtgtgtaaaaagaacacactttgcatgcagttcctttctttctctacacattatttgtgagattgcaatacaaaagaaaatacgccaggaactcagatcactgagaatgtttgtacgtattctgggataatgagtcagtacaatatctgactcattatcaaactgagaatggatttcctgtttttgataaggtaaccaagttcctcttcctagatgtgtgacctttggcaagatccttaacctttcagaacctcttttcttattctcaacttctctcctacccctaaatctgagtgtgtctgtgcacttttctcttgggcagggakagttggaagctgacaagcaatgatggaataaataatcaaatgcacataaagcaatttgcttaggacctgattcccacttagtgattcctacttatgattcttagtttctttccctgattctccccatgtttctctttgtggttgctgttgttattttgtatctcagrtgtaccatgttggattctatggttcttgtacaamactgtatcaatatttgtccaagcctgaccctctttatgcatttatttctctttttctttcttcattttctgattaccttcccttgtcccgttaaattcaaaaagcatttaatacctactatgtgtggaaatccatgatctgaagtagaagctgtaagtgrttccagagccaatatgaccatcatccttattcagctcatgtgcagatgttggtaacaccaagcatccacttgtattctttggtttcagtaccagaaatagcaaagaaatatgcaaatggtttgtgtgatttatgtaattaatcccacttccctttcctatgcttgctggaaagcttagaaacaaataggtgtcctgcctctagcaagcacatgaaacttcgggaactgacctgggactggaacgtcacccccgactgggtcaacatttcctacccttctgttcctcggtcagcccactcccctccacagatatcttcacttgcttgtattgttatgggctgtttcacgttctttctgaatgaaacatggtgtaaaggaacaaataagcttacaaatgttgcagggatgcattgtgtaaacccattttcacctgagaatgaggccaatccagtttaaactagaatcatgttatttggattttgcctgttccctgatgtcctctttggtgtctaccatctctggtctagctggggctgttgtgttgtccagttaatatatggggatgcatttgtgtgcccagtcattgagatacaggagggaggggagcccactgttccctgttgtataacgcacttgcttgtttgccccataaagccaacttgaaagctaattaggctatgtatatattggttaactcagttcccctgccatgaaattttgaaaactacctgaytggaacaaaaggaaccgacaacatatcattcagtcaatgtggggaagggagaaatatgaaaaaggaggagaaaagattcgtttgggattgtcacattatcacagtggacagctcttaagcttgtcctgtgagccgacaattctttttggtgagatttaaataaggttcttggtatatgtttgaagagactgtaaacacatatgtttatagtatattcgagacctctgatgactttcttttttcatttgtaatttttgtgggtacataggaggtgtwcatatttctgtggtacatgatgtgttttgattcaggcatgcaatgtgaaataagcacaggatgcagaatgaggtatccatcccctcaagcattttttctttgagttacacacaatgcaattacgctctttaagtttaaatgtacgattaagttattattgactgtagtctctggtagctttcaaccaagtgaaaatgtttagttggggaaaacaggctgatcatagtaaccatcatttcatccttgtcacttcctcagtgcagctcccaattcacagagaattacaataaggaaaaatcacctcaaatatgcctttacaatgaatttcacatatcacatgtatcacaaaggcccccagctgtggcatgcagcatacatttctaggatgtagactttgctacacacatacacacacacacacacacacacacacacacacagtaataagataaaaagcactgtccccttactacaatttttctgtcaaaggaaaaaaaaatgggaagaggaggcaaacactaaatagatatttaagtttcacacgttcaggctctatctgtttgctgcttggtagtgtttacaatgttcaaaacctgagtggaggaggaagcctttccccttggcacatacataagctcawgaattgagccagtggcaactctagggaactaagtaggtggtgactgactttggcaggtgattcttttcttggttgttgttgacatatagtaaggggcataaaccttcagtgtgcaacttgatgccattcttacctacacacatgtatacgctcctctagacagacttttagaccttttccagaaagtcccctcatgccacctccaactcagttacccacatttttcaactgaccagagggatgggttctgcagcaggctgaaggggaaggccccacagactggggttagaggaaatgaggaaacacagcagctgccggtggctctgcagtcaggagagccatggtgcaaactgcaggttccaaaaccaggtggagccccggcagtccgtctgccatggcacagagatgctggaccgtcccctcaggtggacacagcatggttcgggctgatgatcaaagatgaaaaacaattggcacaggttcctaagaaattcggccagcagagaaatataggctcaaatagaacatgtgtggtatccacagagctgcaggcccagttttcaaaatgcaattacgactgaagggaggccaggcacagtggctgatacctgtaatcccagcacttcgagaggccgaggcaggagcgttgcttgaagccagaagtttgagaccagcctgggaaatagtgagactccgtctctacgaaaaaaattttaaaaattagccaggcatcaggtgtggtggcacacacctgtagtccctgctacccaagaggcaaaggtgggaggatcgctcgaggccaggagtttgaggctgctgcgagctgtgatcgcaccacttgcactcagcctcagtgacagacggagagcccttgactcaaaacaaacaagcaaacaagcgaaaacactgatgaggaagagatgatgcaattcagtaaatcagacacctagatagaaagctgctgaatcagggactgaggcttttaccccagatagggaaagaaataaacacaaacaaaaccacaaacgacacaaaactgagaagactgagttatcactcattctttgtgtcataaagctgaccattgcaggatgatgtaagtccttcagaacacacaaacatgtccacctgcagcactttggcagcacgtgacaatatcctactgatcaaaaaaatggccaaaatagtctttaaacaaatagcttggtagtaggtacttgagggatttaattgacctccaacctttaagggaggtagctcaggtgtgtgtgtctggagcaccggagccataggccagggaaaggggctggcctcatcctctgggcctgtcaggttcaaattcccccagcatcagggccaagattgctgagcgaacactcccaaacacacaaacaccagtgtcttaagggataggcccattacaatttgctcattgaattaagcatgtcaaaagagactcttctgctaaaattgatttatcagaaatagaactgtttctgtgaaagtcctctctgcagtaagggtttgacaatccacaattaacattttacggatgacccacaaaaataattcagctacaggttctttcccaggagcctagaggatgtagcgactctatttctaaaagtcctacctagtggcttcacagaaactttttgattttctggctaaagagactcagagcctgtcagtgttagagaatgcctccttagcctacaggggaaaatatgatctccaaatagaatcctaatcgcattttttcctggtggttaatggtgtttcagagcttggtaggcatgccacctagtgttctccttcaagaggcctggccacattcaaagagaaatgaaggacacccacacatccgggggcactgacaatggctttgggcctgtgctgcggagtgagttggaggcacgcagctgcagcttgatctatggctctttatttatttttttaatctggcagctgccactggattcaaatgtcccagtgcaaagcactctctttaatttgttttctttattaaatgtacagacaaacttctgccgtctttgttgtattcttggtgtagttggaaggcacaaagagaacgtgctttgcttttattttttttttcgcttaattatatcaaagtccttttaaatgataggcattagtaattgttgtttttctttttttgacacacacctggtggaagcactatgttattttgatagaatatttttaaatgagaaaaataagttatagttataccagtgccttttagcaatgaaatagctttcaaattaaattttatgtgacaaataatgcaatgcactctcattatataacacttaaccaatataaaaaaggtgargtagaaactgctgatacaascattgctaaccattttagtgaaaatcctttctgatatctctggcatgcattcacactcacacatagaaataagttttttcttttttcttctgaatttgtttctcttaatcatttatagccattctctcaaaggtaatttttatagttctatttttaaaaattttttatgactgcataatattctatgctctgctgcaatggctttgatttaaacatttgcctattgatttgttactgatatttctagattttggtgtgagtgcctgtgcrtgtgtgtgtgtgactatatacagcaatccagtgaataggggtatacatatttatatgcatttatttatttttttgtgtgtgagtaaaatatatgtccttatacttatttccttaatttcaggctgtaataattcacacttttgctttcattttatgaaaggactccttttcccaaaaaaaaaaaaaaaaggaatttcaytgtgttcagagtctgattagccaaaacaaaatattcttgtaacttaaattttgtttcatctgtttattgagcatttctctctgctcccatacattaggtagggttttcaaatcacagtgtaagccgtatttatggcagatagtaaccttttctctactgtgggagtcgcatgtatattgttctagtctatcagtttccrctgtctgctgttttttatttatggtatcatcatatacaaatattttcatgtagtcacctgtcgattatcaaggtctccgagcctctagatgtcagatatatctgctattttttttagtttactacatttaaaacttttaattggcctgaaatttcctttcatatgtggtgtgatgaaggggcccaaattcatttctttgaatagatggccttctgtgacattaccatttattaaataatcctttctcccaacatatcaatatatcacctggccaaaatgaagtaccatatggtcctagatttacttatgggtcctctattatttggtattatccacgagacggtgtggctctttatacttatttgagtctagtgactgcacagttctttcactagcctagcctcaaccaacttaaattaaattagcctcaaccaacttaaaacactagcctagcctcaaccaacttaaattctacataattttcttggctcttcagggatgtttattctttattagattattcatctaattccacccctctccaaatcwtaataggcccctctgctgatacttttataggactttaaggcttagtcatgtgccccaagctccccctgcttagcaggtaagagttgaatatttaattgagagcgaagggtggcaaagatgtgttctaactaccatattgccagaggatcttttctacaactaattataaaagaatccataatctacctttaaaattaaaacattgagcagattttctgtcagtgaaggctacatggtggagagcactcacagcctggcttctcaaatagcctttatatggagaattcatggagatggggcagcacagatatttaytgagactggatgtcagacaacagcccttagactgcaggacatttgcattgcatcatcagaggagcaccagtcacttccttaggataaacagaagcaggggtccaagtcttgctattccagcagtatgtcccgtggaccagtggccctaccaccctgacaccccacttctactttctatatcaagtggtggccttcagcactaagcagacagatcctctgcagctctgtaggtcatatgttacctgtgtgctaacctgtacatgggagaaatccaccagtacagcttctattgcatataccatcatggaagaatttttgacaatagaatatgagactaagtttctttcgtttgatttgtttttagctatgatttccaagacattgtcttataataattacaaaagggttgcatacttatatcctatagctattcaggacatcttcataaagtacctgctatgtaccggaccagtgttgtaggtggtgctgggaatataatagatayaaaaggcaataaacaaaaatcaccttctcccctggctcacttttcttttctgttcccttttgtttctcaaactatgttttaaaaagttacgtgattcaagcattttaatttggtccaagtcttcctgctctatgacctctgggacagcttgcctggagggagacttggaggctaacatcctaccaaggtgtataagacaacaaggtgtacaagatgtataagacagccagagttggtttctgctgcttgcaaatgtaaccgattaatcaactttcaggctcaagtgtaattaagtttgaattaaactttctgtgaagtcccccttgtctctttagtagagcctcacagggtggggaaagacacctcggtaggctgtgtaatttccaagttatctaaaaactctcagaatttctccagctgtagcacaatatggttctatatttaagatgatccaaaatattagaccagtaattatcctttgatttaacttcaagtgcatgcagttagtatttctgaactaggagggacacaatgactttctgttgggaagattcaatttgtaaaacaccaattggattaggatgtgtttcctatgaatgggactagttgtgtgttaaatgaacaagaacaaagcacaagggaatgaatacctgactagtggtgaaaaataagaaacatgccttgaacaaggatatagaattgattagaagtctggtgtgaagccaaagtagatagtgatttggataaatgatgatataaattcttgctaacaacccaagatgtgtgatacctttaaaatactgtgtgtttcatatcattggaagaattgtattttaacttcagagttaagatatatagaaatagaaatatgcaggttaagtgaaatcaaacgtttcaatacaaattcctttggttctgtgtgcactcagaaccaaaaagaagatatttatgggtgcatgagtttgtgtggttgaggggacggcaaggacttgggattcagctgacttttatttagcgtgtgggcaaattttatttatttcctgcgtgctgatggaagggaacaaagtgtagagcagcctcacatcagcaaatataaagatacaaattttctatatgtgtaagtatttcttagaagaaaatcattgctttggacakcccatcacctttctcaagtgtattttaaaatcgtataacttcaggaattctacctttaaactgtatacaaaatgcacttaaaaagtggatgcaatttatttgtccaatgattgctcattacattttattccttcctgccctctcttccttaacatttactctaaattacaaagattacgcatagagcaggatatatggtggctcttgaaaactgacatgtcagcacagatctataaacacgtcttatttccaagtaccaagtacagtggactccatctcatagactgatcrtgacgatgagaatagctgacacccaatgaacatttgctccagccaagcactttatacccattatcttatttattcctcacaataaccctataaagtaatattgcaattccattatagagatgaagaaactaactggtccaaagacacagctaggcagagccagaatttgaactctgggagtcatccccaggagactatgacccagttccttcctttattgattggtgtaagacaagcatgaagaagaggaaatgagggcatcaaattcacacatgacttgaaatagtaaacagtgttgtaggccagattctccctgaggccatgacaaagcaatttagtgagaaagtctgtttaatttaaaaaaaaaaaaaagctgcatcaaaatagatacctgaaaatgtccaggacgcactccacatgtggctgcycacaagtgtcaaaggtcaacaccaaggaaggcttcgtcagtttttatggagttgccactttaaatctcaagccactaaagaacaatgaattgtctaacactaactggtggtgaaattccttggttttccatcttgtactcggtgctataatctagagtgctggtccgtggagatgctgactgcacagcaatcaggacatgagacgggagttctgaatctgggggcaatgactgtagtaagaccagtgtacaggccactagaggtcagtttcagctggaagctggagggctgagagtgatcaaagagagccttggaagcacaacccaggaggatggccaatgtcctgttttgatcttggaaagaaaggaacagcagaatggcaggtgccaggcattgagaaatggggaggtattcacctctgccccccagtttctycttccccatccccaagccattcaattccccagggtgtcttcaggggccaggaccccttatctcacccctaggctgtttctgtgggttcagcccctcagggggttgcactctacactcccacacgccccccttcttcctctttcttctggagaggaaggccttggactctgtgcttatctgcctctgatgggttagatttcatggagataccaccgaggcacccattggctggtatgcctccatttttattttgttcctttggtttttctgattctgagtatagacagattcatttccaagaataggaacctgtcacttttgtaaagtacatgacaaacagggactaaaccaagggaccagggaattcaaattgttaattagaggagctacatttgtcccaggcattggtctctgtattaactcatttagttctcaccacaaacctatgaggtaggtaccttataatccccattttgcaggtgaagaaataaagaaagtaatcacttgactagtgttgaagggcatttaacagccatgattcaaacccagtccatctgtggtgagagtgtggggtgtgggccggcctggctctgctggatgaaggagtaaggctcaggcaacaggcagcaggcggctcacagagtgcatgcgaaacaatggaacatcactcttggctgcagatgaaacagctcagccactgggcttctaggaaaattgtctagtacaggatgtgcctcatttctcttaatatctgccccatctcccatccctgggtagcttggggtccatttctgcctactggctagccagggccccaggcagcaccccgctccgatctgtcatttagttacttagaaccaggcagcttaatggctaagaatatgttttgagagcctactgctagctcagcactcagttctatcacttactctgtgtccttaggtggttttcttttttatcctgtgcacttcaatatcctcagctataaaacagtaacaggacccacttaatgaggcaggcctcttggagttgctgtgagaattaagaatattagtgtatttaaaatgcttagaagagtagcacaaaggaagagctatgtagtggcaggctatcatcagcatcatcagtaatgatttaacaaaactcattgaacaccttatatgttccagtccccaaatacaggcaagtccgtatcctcctagggctcatatatgaggaaaataaatgcaaaataagcaagtatacacataggcaaatgcaccatgtaakgtagcaatagccaagttataaattgtgattatgaagaagataatgggctggggtagagtcatgggccaggggcagttaggctgctggggtcaggtgcagctgggacttgtaggatragaggtctgtgtttcacatcccctgtgtcaggcgtgtgcagccctacgaaagaaactaaaagaccctgattttttactgaacaccacagacctttctcagcattgcatatattaaatccttcattgaatccttcaactcttaytgtagatacgagtattttcccggtttgacagaggaggaatctgaaacggagcggtgaagaaacttgcttagggccactccatcagccaaatcatcagaaaagcagcgtttcaaccactcaggctgtccctcagctcatcactcacactcttacatcttacagaattgctagtctagtttagttttagcagtgaaatttttcccactggaataccatctcccaacttggggtggataaatcttagcctgtttcacctatttcttctatcctcctccttccagtttctccatgaccctacgtttttttctgtgtgcaccatcctcataaggacctttggaggtatttctgttgcaatgcgtagttcctgcctgtgtatttaccagcctcagaccaccaagaggcaatggtgtctattcaaccgcagtatcccagtggttctgacatcctcaactcttgcaggaaacatacttagtatatcatgaaaatctccagtatctaggacagaatcactcatagtrtatgttcaataatttattagtttgttaatagaatgaatggatagttattttcatatgtaattcttactgtgattgtttttatttacctttcttattaaatttattgaatatgaactttgtggtaaatttaacttaaatgagacacaagcaatcactttggtttcttaccttttaaaccaccctgtgcagcccattcgtgtaccatttgtggtccttccttccttctttcggtcctgaactaaaggcatgtgataagcacagaagaactgtcactaacgttgtttccagcattaatcgtgaccagcatctaaaaatgcttcagaatgaccacggaagtagaggcccagctaatttctcagaggttccaatagtctgtcttcacaaattccttcatctaatatttcaaggatgtgtgacctgttatacttttaatgctttccaagaatgcagtagaatttattaggggaaaataatatcttttctaaattgttaatgttatactctgccttcctttactgtattttgtttggtttttgtttttgtatttttttggacagagagggataatgttcaaattaaagtaaaaagtagcatgtctattacaaaggaaaataaacggaagaaaaatgctgctcaagtgaacttcctgctttttaattagtgcctgtgggaagaagcttttccggagcaatcccatttgtacacgggatcttaaaacrttgrtgtgtgaattgctctcacattttccacaatcttctttcccagagcagatataaataaataactaatgaaagagttaggcaacagaccctcatccctcagaagggtatggagacagagagtaagaaaggtaaaagtggaaacaaaatatctggtagattcatgggaacagctgttataggaaacccagggagccactctcctgtacagcagatgaaagctcacacgaaaatgtatagtggtgaatttcactttgtaatgaggtaggcagtcatgcgataaaatcattttcctactcgaggatattctgttggatcgtcgctttcttcccccatcacgtttaactgctctctagtatcagaatgtcatccccacctattttattgctattttcccccatatcctcctagatacaaggagatgttgtaacaatggagaagctcctgaaaccttttacctgatgtaaaatagaagatcaaaaggattcattaatagaaatcttacaggactttaatattttttgggagcaaatgcagctgtaacgcagttttaacaactgagtcactaaaagtggcacatgccttaaggctaatgtattagtagatgaacagttttggcctacagaggagatacacaattaaaaatattcatccaactcctacacctgcatatcgtgtgtattttcatcagggcatgctaatcagctaaaacttgtctatgaggtagtgaaatagaatatttgcacatttatggtttgtctaagtatttcrgaagtcttatttttttacataacatgtgataaatttttaagaaaattaatatgtgcccttgtaaagtggtagtaacttgaattgtttgacaaacgcaaacttactggtgatttatttatgatttataactgtagaatcttgaaacaaaatgagaaccttgaaatcaattggtctaattctttcattaaatatctgaagaaactgaaggaaagaaatgctaaatgatttacctgaagtccctcagctaataaaacacgttagaactgggctttggttcttgatttctgactttgaagccagtgttctttctagtccaaaaccaaaatccaaacaagggaatgtgacaaatagcttttctgcctcaatcctgttatcacagagcatcatcttcctgatgacctctcatcttacgggaaggagagcctgaagtcttcagcacagctcartttggacacttgagtgtttggaatcctcttacatatctcactagtgcagcaggatataaaatttaggaatctggcyggccagcaaagaaccttccaagaaaacagaaatacgtatcagaacaatgggtaacaataagcttttaaattttgttcatttttatatagcatgtctgtgggtgtacatatactcttttgcatataattttcaattccctcctatatggaatggttcatgcatttttaattttccctgcgtcatagattctggtcacaaacctctgttccttctgctacttttcagtgtacaatgattgtacgtaagatttatatcatctgtaataacataaatagcgataatggagtatctcgggagatgctgaggttagtagctagtctcctggatctctgaaatctcactattgttgacatatttttgccatttttctgtcactcattttgttccccaaatgctgctttgattttttttttttttttttttttttttgtaaaacagattagaatgatggatgaaagcctgggtttgccttacaaatgtcataattccccttggattttaaaaccatagacaagttccatgcataatgcaaagaatattaaaagtaagatttcaagtagccagtatgaactttaatttagttctcttaattactagttaggggccacaagactgaaaaaaaaaatttggaaaggaaagaagcaatgcactgtcttggattttgataggagtacccaactttaagtgtacctaatcattctttaagcctgtacctatgataaagcattatcacttgcttctagaaaaacttagtggtttatgcagctactcagagatagggagagaaagaaattcgtcttacaaggatacgcaacttttttatatcagttccatcaaaaatattttattctttgattggtactataatttgacttatacttcttataatggcccttgaattttactccaagaagagcagattgcccctaacctttgagcaattttgtcttcaaagtctttcttttattttttaatacatctcaataaatgtcatgtgaattagtgaaaaaatgacgtttttatttaatgagcctaaaatgaaaaactgttattaatattcttgctttaaaaatattctatatctcatgcaaatattcacggcaagaccattgaaaattaaatgaggtaatgaacagaatcaagaaagaacacagttggtgtttgcctcattaagaccctttacaaacctcaaagtctaggtagatctcattcctttagtgctagtccatgactttttttccccaaatttgcacaaacactggtcaaatttttcccatccctgaggaacaatggctcccatacatttttcattactttgtgaagtacgtcatcttatttgtcctaaatttacttgttttgaaaaaaaaaaaaaaatccctgttatttcagaattgacaaataatccaaagctcgctttagccaagttactgactgtttcgtggaaattaattacttttctctataatagtcagatccctcattttccttctgttacaattccttggatagacttccttagtgtttgccaggcaataataaaaacaatagcacacttcaatagcatttaccatgatccagctgctctttcaacattttgcttaagagatcaaggaaacccaggcaggagggattaacaagcacacgtcagggccgagactccaatccaggcattccagctttaccatccatttatgtaacaactgacaatagttttgtgatgccaacatacaagctgtcagatctcttacctctatcgcaacagatatttcagagccttcattttatatattcaattatttaaaattctcaaaattgtacaccttgcatttgacaatgcraaaatggaattctacattttaaatttcctagaacatcactgtagatccactcatcagcttggctcctcatttctgacacagttggacrtatgcatgctattccctatrttatcatctttgttgggttcctgtaaaagcagaaccaaagactctgttttaggtgcaggtggttcatttgggagtaatcttgggaagtacattgaggagttgggaaagtcagatggaaaataaagcaaagctgacaaagagtgggtagttgagtttatagtgcaggggacaattagggcrcagtctcattgggcatctgaggagctatggagaatgtctcatagaattgtgcttccagagaatgggaagctagagcatctgtctactaatctcttcatgctgttgggtaaggattgctttttgatagagctctgcaattaactttttactctatttcctttgttggctaaatatctatctatccttctccatccacttaccaattcgtctcatttttgaagaattttaaaatgagttttaaagtgagttggagacatgagtatacttcacctcgaaatacttcaacatgaacaccatgacaaacaagttcaatacatgttcatagttcagtttttcagatagattttatatccggtggaatgttatgagttgtggcaaagatatagtggtacagcctcagcccctgtcaggctgcagagcattatcaccccccagagaatgatgtcatgctccttcctggtcagttccaagccctccacccagcaggggcagaaacacttctgattttttttccaccacaatttctgccttctaaagggtcatataaagagtcatgtggtctctactctggtgtaaggcttcttccattcagcaaaatatgttggcgatttttccatgctgttgtgtggagcaaccgttcatgccttttatggctgagaagtatttttgtctactgtagagggacacctgggccgtctccaggttttgactctcttgaatagagcatttatacaacaaggtaaacatttgttgtgtaaaccacttttaaacagatgcttttatttctcttttttttttttttttttttttttgagatagagtctcgctctgttgcccaggctggagtgcagtggcatgaccctggctcactgcaacccttgccacctgggttcaagcagttctcctgtttcagcctcctgagtagctgagactacaggtgcccgccaccacacccggctaatttttgtattttagtagagaaggggtttcaccatgttgsccaggctggtcttgaactcctgacctaaggggatccgcctgcctcggcctcccaaagtgctgagattacaggcatgagccaccacactcggcctcacttctcttgagtaaatgtcctgcagtggaattgctgggctgacagatagttgtgcattaacatttataacaacattgatagcaaaaggtcaaacctctgactcttcatgagcattmcggtggctccgccgcctcggatgctgtcaggctttcattctggtgcctgtgcactggcattccattcagactcactgacaatgttatgtgctttcttacgtgctggttagtgattcatatttttcttttcgtgatgtctcttcttgtattttgttcactttcaaattaggttcattaggaaatgtatatattgttctggaagctttgatctatttattacatatcagtactttatcagrtgtatgttttggaactattttcttatagtctggagtttggtaattcattttcttcatattttttatgaacagatgttttaatttctaagtttattactttttaatgatattgtggtctctaacctgtcaaagaaacctttgcctaatcccaactcatgaaatattctcctatttttttttccagaagctccatagttttggcattcacatttaggtttaggatccaacatatgtaaattttatgatagtgtgaggtatggatatctatatggatatgcagttgttacttttttatttggatgactatgatacatttgttgaaaatcaaatgaccatgtcatgtatgtgtaggtctatttctgagccctaaattcmaaataagcctgtttctatataaagacagagtaaagataccattagtagcaatacccacttaggtttagacatggtacatttggcagattttctaggttttttgacataaagatttggaatttccagagtaattgtacattcctggaaaatgtttagtttctaatatatgtaaaaattagtattaccattttttctggagaaataggcctctagtgtcctagtaaacttggtagaaaattttagatttagagatgattaagcttggtgagatcattttaatttaaaaaataaaagaaaattttagatggcacrtaggcttctgatattgttctgtaactcactagcctttctgctatacttcattrtaataaatatttcaatataaatacaattactggattccaaatggtagcagttcttagaagtttcttttgttatataggaaaattccacagtaacatatagattagggcattcccatttgtaacagtcacactctacacacaaaaagtccacagattaggccaggcatggtggctcacrcctgtaatcttagcactttgggaggccaaggtgrgaggtttgcctgaggtcggcagttcgagaccaacctgggcaacatggtgaaacacaccgtcrctactaaaatacaaaaaaattagccgggcatggtagcgcagacctgtagtcccagctactcaggaggctgaggcaggagatggagatgggggttgcagagccgagatagtgccactgccctccagaggacagagcaagaccgtctccaaacaaaagcaaacaaataaacaaatacacaggttgaccactcaaaacctttttttgctaaatactaattagcgagttccttttcggccattgttaaataacattacatttctacttcatttgacttaacatttcaacagctggtattccacacttsagcaaatgcctcctctgtctctagaggggcaggcttcctcaacctcacaaaacctattcatctttaaatgtcctttcacataaatcatctccgccctcattttcatcttagtttcacatgtgtgtattcttaaatgttagtgagtcaccgagcagggctattcttctagagcagtggggttggtttaattagaggataaggcctgtagctgcagagcaggtgaacgtggagcctaattcctggttgtgggtgcaggaggagacgtgcgctgggcaccatgagagatgtggggatcattgcagcatggatataaatgtgcaaggcgctccctccctttcactcatgttcccctctgacagccctgttggayggaactttgctttatagaggcatcacactgctttatgggactgctcagggcrgtgcaatgtgttgtgatccttttctagatmattgttctgcttaaaactattttttagaagaatgatttctggctgttctcatacagtcactggaattgttgtgcttctttttcatcactcatcgctggaaagcattacctgtttttcccctgtttctgttctcctcgggctacaagccagagcacacattataatcttttttcttctttttacctccaatatttatgaattttaaatgttatttcagctaaaagaaagcagcatgctatacagattagaagcttctattaatactacaggctttgtaactggttacacattgcatttgattaatgaaaaatagtgaggaccagcattctttatagataaatgtgtttggcataattccatagatgccgtttaataagtgagatgtcctgtgattcctgtccttaacacagacgtaaaattgataacctattctatacagaaactagcgtggcatatacaggaagttagagacactggcatcactgtcttagaagtctaggcattcatagcactttaagaaaytgttaagaaggtattcagcttgcaaaatgatagattataaatgaatagtaatatcccaggggaactgtagtcctatgagaaatttttctttttatttatttatttttttgagacagaatctcgctctgtcgcccaggctggagtacagtggcacgatctcggctcactgcaacctctgcctcccgggttcaagtgattcttctgcctcagcctcccgagtagctgggactacaggtgcccaccatcacgccccactgatttttgtatttttagtagagatggggtttcaccatattggccaggctggtctcgaactccttaccttgtgatccgcctgcctcggcctcccaaagtgctgggattacaggcatgagccaccgcacccggccagaaatttttctttaatgcaaattggtaagatttagggaaaattttttgcattcttgcttgttttgtgtatttttactatttgcatatgagttagaaaagtcttatgaaggtattatattktaaattatgtttatcatttaattagtgaatttttccatacagttttctcttgttaatcaaagtttcttggttacagtagttccctcttgtcaatgggagataggttccaagatccccagtggatgcctgaaactttgggcagtaccaaacccaatacaaacagtcgtgcctcagtgtctgtcgggtggctggttccaggactcctcaccgataccaaaatctgctgatgctcaagttcctgatgtaaattggtacagtatttttacataacctacgcatatccttccgtatattttacatcawctctggattacctaatacaatttaaatgctatgtaaggtcaggtgcggtgaaattagccaggtatggtggcatgtgcctgtaatcccagctagtcaggaggctgaggcagggagaattgcttgaacctgggaggtggaggttgctgtgagctaacattgcaccactgcactccagcttgggcgacagagtgagactctgtctcaaaatgaataaataaataaaatgcaaatagtttttatactgtgttggttcttcaacttgtagttttcaattgttttattacttttttatcattttgkttyttttggttgaatctgtggatacagagcacaaactgtactgttttttcctatacatgcatacctatgacaaagcttaatttatgaattaggcacggtaagagattaacaacaataatcataaaatagaataattataacaatatgttggataataaaagttatgttaatgtggtctctctagcaaagtatcttattttaccatacctgcacttcttgttatgttgcgttgataaaatgcctacctgattggattgagcaaggtgaacggcccaggcattgtgacgtagtgttaggtcagaaggaggattatctgcstcaggtgattctggatcatccagccgtgagcatgttcaagtttcaatgtcagragcagacaatgtcaatgaacaatggcaggctgcagaaacagggtggatacgcyggacaaagatgattcccatcataggcaggacagagcaaggtggcgtgagatttcatcatgctactcagagtgctgcacacttccaaacttatgtattgcttatttctgtaaatttttcattttatattttcagtccgcaatttactgcaggtaactgaaactgtggaaagtaaaaccgcagataagggagggctgctatacctctgagaagatgagattctgcctgtattaagtgagcatcctttagtgacatacatggccttcctagggggtactgggctggacaccacatctcctgctccagtgtcctctttgtaccttccagaggattgtctgtgacctagatttctggggatcgcatccctagaatgctcacgtggtcagcccatggctggcctttgtggataaacctgtgagctttgctatagatgtgactgatcctagctagattttctcatccagtgttcttagaacccaagaaagaccctaagggttggagtagtgtatctactctcaaattagaatgcagggggtggtggtggtccagagccatccttgcctatagacaggaaggattatgacagtgatttctgcataaggtgcctcttcctttgactagtgctttttattatctctgcctgatagaaagtcccctctttttcttttttttttttttttttttttttttgagacggagtctctctgtgttgcccaggctggagtacagtggcgcgatctaggctcactgcaagctccacctcccgggttcacgccattctcctgcctcagcctcccgagtagctgggactacaggagaaagtcccctcttaaagcacagttccttgagtcccaggacagccatctgatttaggcagggtttttgtttgtttgtttgtttttaggctaatgtggtctttttttctctctcacacatgcagacgtttccttttctgaaaattattttactaacttgaaaaatggagatcattgctagcatgattatttttatagctttactgaggtatagtttgacacagtgctataagtgtatatgcttttatatattttgatatctgtaaatacctgtgaaactatcactgctatcataatgaacatgtccagaaccaggaaagtctccgactgccattcagccatcccttcctttcactcctctagtcccatcatttgtaggcaaacacagcttggttttatgtcactataatttgctttgctagaattttaataagcattttctgaatgactaatactattgaccatcagtgattgttgttatttgccatccatatattttatttgttaaaatttagtctgcttgaatcttttgcctgttttttattgggtagcttaatttcttattattgagttttgaaaagtatttatagagtctagatgcaagttcttcatcagatttataattttcaratatgttctcttagtctgtgcatgcttgtctttgcattccctaaacatgtctttcaaagagcagaagttttaaattttgataaagtccaatttatacaatgtttcttttgtggatcattcttttggtgttacattcaagaaatatttgcctagttcaaggtcacaaaaatcttcttggtttccttctagaccttcatatttaggactatgaaaaatgttacaaggtacaagccatagatcagatcaatttaattgatccagagccacttgttgaaaatattgtccattctccactgaattacacttacattttgccaaaaattagcagattagtatttgtctrtttctgcactgtttgtcctgttccattgatctcttcctctgtcctgatgctaataccacactttcttgatgactgtaacttataataaaactcaaagaaaagtagcagaagttctccaactttgttttctttttcaaagttatattggctagtttaggtcctttttattcccttatgaaatttagaactttcttgtcaatttctacaaagaaatctgccttttgagatgttcatttaaattacattaaaactatagatctgtttggggagatctgaacamtattgaattttcagatacttgtaaaagacatrcttaccattttatttaggactttctgaaaatttctctcagcagtgctttctagttttcagtctataggtcttgtccctaagtagatcagattttgattgtattgcaaatgttatttttaaaattaaattgccaagtgtgtgttgctaatatatagaaaagcttactaaaaaagaaaaatatggccaggtctataagaaacattaagttctgttgcatcctagaaaagcaatgctcacgtatgagtatctgtgtgattctcatagataattagtcaatagaaaacagtatttacgataagaagatcrgcagaatttaatagatagagataggcaaggcaaaggcctaaaggtaagcaaatcacctggtgtttttgacacagagcctggtycagaggggctctaagggtgagtgtgggaggacartaggaggtacaaacacaagtaaatgggctctgactaggcttagggttagcgttatgtggatggccctgaatgccaaggtggagatgggatttaatatggtagttagtggaaggctaatgagcattcatgaacaggggagtaatgtgaacactatagagctttaacatgggcgcactagctacaggggtggaatatggactagagactgctcatacgagactcgtttgaagmctayaatagtcccaagtaacayggaccacaaaccgtgttggatgaaggcgggaggaggaaagaaaggaataggaagaaggcagaagaggaacaagcagctggacgcggtggcttacacctgtaatcccagccctttggaaggccaaggygggcggatcatttcaggccaggagttcaagaccagactggccaacatgrtgaaaccccgtctctactaaaaataaaaaattagccaggcgtgctggtgcacaagtgtagtcccagctactctggaggatgaggcaggagaattgcttaaacccgggaggcggagattgcagtgagccaagtttgtgcckctgctctccagcctgggcgacagagtgggattccatctcaaaaacaaaccaaaagaaaaaaaaaaaaaaccacaagcaaacaaacaaacaaaaagctttggtcttttacactctacaarataagtagcctttgtcaaagaagaaagaaagatctgggcagcatgttttcaatattcaggagcactgttctgggagacagaggctcagcgtgtaacatttcctgaggagaaagaagagaacaaccgttgagacagaaaactgaatttattatttagaactatatgatagatcacrtccatcacccaaacagaaaaccttcctaatggtattcctttttaaaattttcattatttaacagccttgtattatatttcctatcagttacatagaaaatatgccaaamayttatcgyaccctgacaattatactctatttcatgagttaccttctgataggtggctgaaaacagcagactcccagcaaaaaaataatctcaaagaaacatagaaggctttaatatgawttcagatattaaattaagaagtttcaacaaagttgcaacaaaatgttgagaccagaggactgaaagtattattattatggaagacaagctgttgataaaatacagagaacattaaaacctgagatccacagtatgcatgcctaacaagagtaaggaattcaacttggctgtagttggagggaatgagaagtctttctgaatgtgtctygggttggttttgcattatagtcccagaaatatctagtaaaactgcggtagagcattttgaaattaatatagtycrccatctgcattttatcattagcagattataaattatcctgaaagagtataattgaggccatttaagatgtcttttgaatttcccctgtattaattgcatttcctttagaktgccttttatgtgcagaagcattttctaagctctggtcttgcagtaccagttgcatttttgtcagtacttttagagaccatctttyagctggagcagctttttggcaaatttatatttctagaaaatgtaaattgtgcttgctacaaatgaggcaygaacagaacacttagtaaccttgatgaggaagtgagccattctcggtgggggtaatcaggagagttagagagcaagaggagaagggcatgaaggcaytacatgtgaaaatgaaacaaagccaggagctagcatggaagggcraagtgccatcctgtcttttctgtgcaggaagggttcttggagctggagcacagggtacaggggtgtggtggggaagaggcagaggagaagagaatagactaaaaagagtaggaaggtaatccgagattaggaaaaacaaaatactggcaaaatgtggcttgccagtagtttttttttaattaaccagattaaaatgtatcaagaggattaaaaatattcctgttaactcagttctttattccacttcttccatgaagaaataactagaaatgaaagattgatgtatamaggtattcataaaatgtgatttgcaatggggaaatgcttgagatgacctgagtgcctaacgtcraggggatgcttagacaaatcaggctcccagatagggccacatggtctggagtctttacaaaccccaaatgggtgatgtccatctctgttccacctgtgtgcaaagggggagaacattgtctgctaatcaagggtgatggttaatattgagtgtcracttaactggattgaaggatgcaaagtattgttcctgggtgtgtctgtgagggggttgccaaaagagattaacttttragtcagtggactaggagaggtagactcaccctcaatctgggtgggcacaatctaatcagctgccaatgtggccataataaagcagcagcagaaaatgaaagagcagrctkgctgagtcttccggcctccrtctttctcccgtgctggatgcttcctgcccttgaacatcagactccaagttcttcaacttttggactcttacatctgtgatttgccaggggctcttgggccttcagctacagactgaaggctgcactgtcagcttccctacttttgaggttttaggagtcagactgacttccttgctcctcagcttgcagatggcctattgtgggatttcaccttgtgatcgtgtgagtcagttctcctrataagctccccttcatatatacatcaatcctattagttctgtcccttcagggaaccctgactaacacatcaagtaatgttacttttggacgattrgatacaattccattattcagtggcctattcagtggcctttgactgtcattggtatccaatattgctgtgttagttgttttgattatgatggcatagcaaaaatatatatacagtacatagggatgtaaatattaaaatatttagtctaaccaaggaaacatgagatgtgggtgarrgcatatatttatgactcattttcctcatttccactattccttccctgaattttgtctgtttggaagaaatcaaatggttttaaagaagcaagttgccctgggctcctccatccttttgcattctttagacattgtaccttattctatgcatcttattgaaaatggttttataatcacttatcacgttttggttttagttccttctttagccaaatttgtgtttcccttgactctttttttttttttcttaactgaaagtttctgagcactgagccagtgtcaagatttacagaatgtggcttwtatgatggacttcaaaagtggctccttagaattggatgaaggcaagtttttctgggcattgagattaatagtcaacattttaattctttgagaccattctgttctgttcttttccrcttgatggactttactatgaatgttctgagatcacttttataaaactatgatattatgcttgctgtctctgacgctgaaattcagtgttagttctgtctgtatctatgatattctgcttgctgtctctgatgttgaaattcagtagtagttctgtctgtattcctggtagtctcatagtgctgcttaaaaagaaaattcaactacaatcccaaattctctgatgagagtagatagggattttgatgtaataaacttgtattagacgaatcaggattaatttgcccttgacttacttgattatttaaattagttttcacttgattagctttttgtaattaaaatagcaatatggcaaaatatcagatatgtgctgactragaactgtgtagatgcagaagaaagtattaagagaatggtaagccactgccagggattaaccaaatgctgcattttgttcatctcctaatgggaagtaatttttcaatggaaacagctgagtaagtcattttgttgttttttttttttttaggttttattttttttccatctttgatttaccatagagtctagaagtcatgttgtgggtgttttgctgaaaagtacataaattatcttcagagtcctttttgtgctttttttgaatttttttgtttttttttttgcatcacctgaaatccagagttgaattaatgtccttcattttggtaacctgatttttcaattaagctatttccttttatactggtgagagagaatatctatcaaagaaagaaaatatatgtgtatcaagttttcattcatataaaaaataaaaatcatggcttcctattaagaaagagtacatgagttcataaagaaaatattatgaattgttttgattatttttactacctgatkctcttttactttctgatgcttaaataacaaattatctaccttgtatttcatataacaattattttagactgtctaaatttaatggtagtgactagtaccaaggcaaatgcagttcagcagaactaacagatgctgaggataataaccagacctgggcaagtgccatttaaacacacttcatctcatttcttttcctttttttttttttctccttttgtactagtgtcactagagtgtaggccattcagtattttcttgatctactaacattttttattgtaacacatctacttcacaaatggtcccctgagaaacctatattagatttggggactgaattgaaatgaattttccattccttataacatgaaaccaaattttcaggcattttcttattatttttttctcccagatrttytcagtgtttttcttgcttactgagcactcccctgtaatctagaatggrctttgctgtgcagggcggtcatatgtcagaggggaaatcagacaggaaatgcagaggcgatgcgggtgtcttcagcascactggctttgaccactgtttttcagagtgtggtgggagagaggctagttcctcgacctgccctaggtttcatggccatatagttagaatgagctttatgctgatggagacaggaggcagagaaactcttggcagacaaggcaggtccctggcaaagccccacctttaagccaaaaagcctgaacccatggcccaaagtgagagcttctacccctgcttacccgctctctcccgagtasttctttctgaataatgtctttttaccaattgaagctgccctttccaaactacttatggctcgcctcacccccatcctgtgcctataaagaccccaggctcagctggtagagaggggaaatggctggacattggggagaggygaattggcttctgagccactgctgaatgtcatagagaggcaacctggcctcggaggagaaaggaagagagacaacctgacttcgggggacagtgaccttcccctcccatcccctttccagctccccctctgctgagggcctctttcatcactcaataaaattgtccgcattaatcatccttccatttgtctaggtaaccttattcttccagtgtaccagacaagaattcaggacccaacaagtgcgggtaccccaaaaggctgttataatgcccctttgccctcactggcagagggaagccactgcactccatgaggcaaagggcccgctgaactgataacacactgttgtctgctgacagcagacctaagagagcattgtaacatgccctctgaggcctttgggtcacagtcagccccacctggatgctgccacagggcctacacatgatttgctcctgctggggctaaagcagctgaccatttcytgcactcacttccctacacgttccttcccgcaaggggtgcgccacagcaggcccaagtgagtaattggagtttgttcctgctggtgccgaaggagcaggcttgttcctgcactcacttgcacgctccctcctgtgaggggtttagcatggtgggctgagtaaacgggacagctctgtcacaggtcctgtgaaggggtcaagaaaatatcctgcatcaatactattttctagccttgaacacttgtgatcatattaacrttttaaaagccctggtaattcaggcatttaaaatatctgtttaatttggtttaatctactatttttgaacatcatcgactttggagcccttttctgcaggtcacattggtggaactgcttttttgtggaacacattttgagacaaattaaagcagtgcattttaaacctctctgaccttgtcccagagtaagaaatagatttcacatcatgatccagcacacacatatatgtagctgaaacaaagatttcagcaaacaatttactctttctatgagatacaatctgatatttcctagttgagtctatatcatttttaaaatgctgctttctattcatttgtagaccacactctccttgacaatattgggaaattggtcttgtgtgtcctcaccgtcaccttgttattcttctggggctgataccactcatattcctggcagataccaagtcttccttcctcccaagaggatcacttgttatcatgaaatttatattgtgttcctgcagtatgcatgtggaagaactgtaaactactgttcctgatgccttggtcatttcaatcattttcacttaatttcaatgaccttgattgaggagatagggcttacctatagagaaatgatagcgggccagttagatggaagttatgatgtggctgagtgggcctggtgarcttgaggtaggctattcaggaagggtgtcatggagaacagtagttccactggttctagaagcttgaggtgactttggaygaaaattaggaaggatttggaaaatttgggagacacacattgtgaaatactaggaaacgatgtgagccaatcacaataagaccttacttaatcaatgaaaagctcccccagggttgcttgcatttggcaggataacgttttatttcattggcatgcatcagtttgggaaggtaaaatcagagaagagcctttctttccaattctactgttgagcagccacaagttatgtcttagtaaaaagtgacctttgttattagaagctcatgtgggacccttaatataaaatctgttgtttgtaatggattgctgctaatttaagggtacataaagcattataattatttgattttttttgctaaataatgtttttcacaagcactttctatrtttgtgttttagtaaaataatcagtgtaaattaattatcctgtaactctgggcagtttatgtctcttacacttttcaccttatagaaaagatttcttaccctatgtgaataaaaaaattgattattaccttatgtcctccgaagatatttttatctttataactttttcacataccctgtctctctttctttttcttaaagtgggactggcaagacgtgaatcagccagtgttcattggttatggtccrtggtagatttttttctggaagactgtgtgtttggaaaaggaaaattttcttgtaattctgaaaatagtctcaggcatcaaaatatcacattataaatygtcactaactcagttttcttgtggctgctcagtttcctcatgagagatttctataggctagataagaagaggaaaagatgactattcaactaaacattttagcttcaaccacaagctattttaagaaagggactgggaggtgaagaattgcgaagctgcaaatatgtagaaagagactggcatatgtttaaatcatatgtttctaaagtttgactgagcatgaaatttcattttctaagaaggtgcccttgggaatggtggagggaaatgctggtgcacctgtttgtctgatggagccaaaccttgagacaaactctcggccagccagcttgcccatccatgcagtgggaacaccctctgacccacttacgagtgtggagagcacattctgtttcttgaaaattcaagacagaggaaatttcaggtcatctgctgaatcatcttcagttcttacattcttcagtattgtggacggcctctgattttcttcccttttttctcttcttaatttaggatcgtccctgctgtctttattgcctcatatagatcttcactagtggctttcctatgctttgccaatttctcttttacttttattagaaactcaattgtattatatagcccacagtctcaggtgacatttgagcattttttcatagtattcaacgaccatgaattgaggttcaataattgcttgactcacctcataggatgtggggtggtgggggagaataaataacactggacagtttccttaaaatagataaatacatccaatttcctgtctgtgtcaatatcagagaaccagagttccttaaacatttcttcctttccaggtacccaaacaccaagaatatttcaccttgaaaaaagctggcagggaaagctgtagttcgttttgctcttcctttacatcttttgaatgatttagaggttaatgagcctttgtaaaggcaggacccaaatataattgagctggatttatttttccccggtgtgagatctgttgcaaaatccatactgtgctgcgttttctggagtgcgtctttttcaaagtaacagctttgatgttcttttcacctgagacgaatcctgccaggggctctgtgctctagagcagccctgcggtaacaaagccttgtgtgcgggagcagaggaagwttctgccctcaagaaatcatttgtaccctcatgctctggagacagcatataaatcaggagcagaawcagagaaggcccccaaactcagacantttaaattcacatcagaaacattttgccactntcttcttaggatacatatgtccattacagattagcccacacttaagttattgctgtgacygatccttttcactgttgttgtccgtcaggtatttttaaaatatccatctgtttctgtatttactcacatatttattttcttaaaaagacacggcgatggtagtggatgtgtttggtattgggaatattactacgaaatgaggtcattaaattcctattggcttttttactgaattcaggaatctgcatgtgaagaagtgagatctgtccaggtgctctaggttggggatttagaggcctgtgacaaaatgcaggaatgtagagtctttataccatacagtgctttccaagacaaaacattcattcatgggggtttatttatcaggaaacttggatcctgctgcacctctagaatcctggccccctgttcttgcttcatcagtatcatttcctgaagaccctctttccgtctcttgactgccttcgcccttccacgttagtgacactgayggctgcagtccctcaccatggcactagacagttgcgcattcctagcccaaggatcgggttatttctgcatttctggcccctgatagtgaaactaccagaccctggagactttggagtcttagagtgtctgcactcactttttggcctcaagaccttcattttgctcttaacagtacaggatggcaaccttcctggtttccatcttgacttgattttactttgaaaaatgtacagtcttggctgggcatggtggttcgtgcctataatccctgcactttgggaggctggaagaggcggatcatttgaggtcaggaatttgagaccagcctggcgaacacagtgcaatctgtctctactaaaaatgcaaaacttaactgggtgtggtagtgcacacctgtagtcccagctactagggagggcgaggcatgagaatcacttgaaccagggaggcagagattgcaatgagcagagattgtgccactgcactccagcctgggtgacagagtgagaccctgtcttaaaaaaattatgaagaaaaaagaaagtaaagtcttatattttattttataaataaaataaatcaatattttaaggcctagctagccttcctggctattgcctcttctctaatacgaccttgaaggtgcaaagtaacaatgaattgtcctactgggagatggtgacagccgcagaaatggtcagacgcagacacagggttgtagtaatatttcacttctcactaccctatttgtgccaagaaatccatatcttaagtatgaatgaatgagaagaatctgtttgtcccgtaagtacccccaccctggccacacatatgagcaaccatacttgtaaacacacttgaacctgcaattgtctaaaaaagaatgtcaatttttgtcttgtcagaaagtataaaaggaggctttattataacttttctttccctytcaatttctacccatccttgaactttttgtcttgtatctgagaacttcctaatttcctgactgctggcccatctcagaattctactgcccaaagctctttggctctttgcagggaagactaaaaatatatttcatattatggttttctttcaggcctttgcttagatgttattcctttattttaggcttttttccacattttaaatatgtggtcactgtttgtttgtttgtttgtttgtttgtttcaatctggcttatatcaccttggactttactatttttttgtttttgtgctacctgcataggaccttttaaggattgaatgaggtagtatatgtgaattaggctacaagttatgctgctgtgacagggacctcaaaatctccatgacttaatcttgatagtttagttttctcactggtgacagaatggtccccatgttctaaagtcttttttttttcaagctcttaggcgtggaarcccaaacgctggtgaattcagaagtcatcagcctttgcagagctgaatcacgagggtcaaactcatcagataactctgtttaaaaggtggaatactggttggttaaagtagaataagaaccaaaactaacaaagggagaagatactaatgtttactcatcagcacattctctacttatagataaatttttctggatagctcaattgttatccaatggttgttttataggcacagaatctacaaggctagtcaactggattatgttaagcagtgatgttaccagaactatggtgccctgatgtagctgactgagacaggtcattatagggtcctccatgctggttgtcgacttggggctgaggacatctctgggtaattttttcrcatagaaatattgcgtaatttttgtctccttggaattctcttttatgctgttcatgactgtctacattacttctttattgataagttatttctgtggacaagtagaatataattaccttgattgaatgttttgtggttaaaattataaccctgtaatgcctctgtgagtgtcaatttatcatagctgtatacgagatgttcacaaatgatctctttggttattgctaatatcgtttttaagagtatgactttaaaattgtgtttggaagtacccttcccttacctttatatactaactgcaccttaaaatgaaaagtccattcagtcttaaaaagtttactttctattttataaagaaaaaatataaatctgtaaggtatcatgaaatcatatttagtagggtgtccagaatgctgagaagaactcactaggctggatctgctttaagatgatattcacattgtcacattcattgctaatccctttcctgtgtcagatgtcatgagaatgtcctgtgtttgttcccttgaggttgcaacatcaatacaaaatcaactaaagaaagagattggaagtagccaacatagacgtggtatgatcctgtatcttttttttttttttttttttttttctgagacagagtcttcctctgtcacccagggttgaatacagtggcacaatcttggctcactgcagcctccacctcccaggttcaaatgattctcccacctyagcctccctagtagttgggactacaggcatatgccaccacgccagtgggtaatttttgtgtttttagtagagatgaggtttcaccatattggccagccttgtcttgaactcctggcctcaagtgatcctcccacctcagcctcccaaagtgctgggattacaggcctgagctaccggacccagccctgcatctttttagacaaaataaaaaaaggccgggcacggtagctcaggcctgtaatcccagcactttgggaggccgaggccggtggatcacctgaggtcaggagtttgaaaccagcctgaccaatactgtgaaaccctgtctctactaaaaatacagaaattagccagaagtggtggcccatgcctgtaatctcagctactcgggaggctgagtcaagagaatcacttgagcccaggaggaataaaaagaatgtaggccaggtgtggtggcacacctgtaaccccagcactttgggaggccaaggtgggcggatcacctgaggtcaggagttcgagaccaacctggccaacatggtgaaacctcgtatctactaaaaacacaaaaattagccaggcatgatggtgcatgcctgtagtcccagctacttgggaggctgagatgggagaatcacttgaacctgggaggtggaacttgcagtgagctgagatggtgcaactgcattcctgcttgcgtgactgagcaagacggtctcagaaaaaaaaaatttatatatatataatgtgtatatatacatacgtatatatatatatgtttagtatatctatctatctatcgatatatatatatatttactaaacatttatttttagttttcttacatgatttccaaagggaaggtaggttttgttaacataaaatttacagcacacttgaacaaacctggatattacccccaaaaatgcaaaagattataaactgagttcagaggtagagaggctttggagttggataactaaattgttcaatgacatcgtcatgggccagactgtccatctctagtctactatctttagcatatgtttgctggatggctacgtgggtgctatatagaaaaagagataatcagttgggagaatagggtctggaggcagggatcctaaggccgtttcacactgacttcctagaactaaattgaaacaaaaaccccaacattccacacctgagtaacaaaaggaccataggctactccctttgcaaaccccaaccttttctgtgtggcagatgggaaattgaaagtacgtttgcatagtagtgtcactttgtatcttcacttcagcctctgattggtgctgtctgcaaccagtcagactgattacaggccaagtcttcatttgcatagaagtgcaactttgtaactttagcctctgattggttgcttttcgccgcccatcagatgtttgtttaggagtatgacctttgtaacttcacttcagcctgattggttgctttctgcagccaagctgacctggatgctgattgcgggccaacactgtatttacatgagatgtccaccaagtggccaatgggaaacctctgggggtatttggacccaaaaagattctgttatctggggcccttgagctgctgcttcacccactcccacactgtggagtgtacttttgctttcaataaatctctgctttctttgcttcatttgttccttgctttgctgtgcatttgtctaattctttgttcaaaataccaagaacctggacaacttgcaggcaagactctccactagcaacaataattccccccaatgtgtaaatattcccaggcacagtgggcctgacattatgcttagcacaaaataatgagatggtccttacttacaggaaaagaacaatttccccagaccacccaaatcaccatttggggaaatccctgtgttttattctacatatccttattctgaatgtattgtctttatctgtttgaacactggtacgaactgttgacatccaggtctttattaaacagctaaaccctgagagcaacaaaattcaaagctgagaaaagtggggattgcttgtatgtctacacacctaaaagggaaattgaaggttatttttacccatcatcrtcagaagagttcaatttccgtaataaattgcgttgaagtgaataccttgactacaggaagtcatcagggatttttcctctttggaaatttaatctgtgatctctcttataattagtgattaaaaagaaatgaccaatgggagttctgtgtgaaagcctgaatccttgattaagttctgggaactaaaaatgatgagttggtgctatgctcctcatcccttaatgtactaggccttttacgttcatcctcgtcgtttcactccaccgtagccttaaatgttactagataaggagcaaatgtggttctctcaccaaggcctgtcagtgtgagactttccactgtgccgaagctttacagtcagggttagcaacccaagcaagctgtttgctttttgctcatgccaagctaaaaattggtgcaattctcagcagtcaattagaactaccaaragttcctgaaatcaactatgtaagctgtcattatgccccctctgcagtggtgaagctacaaccaaaggttgacctgggggtgggcctgtgaccataggtcctacagttcgtgtgcacctactgcagacattgtagggaagccagctcccaggaaggctcggagcaccataaacctacaccagctgatcttctgacagcatccttccacctcgatctcatctgtaagttatggtgaataatctctgcctccattctttcttacaagggtattataagaattcattaatgctgaaagtactttgagcacctctacaaagtgcttttttgttatcgtatcacatttgatatctcaccaatcttttgaaagatgtgagtcatgaatattaaaatccatcttgcatattttatgtgtttttatcatgatgggagaatattaatttattggagatttgtgcttttctaaaggttgcctttaaagttctctccaagtgcgctttgttaacctcaaccaagtgtgcgcggtaacagggtcaagctggggtagtgagcacctacattttgagagagagcctgtgatagcaagccgcatcaccagcccctttctttgccttcttaagtgtcaaccacttttaagcatattacatggagaagaatatgtagatttctttaaatgagccagataatttttataatgtcttattcaatcaaatatgccatccgttctgtatgaaattatatatttttgaccctaatgactaataacagtttgattcagaaatatctaattactcatatctctctgtgactttttccccatgagttctctgtgcctggaatggctgcagcccgtcgcttcactcctgtcttcttgaatcaaatgccttctcatttttcaagactcaattcaagcttcatcacctctaagaaacccatgcagacagaataaacacttttctcctgggcaatctcattataccctgtgctatttattacctaatatgtgcaatgctttattgcatttaattatttgcattcttattttcttcaaawgtatcttgtttgcccttgatgttcagttcatatggctgctcatatcagcatgaattgtattcacctgctaggaacaaagtccaaaaattccagtgattttaaagctgacagaagtgtacatttttctctgtagtagaagtctggtcataggtagtctaaagccgccatgtatcaccactgagaaccaggatctctgcctcattgcccttatagtgcatggctattttcccaaggtcacctcttggtccaagacattctatggcacatcagccatcaagtccatagtgcaagcaagaagaagaaaggagaattgctgataaagactcgtaccagccagcttcattctttgcatttaaggaataattttaaccttctgccaacatttcattagccagaaattagtcaatgatacttctagctgcaagggagacttggaaatctagtgttgtgggtggccattttaccaccttaaatatctcattactcaacaaggaagaaggagaaaaatatgtatcaccaagacaactagctagtggcctctgccaaggtgttcagtaattctcacatgtataaataaataaagaacatctcctagaacaattggccatgtattacgtgccaacactgcaaatcatcttgaccaattcagtcacaaaattgggaattaactgagaaaaagtccaaaggctaattaattaggttgattgccttggtttataagtaattttttattcaattctagtagctttcctcagactagtagtatttatcattattatttacctgtttccaatttcccatctttgtagtagagatgatgataaaatctacctcaaacatggttgttagcggataaaatgaattaataatgtaaagtgctcagcatggtaggtgtttattaaatcttagctgtttcttcactaaagcaatactgattctgttactgtttactgtttgtttactctattttggtcactgtgggcaatgctgtacaaatattaactcaaataatttgattataagtgccttttgaggtctgtgttgttatctttattgcataaataaaaaatccagggggtcaggatggtcattcggctaggagacacatagcgcttactatgttcccaccacagttctaagacctttatgatcattaactgctttagtctccataacaagcctataatggaggaacgatgctcatctccattattcaaatgaggaaactgaggcagagagagtttaacttacttgaccaaagccatacatcaagtacctggcagagacaggatgtggagccaggaagtctgactgccggatgcaggctcttcaccactgggctgccatctgtgctgcatgagccagggctagcatctggaattctctggtgcaggtaaccccatgacctggggttgtacatttagccagtataataccccttctcactatgcattttcattttttttctatccatttcttaattggctactctccttctctcctgccttactgcttttcagacttattgcagtttcgtatctgagttttgtgaactaaaatcttttaagcagcttatgcatggatattaatataagtgatcatgtgtttacatactcttggcatttaatatgagtcaaaatagtaaacgggacagcttacaatggtgcattgcagactatatttatggaaaggttttggtgatcatcttgcctgagtgcgctattttcagaacagataacacacaaataatcctggttagactgactctcctttaatgcttcttctctagggaaaaaggctacttccatcaaatgggacaatgggcagctatttctttatacctgctcttcgtgtgtgttaactccatgtacataagcttcttttgctccccctacttcccaacagtatataccacttatgcaaagtatactatatagcagtattctacatttatttgaaatcaactggatgctttttaagtttctctattaccaatattgactgccatgggtaatttgcatgtattgcctccaaatcaagcatgttttctttcatttttatgttgtcttaaaatacataatcaataaagcaaaatatgttgaaatttaaatggttaatttgaatgttaattgaacagtaagacaagtgactgcacttatttgagctagaatgtctctgaatacattaaactgtagattgcacagttgaagtattccaaatatatttaacttggtttatcaaaacccattgaaaaataaagcattaggtaaatttgatttgattttgaaggcttagttatatactttcaaagttttgaatcttagatacttttgataatttttattaaaaacccagaaaacttacttttgagagaattttggggaagttgcatgaaagtcaaagtttacaaaaacgtgagtatgctagcatgtttcattctgaatagtcactatatcataaataatcttttttatttttatttttatttatttatttatttattttggtgacagggtctcactctgtcgcccaggctggagtgcagtggcgcgatctcggctcactgcaagctccgcctcccgggttcacgccattctcctgcctcagcctccgaagtagctgggactataagcgcccgccacaacgcctggctactttttgtgtgttttttagtagagacggggtttcaccgtgttagccaggatggtctcgatctcctgatgttgtgatctgcccgcctcggcctcccaaagagctgggattacaggcgtgagccactgcacccggccatcataaataatcttacagtcttcctgtgctaccacttttaaaaattaatataatgtaggctcttgtttcaaaaaacatggcctttataatagtaaatattcctgacccaatccacctgcattaaattgctttcatttgtggaactggtgagggcgctccttttgaactggtttgaggtcatttggcaaccctctgagatgtggcaattgtctttcctccagtggcattgctttgctgtaaaagggaacaaggaaaccaacgaaaataacaccattcccctttggaagaaagccggaaaagcagagagctggtgccgtctaaaccacacacacatatacacacacacattctctccctcacaaacacacatttgttgtttatttttcagttgtcacgattgcttttcttcattgtactgcactgcatacctctgcagccaaacacaatttatattgccaagatagatgctataaaatgaagttgaacatggcaggcattgaaagagtcgtgtgtttgcaaatgattacctgccatatgtttctcaatttcttttttttctaaattatcatgaaaagcaaaaggctagaagggcaattgtggctcttagtcttagaaattataattttaaacaggaaactagaagggaagttggattttagagtgcgaaaactgaatcataatgcaatccccaattgaatgttcagaatcatattatcaaggacaatgcttttattctaatagctaattctgctgaactgttttcacagaactatttagtgacttaaaatcattcaaatacccaactttatctcacatgcagagtgcctttttaataaatgaagtcattggtgacattaagtttccaaaaatataatggactttcctatatttggacatttgtactaagtagcatttattcagtatcctggcaggttcataatttttttttttttttgagatggagtctcgctctgtcaggttcataatgtttaaaacaactcaaagtaggcttgcaggcaggcaccttctgttcgttggagtgggccatttcagatcaactggtacctacagatacttcattttattcctatgtataggtgcgggtctgtttttatactttttactcatgtcctctgaggctgatgtacgtttctgctttatgaaacctaatctctcagtgtgagtccacagctaagctgagaacaagctgtcattcccagtgctagttttaggcaaactgaccaccatggcccatacatggagatgactgtgatgctgtggagagtgctatgggtgtgtttccatcatactgccatgctgattctctttaccctgcagtgggcccttcccacacccgacgtcctcataagcctctgttcaaattgtctcttccctgtgcctgtattcgtctttctgtgtcacgtcacttgttagtggatttttccattctttgtatatttccacagttgtccgctcttcaagggaaggctttatatttttgtagatacttattctaaaaattttcacccaattttaatctacaaggacttaagatggtgataggttaattaaggcgtgttagtgtagatgccaaggaaacaccattgttgatgccaaaggcattaagagcctcctttggtttctgccaccatcccctaaaatagtgacagcaaaatgtacaatatatgcatgaatacaactccatttttcagtattgtgtcaaattgagtttcattactttaaacttctttttaaggaggtaatggcccatctctgggtatcaaggaaggactgaaggcatcgatcatgtcttccatcattcttagcccccactcttgctttctcttagttaccttccaacttctaaaaattctcaagctttgctttatctccccttgttatttccttgcttggatgggcagcaccaatttctcctgtgttggaccacttggtattgcttcataggtcactgatactctggccctattttcttggtgagatgagttatgaatgggttctcttgctatttcttcacattcactgcctttttcccttctgcattatctaatcaattgttaatctctctagtgtatctttattgaaaatatggyatttttttctctccatatattacatttgagactttcaacactcacttttctcctcatcatgatcctctttccctctacttccttggacatatggagcatgtttgtaatagtagctaaatattcttgactatgaatttcattatctctgtcatttctggatcttttttaattgattgatttttctcctggttgtggttcctatttttatgtttctttgcacgattcatagtgatttactagattccagacattgtacattaggtggtggattttgtagcattctgtttaaaaaaagtttgtctttatgcaggcaacagttgagctagtcgacatcaattccttttgagacttgcttttatgctttgctggggcatccagaagagccataatgctatgggtaatttagccccaccatgatgacagtagtcttctggcaactctaccagatgcctcaagtaccataaggtctctccactctgtctggtgggaatgcaaaatatcccacctccgtgtgagctttgagaattgttaaccccatgcatgtacggaaaaataatattcagccagagattcaaggtagtctatccgcaaatttccagaactctctcygtgcaagtcacttcttttaggtattgtgtcctgaaaattctagtttccttaacctccctaaacttcgatttgtggttccccagttcaccgagacttctaggctttgtttggtgtctcccttcctctgctatagctaacaaggccaaatctttgtaggtttccttcacgtcgggatcacagtcccgcattacctcagtccaatcatatgtattttatatatataacttctatatatccactatggtttgaatgtttgtcccttccaaaactcatgttgaaatttaattgccattgtaacagtgtgaagagatgggacctttaagaggcgataagccatcggggctctgccctcatgagtggattcatgtcctagagtaagtttgttatctcaggagtggacccattatgaaagggcaagttcagccccctttgctctctcttgccattctgccatgtgatgcatttcactatgtcatgacacaacacaaagaccttgccagatgccagcaccttgatactggacctcccagtccccagagctgtgagccaatacatttctgttcctaatttacccagtgtcaggagttctgttatagcagcacaaaacagactgagacagtcagaaaacagttgtttctctatttttctagctgcttatagtgtgagagaaattagcaaagcagataacccttaaagtgaagaactaggtgtctcaggtagttttaggtacytcacctgcttcctgtaatctctacagacatttgcttaaatatatactaatattgcctccattttataaataaggacactgaccccaagaaagtttgagtagctggtaaatagcaagtcatgatttcagtccagacttgtttgatttctaagcctgtgcaacacaataatattcttttatattcccagccagacctccaaattaattggaaataaaatcatttattttaaaaagtaacccacttgaagctgaaggcttttaataaatgattctttgatagtcatgttactatatttttcttagaatagattgagtgtttcttttagagtctcattaaaaatgaggtacttataagataaatcctttttctatacattttcacacattcctctttatacatctgcccacttcataaataaaattatatttaattatttttaaatatttttatacttacaaagtaaatattttaataaatgtggataaataaataaaattcctttattttggagttatctgtgttgttacatgaagtggcctcctctacatttccctttcaggcaactgacaataaacaataagcagaggccctagctttgttacttggaattgatccgctgaagtaatgagtacataaatgactcagacttttccactcaagtttcctgtagttaaagtgaaaatcagcaattcagctgatcacagtgaygatgctgaaaacaaaggctaccatttaatgaacacttgccaaatatcatcccatgtcattttctcaacaatccaaggaggcatagaccccattttaagaaatgaggcaacttatgcctaggaaattaaattaacttactccaaattacatacctggtaaattctagattccaaatttaaacccataactgatggcttggaagccaacacatatcgcttagcagtgtattatttgcacctagtaaataaatgaggtgacatttacacaaggcagaattcagaacctaaggcttacttgggctgattcaaaaagaattaaaatacttgcatatgtattactgagtagctaagttatattcaaacagctgaaatgcatcaaatcgttgagttctccttaagtgaatcctactaaaggggaagaagtttttcctggatgttccttttcctgttcctgtgtgagatatgcatgtatatatgaacacacaatatatataaaattatacctatacaatttctatattatagaaattctgtagattatctacaatttataaaaatatatttatttatatatatttatatatacataaatacattatgttttaacagaaatttagaaagtagaacatgtttctttcctaaaatatatgtacaatgtattctgggggactcagggctgagggtgaactccagttgagggactcagcaaggcttcagtgagaaaatccatctgacttgggcttttgaataaagactgtattttgagcgcttttgtagaatgtaaatatattacttagttcatcctaatatgacttttattttgttctttaaataaagtggtttgcaatcccaaggagtcccttacttttgtgatcagaaatgatcagtaatgtcagaaaaggagactgaaaatggcccctcccctcccccattccttcagcctttcacctttcacctttcaccttctaccttctctgaccagcccattgcaaagaccctctcatctgcagatccacagtcagctacacacactgtcactgacgtggagacaagagtcagggcaaggagacagatggcctcagcactccagcagactttgtgaagtgatgatttcaactctgatttaaaattttgagcctcagtgtattatcaaaaagcactttttctctttctgttgcctcagtcagtctgtaggtataaataaatgtcagcttaataggtgaatgaagtatgcaccttccaacccactgaagagctaggatctaatttactgttgttctaatttctcagattccatattcaatgacttcttttaaaatttcagttaggacaactaatcgggaataaaagtaaaaatgttttctgtgcctttaatcgcggtgttttagctagtcctggtggctcaaacctgtaatctcagcactttgggaggctgagacaggaagatctcttgagcctaggggttagagactacagtgagctatgatcaggccactgcactccagcctgggagacaggggaagacccagtctgtaaaagccaaacaacaacaacaaaactaatattttattattccctaaaaatagtatattttgtgaattagacagaatttctttatgtaaaaggtgatgctactgatatgccatcagtaaggtgggatgctctgtgttattcccagttgtagtgataggttttgttataacatgtatatttcttattaaaagtactaggaacaattggcttgtcatagtttcagtatgaacagtttcgattaaaccttgggattttttctcgtgtaaaaatagctctattgtaataatggactctaatctttagttttcaacagtgctagcatagggtcattattgtaattacttaccagaagaatgagctgacatccactctttctttttggcactctctgcctccatcaaaacctttttccaatcaattctccatgctgctgtcaacctttcttttcacctatggctttgatctcagagtagctttcactctaaagagaagcaggtccaaatcctcactctttgcttcaaagcctttaactagatcatccaaaatttttcaactttcttctgccttcatttattcctactcagacattctagttaaataaattccatgtccttgaagtgtctgggcccattcacttcactctcccttctgaaacttctcctggccacctccctagctctgaaatgttctgcacatgtatctggcgaatatttgatgttctcttccatcagtaacttataaaacaagcaaacaaccaaataaacaaacaaaacaaaggaaagcaaggtttttcaactaataagagatttggagatttttcctttaacccaaagtctggtgctatcttgcttcccagatgtgagttaaaaaatgattttattgacattgtaaatgtactctggtggtgacattgtatatgtactcaagcttccactgtagtgttcagttgagctggaattccttctcagctccaccagttcccatgctgtcttggaccatgtgtctcccttgcaaatccattttctcatccctaaaatagtgataacacctaccatatagagttttgtaaatatttaataagaggacgtatactgggtaattcattcgtatcagacagaatcttgttgtagcatctcccaagttacattatttcgtaaataaccttccatatttcttcacacttaccatctactacccaaattctctctttctttttctactaaaaatgcctcaaaaaatatctaggctcagcatctctccatgctcacctcccactctagcctgtcatttcctcctaccactcttcaaaacgactccaagaatcctcacatccccaaatgacatggtcattttctttcatgacttctgggacatcagagtccgccgaatgcacaccggccacatgggccacttctctttggctgccctgacgactcttcctcatcttcccagcaacccaagaactgagcacccatatctcattttaaaactcttctctattattataccttttaaattattgtcattcgtgcccatggctttctgtgatattatacatggatgactacaaaattgatatttccagccctatttctctccctttctccatccttgtatattcagctacccattggatagtaggatggggaactagcatctcaaatattacatgtcccaaatagaactctaaatacttcctgccaaacctgcccttccctgaagagaccattaccccagagcacagcaccactgctctctcagttgctaaggacaaatatcttcaagtcctatctgactcctgtctttcttatacaggcccccatctaatccatcagcagcgttgctgacgctacctccagctagaccttgaatccgatcacttcacagatccctcacttctattctcttgttcaaacaccatcatccctcatggtgcctccaggcagcagcctcctgcccagtcctattcctatcagtcttcaatgtctagaatgttctcagctgattctcacacagcagccagagtgatccttctaacatttttcagacacaaaccatctgcctgcccatcacattcacagtaaaaccctaagtccactgtgcccatgggactgtcctgatgtgattgtggccatctctccaagcacatgttctgctgccccgacaatggccacggtgctgtggccaaatgagcttctagactgttcactcagtatcgttactgagctcctgcatcaggacctttgtacattctgttctttctgcctggaaggcgttcattcctttaaatctcagctctaagccgtctcctctaagatggtttctctgcccaccctcttataacccgccatcccaccgctctgcttgatttttgtccacagcacttatcagagtagatttcagagatagagatgccctggagtcctggccctgttgccttcaactttgaactgtcctttacccctgacaccagaccctgcctccccatttccacttcaggtggtcaccacctcttattggaataattaatagatgtcatactggtctcttctgtgctagttacaacgtcgttattattccagtacatttcaacagtgatgattgcatttgaacctcacaaacaccccgttagataagatagttattatgtccatcgtgtagattgaaatattccttctcagacaagatactgcatatacccaaggtcatgctaattattaggaggagactctgaatgcagagtattctattgtgtgccttgctgcctctggtatggcctgtccgtggtcgaggtgaagctctggccatttcattcctcacatttttattcagcaggtagcatatgtcaggcactgtaaaaacaatgagggtttcttaaatagagcccagccgtcatgacccagagtatgaatctgcaatccaacaccaatctgccttttcacgactacttcccaaagtttcacatcagtcacttctcagcagaatttgttaccttcagaaatgtttgttcccactgcatatgatgttctttctcctctctgtgtccactccttcccatcttcaggggtcaactcaaacctcattcttcggtaacaaaacccagctctatgtaatgctttatcctatgagctgtcatggcatgttatctgtaagtgatcagttaaccatcaccacacgtcggcggtgttggtgtgcaagtccacactccatgcccagcccgtgatgtccttgaaggcacagaccatgactgaagcacttgccaaccccaccccatataggatcctatagattgtagactctacctttacatttgctgaagaaatggatgatgaataaacatttttaaatgttctcttttctttaagtctttattagaagattggcagtgcaaaaaatcttacatttttgtatctgaaatatatgaagtatctttggaaaaatttaaggcttgtttctaaggctcagcatatatttacacctactggctttttaaaattaaaataatcattttctcctccaggtaccaagaaagtagctcaagggattgcagaatctaaagacacagaaaaagatttatagatacattatttcattcctggatcttatttcagctgttatccaaatagcttcattaattcagtcccaaaccccttccacatctatagcagtcctaggggaaatcgagttactaatataaactaagataacaaatgttgcttttcatcattggctgatttttatagaaacctggaaatgtgtgctatgaaaacaatgtgaaaagagagaacattatacaactaaaattcatttggccattattgcattactgtgtattctggttggtattttagatgttatttgccctgtgaaaagtttctcacttgaagctgctgttcctcaggctcctgtttagagggtgtcatcatgtgatctcctaaaatttctgtgtatataatgcctagcatctgatgcattctcagtcagtcattattaagctgaatctgcaagtagttcatgaccaaggctgtcatggtggtgggaattgcctcatcattaatgaatgccatgaagctgtgattttcagggaaaggaaggattttgaaatagaaatgattgtgaatgaaatataaattttaagaaaagtattttgaactcgggcatcgtagagcaaaagggagggttgagctgttaagattatctaaatgataaacatttcagcattgttgtccttgtcattatatcatctatttggtgaggatccattttttaccagacactagatacttttcatattattctttatctaatcctgtgacaaaaatattatttatctccattttacagataagaaaatttaagtttaggaagaaataaatgtccttgtatcacacagcaagtgagtggtaaacctagaagtgagactcttcctggctgcaaaatataaattgcattcagtatgtatcatacatagcttcctgtatgatggatagtcaccatagatgtagcagtgcattgatttcctactgctactatctaggttgggatccatgtccccagagagagtgctattctaaatatttatcaactggttkttcctgggcacctcccaatgtgaatgcacactacagccaatcaaaatggaccctggccatattttactggcattcgagccattctgatgcacattgatttaacatcagacctggacctgctctgtaaaccttgaaatgcatgcaaaattacgtgtccgtgtgtgtgtgtgtgtatacagttgttacccgtgaagaggtttgattttattgggttatcactgagatttttgacctctaaaaatagaaaccttctgttgtgtgatagatgaaatgaatgggtttgactaaaacaagatatttctatttaagaagcagtatcaagacaaaaaaggatttctgaggtgagaggcatttgtgggcattcgaaaggtgtttgtggggcagtrgggcagaagagaagtgaggacaggctgcagagtggtagattcctgtatttgggggccagaaagatcattcttcgtttggtagggtctgtacaataagatggagccttgtkttggagagctgttttgttctttattatttttccaaagctaattgagaagcaagcttcattctctactcctcaattctaaagcctctgagactgtaaggctcatttttttcttactttaattagtacatattatttcctattttcgtatatttttaacttctataatctagctgttttttcctcagtgtaaacactctacaggggaaaatttgtttctcagatgttgtaaaaatagttttggacttactgtrtatatttactctataatttaagaagtaggccattatatatcatttcaaataatatttataaaacattataaataaccttatgcagttctgtgaatcagtcctcacatcaggaaaagtattttatagtaaagtgttaaatatttgaaaatgaaattagtatatttaactttattttataaaattagaatgctccaccctctaatgaagtggcatattcacactctgtttggtacattgaggaacgttccaagtttttcttatttagcatccttgtttgtttaccattttccttgcatgctgactaaggaatatatagctctagaaaaaaatttacagcacttattccatgcatgtttctccttgcttctggccatattagttctgcctcatctatgttagtagcagcaaaatgttaagctgataaaatgcttccacaaagatgacattttataccagttgcaaacacttatttatatttgaatctttatttaattaaagctgtattcatgttactttctctaatatttcccagaatttgtagatgccaacaaaatgttatctattgtaaataaaattaaagctcatttaagaaacctaaggtatattaatgatgatgaagtacttaatataaagctacccagtaaattctgataaaatctgatcargaatttttgctcttgagaatttttgtagcctgyggtttcacattcattargatcataaaaccctttgatcagtccctatatgatgttatcctttagatgattctcaaaatgttggttgagtgtacattttaaagcattcatttaccatttaagtgaattagggcttgttagtcacctcagactgctaataaaagaatgtcacaaattgggtggcttagaaacagcagcaattctttctcaaagttctggaggctggaacttcaagatcaaggtgtccagcagattaggtgtcttctgaggagtttctcatagatgggcaccttctttatgcaacctcttatggtggaagaggcgaggcagctctctggggcctcttttataagggccctaatcccatccatgagggctctgcccttgtgacctaatcacttcccaaaggcccccacccttaatgctatcacattggggattaggtttccatatataaattttgggaggtatacatacattcagaaaataacagggcccaagacaacttttcttatcaggatacttgtagtataaatgcactactgaaaagataatgtggacttgctttctctcctatagtaaggtgtgagattgtacagtyggctggtgctatggcttacagatgctgtctacgtttggcctctttcccatctctctcactttttgccacatactatgatctagatgttgttcttctaccataaaaatccaatgctttgatgcattatctgtagtcaaatatatatagtgtatcttcaggctgtatgaccccttaaaaacacaaatatatgcaaaacaggtaaaggaacccctttagtgatttactatgatgactttttaccatccacttcacactttcatttactaatttgacatctacatattttctgttatgtgataggcattgagtaaggtactggcaatgctgttgtgaacagaagagacatggctcttgccctcaggaggcccacactctagcactgaagacattcagtagttactgcagtaaagctgagggaaggaaagcagaaagttctggaggaaataagcataagggagcccagtggagttttttggcaataagaagtctcactgaggatgtgacctctcagttgagtaaacattcttaacaagagaagtagggctgaagtagaagagttgtatcatgcagaagaaatagtgtgaagaggtgaggagtacagagctctcatactgccatagctggagtcccgcaagtgaagggatgaatacctactggattttcattgtatattttaattgtgtatttataagtatgccagtaaagatacctctcaaggattatgggattcataaggctccatagggatggaacaatcaaaggattcttttaatttgcctttttatgtagtgaagtattttaaaattacaatgtgttattcaaagtaatgggcagtttttataatttctaggaaaagttttgaaggcagattttccctatgactcaacgatgcacattttattacaatgtttcttttctcatttgattcctcagttttttcaccgcaactctttctatggctatacttggccattgattcctgggatgtgaaattatggtataaggtactcacttatttcactacttctagagaaacatagcaaagaagagaaataatgttattttagtatgcctactgatttttgaacctttgggtctttaagtttcctttggtttgcatttttaactcatctttctcactctttagctcctttttgctagacagcaatgaaaagcattatatttggaaagcaaaagttgagttggtagactagcaccttttgagtaacaggcttttcatgttgtgtctgggagaaaagtcatttggcattgagtgcattaggcaggtagtcacagcggcagcgtgccttgcctttgcaacttggtacgaacattgtataattgattttgttacaaagttcaccaagattatctgacagttatttcaatatatttcttgaaatccttctggctttgaataagtatccattttattggtttagaaatcaataatgtaaaaaggaaaagaactgggagcttgtaattgaatgtgacactacattggtgcagataatatctgttctggatttcagttattaaacatgttatgtcacagtatgtactggaagcaatctacatttaactgaataaatgcaaagtgcagttcagtgagagaacatgggaaagtgtaaaatgtaacatgaggaaaatattaaacaagggaatgctcatacttcctagggaaaagcaaacaaacaaacaaacaaacaaacaggaaaatgaattagagtaaaagaggagactgttggttgaacagacactggggcatagaagagagatatttcttgatagatccagagaaattctaattttaactcaaggtggaccaagagtagctgcaaaagctcaggagaaataaacatttggtagctggtctgcaggaggattaaatgtggtttggagcctagaggagaggaggggctcctcacaatgagaaaccttgctaaaaatggacatttatttaatttgtcaatgagaaaacttgtgaaaatgtgtgactttgctattccaaaatgaaccatggcaacaatgaccacataatttgaccttttcctaaataacgataaactaagtgaagaagggttgttaaatcaatcgaaaccaattaagccagttttaggcagccacggttaaaggataagtaacaatccttgagggctttagaaaaacaaatttcagtatattaatgcatcatctatttcatgagttcagaaatgaccaggtaccactggctaagccctgatagcacgtccacatgcagaactctgtgtttagtgctgcttcccattgggaatgagaatgagaactctgtgtctcggtctttgtttctgcagtgataagcatgcatatagcacagccattgtttcttcctttatctcccactgtgctttttcacagtgttaaaacagttaataggcacccaaaaatattattatgttgctcaaatttgcaaccatgtatcatatatggagttgatctgttagacatcataatctacagaagccctgcttctgtggctgctaatttttaggtgaagctgtttctggcaatgaaacatcatccatatctaatagatctgacgatcttcgtagcaggtaatatctctgacagttctctacccgttttaaatacagcaattcaccctccaactgtaacrgagtcacaaacctagacaagacatgtcttagccatcaaacagccatttacaccttcattcaacaaatacttattgagtacctgccatgtatcatctttaaatgtgagttgtgcctctgtttgaaaattgccaccagctctaccaggttcaataattgacccttttatgactttggccatggtacgttaccagaaatagaagatgtgttgcacagtgactatttgtttgtgtataagtgacgggttgtgagtagttgggtgggtaaagacaagaaaataggtatgggatcttttccctagatttccacaggggtaatcgtgttctaaccctttcttctaatcctccctagaattcctgaaactgaaacagtgttttatgtctttcagctcaagtcttttgtagggaaaaaaatattgtccctaataaaggaagayatgatgataatatttacatgttgcaatcaaatagaacaaagttctgcgccagtgaagaactcaaaggaaaataaaagatcaaaagcagcgcctccttgagaatgtaaggggggctgtgtttctccctctgaggtgtggtgccgcccgtggactcacatgcagttattcgtggagctccggggctggattctgaagcatgtggagacagtccctatgggctgtatttagggatgtgctacacgaygttggcagcgtttttcccgtttctatgtttgctaactgttagtgtcattcttattaaatcagaactgaggactacgtgtcacattcccacaggacagctggcaggttggaaggtggcatttgagagaattcctcactttctataataatcgtacttgatgccggcagagcttcctrtgcaagcatttggcaccactgaccctgacttcctctccaggctcccactttctaagacttccctgacttctttgacacttgactgagggatttcattccttcttagtcattcttccatgactaaccctgattaattgttctggctgacttgccatgctcctcagcaccckaaacatggatggtcccgaaggttacttcttggcgtctgccttttccttctcaaaactctcctatccagctgtcttatactccctcagagtgaaatagacttatctgcagattctcctcaagtctttatttttaatcccgtggcattttcttggatgttagacagttctcacttgcttgtgaaaatgttcatctttatgctccccagacacctcaaattcaatgtctcccagccacacccacaacctcaacgttcatactccattcacccagccacagagcctgcggttatctttgattttctcccttttcaattgcatttcaaatcagattccagctcaatgggcttttcttgcttaatgtctgctgttattcatccctggcttaggctctttacaactttgtacttaatgtagtgtagtgaactcccaacctcactgattaaaaccctgctctgtccctttcccagcgagggaaagacagatcccactggttttttgcagaggaaattttaagtagagaattcattacacagagttagaaaactgaaaagcaaaaatgaaatattaagggaattgagacatgctaacagtaagaagctcccaccagccctggtgttggtgaaaggaagtggaagagagtaggtttgtcagaatctgaaagctcacagatgggacttttctcggagctgggtttggatcatcaaaatggcatgatgaggctagttctccttgcttaaaactaactagaggctggaaacaacagctggtgcttggactaagtgctgcttctgggagaagcaattgttgctcgggttgtgtgctgctgccagagtgatacttacagggcaatcaactcaacaggaagaagaaaagccccttctcccttcctcttgttttccagtctccctctagtgcctcctctcggtatagtctaacaagaaactagctgttaagagttttgagtaatttaatgtcaaaacattagagaatagaatacaaatggagggttttgatgttagaaacaatagttaagtaattcatattgaccaaccctttgggtccacactgaccatatcttttcagaacatatactgctttgcacatactcaaacttccttttcataacagtaaatactccatgggtatacctaataaaaaataactattcgttcaaacactctcttggcctctcctgagcaatggaagacacaatttccaaccatcatactatccttgtctaaaagatgttaatttctcttgtagtttctycttacttgcaacagaatcttataacctaaagaataacttaaatgataaagttaaccacaaaattacaaacatataagtaactagtggcggtaaagaagaaatgaaatattagttaccwtatacatacctatatttacactgtattcatataactgataagtttatatttgtttataacatctcttttctacagttcctcttctattaccttttccttcagccataatctgtttggaggttgcctttttttcccattgtataatgtgacccaaatcttcattcctgaaagctctaaatacccaacagtttaatctttattggttgccatagttttcattaacttgtacttttggacatggaaataccatgagctgccacaggaattcccctgtaaatgagatccatttctctccctcactactgtgtagtagcaattcagtttttccctagaaattgtgaccagcatcccaggcaacatagtatcccccgttttttcttgttacttcagtgtttaaggaactcaaaatgggcaagtaccagtctcaacttttttttttttttttaactntttttgtttctcctggtggaaaccttgccctyttgggtacgaagacatttaaaccagcagagcccagagctgagaagacacgaatgaaacattctgtgaatgggttattagatatagtagtgaaagcagccactcccacatcatccagttgattctgcaggtgtgttttctggcagtgagagaagcagcaccatatattggttgctgggtcagcgcatatataagaattcaaatatatatcagagatagatagatagatagatagatagatagatagatagatagaacagattgagccccaggctatccaaatgttgtcacctactgacaccaccactaaggcttttctaggtcagtcagcagtccatcagcccagctgcttctgggagacttgataatatgagaaaaatcaacagacatgatcccattgccatacttcctttgcagcaaaatgagttcattgttctgaagcatgtgtgtgagtgccatatcgtgactaggatattctataaacctgtggacaatgatttttctagaaacaaggcagacaggaatgatgaatccatacccaaaataaatgccttttccagcgaggaccgtttgctgcctcctgcataatgtaagggtccaaagtaatcaacccactcctaagaggccccttctgggagaactgtgccctgttccatgctgagcactcactgctgcaggagatgagcacacaggagtgttggtagcagatcagccttggcgagaggaggttgtatgctgcccaagcatagctctgtctttgccacaggattcatctggtaaataggagaggctgaggaaagaggctccatgacattcacagggcatgtcgtcttgttggcccgattactgacagcctcctctgcagtgaacccccttgagagagcatttctatggagtgcagatatcttcacactggagactcagttttgaggattcagtaagaacaatttgttttcagccttctaatcccattctttccaagccccttaccttccawccagacccctaatgatcaccaaataatcactgtttcctatacttctgtctcaatcttgaccaagtaaataaccacatgctgcatcaaccagtgttttagtgacagtatattgtactgctcatctgtaaataaggcctgaggtttttcattcctatgtgatttggtcaaaattctctctcctaggagtccacaggtatgagctgagccagcagagatgcagcaggccagctctcatccccttcatcatggccaccccacatggtttctttatgttcatagaatgaggtgtttagtctgtatcaggacccagcagctaaccacaacagaacctctgtttgtcatagacattgacatataattgtatctgttggatcataaggcccttgtcataaggcaaagcagcttgcactgccatctgaatctgcagcagtcctctcttgcccaagactccaatcaaaactggtagccttacacatttcttgataaatgggtgaaagcagtacaagtgacatataagcccaaggaggcccatcaagtactgtccttcttttttagtggtaagcacattgcaatttccagaaactcaccttttaacttggagggtatatcctcacatgctcggaagcattcaacccccaagaacttcactaaaatgatggtgcctacattttcatgggctttattttccacgggttggcatacatcttattcagacatttaaggtatttgctattttctgttcatctggtctgtgtggtacatgttgtcagtatagttagtttgaggtaagcatgatcaacatttctgcaaatgtagtcaggacaaagagcaggagagttgacatcacccagagaaaagtgcaggtgctatgtggacccgaccaagcaaaagcaaatggcttttggtgatccttgaaagttgctrtgaattaatttgcctgatcaaaaggtgtaaactgccagatgccaggagctgtgtttatttgttccagtgaaaatatcatatctggaagagcagctgcaattgcaatcacaagctaagtaaatttatggtaattcacaattattctctaagtccaactgctttgtgcatgggccaaacaggtgagttaaatgagtatggagtaagtagatgagacttgcctttttcaaatctttgacagagatattaatcgttgcccttcccccagcaatattaacatcctctggtaggaaggtcatattttagaagcctcctggctctggtttaatatcgctcacaccagggggcagagagacatgcaggaattctgccagttgctgmaaatgtctgttctaattacatattcaggaactagaaaaataaccaagtgatgcatttctgaaccttctgcaatctccgtaaaatagacgtgggcctcatccatttatcaccttaccaccaaaagcctccactttggtgaccaacatggagttttagttaccatgaattggttgcagttcagagctgataatcctgagcagaaatgtatgtttcccttactccagctcatggttgtcctattaggtgaaagtccttgcaatacctacctgtgatgatagaaatgatgatgacaaggactatggggttaaatggctagaagtctagtgataggaaatcataaactcgggatactttttataaaaaataaatgggccaagcacagtggctcacgcctataatcccaatgctttgggaggatgaagcaggagaattgcttgagcccaggagttccataccagccttagcaacagggtgaaaccttgtctctgcaaaaaaatataaaarttagctgggtgtgcttgtggtcccagttactcgtcgatgtgggaggatcactggagcctgagaagttgaggctgcagtgagccacagtctcgccactgagctccagtctggatgacagagcaagaccctacctgaaataacaacaagaacaacaacaacaaaacagagaacttctattttggcctgaagaactaaaaagataatgataactttctcccctcttagtcatagggctgasttgcagaaaataacatccaaaatgttacagaattacaattaagttcaagaaccttcaaacagccttgtgtgtgaaagtcagagtgattggcaagatattggaccctgagactggagtcatctaaatagattcagacaaagctgattttgaatttccaaatctctctgattctcccctcccagagaaagcagcccttctcccttccttcaaggcttcttacctaaagacccgcttgccactggctccttagaggggcaagataaactgttcttggaagtggcaaaagaagccagaggaggggaaaaaacagctgcttctgggacagcgcgccactgctggggaacttgagctcatgtgattttgctgacacaaaccgcaagcagacaggaataaggaagttcccttgcctcttctcctgcattgtgaattcctgcctcctgttgacagctcaccaaatccagctggcaaaacattttgggaaaagtagttggcacakttgtgtctatagcatccagagcagagtgtggaagagtttggaggtgagagaaaatgtctgagtacctgacagccctgcccagccttcaaggcaaaacacaggttggcagcttattcacagtcctttccctgatcatccmgaggccccttgatttaaagccctgtagactttgtgccaattgcaggattaccgagcacttcctgcagtgctttggaacaaagtctgtcatattttctcataactaataaggtatcttcacttcctttctaagaagaaaaagtgtgctttttctttgggtctaccaggatccacaagaacttgttaaaggaaatctttgaaggtatctattctgaagtagaaattcaccctcacttactactataatatctatctgattagttcacttccctgtgcttattccataaccaataggcatacctcatttcaaccagctattttgaacgtgtgtgctgttggtcacaaatgcaatgggatgatctgtggatgtggccagatgagttattatcataattagaaacgcaagtctatgtgtgctctagactggcagcatgacaaggaagacatcatcatcttcgtgttcaaaggccaggacacctccacgcccatgttgctaatttgtcaagtgttgcttataggagttccaagttattcagagaatcgtaggctttttaacttttttgtaatgcactggttaccttataaatgaaagcaaatattaaatactcttttggttgtggttggttatttggctgtaaaagagcacatgttaatgttgctgactttattaactcatcatygggcatttcaaggttaggacttcaggccttttgcttggcattgactgagcagccacagcttcatgtatacctgccatgtgtttgtaaaaatgaagcaaatacattcatgtataatattgaaaactaggggaagcatttaattttaaaaatgtagtatgctctaagctgaaatgtttacttctttttaatgtgatcatactctttttttttttgagatggagtctcgctctgtagcccaggctggagtgcagtggcgcgwtctcggctcactgcaagctccacctcccggcttcacaaccattctcctgtctcagcctcccaagtagctgggacaactggcgctggccaccacgcctggctaattttttttagtggagacagggtttcaccatgttagccaggatggtcttgatctcctgacctcatgatccacccgcctcggcctcccaaagtgctggcattacaggcgtgagccactgcgcccggcccaatcatactcatttttaaaatttgaaatgtwaatgaaaatgtttcactcttgtcgcccagactggagtgcaacagcgtgatcttggctcactgcaagctctgtctcccaggttcaagcaattctcctgcctcagcctcccaattagctgggattacaggtgtgtgccatcatgcctggctaattttgtatttttagtagagacaaggtttccccacgttggccaggctggtcctgaactcctgacctcaggcaatccacccatctcagcctcccaaagtgctgggattataggcatgagccaccacatcggcccaaaaatgtttacttttaaatatttgatttccatcagttgcattcactcagatgtttctctctgtgcatagaggtaaaaggcttgtcctcaaacctgactccagaaaggatggagcctggaacctgtgttgggattccatcttgaggctgttgttcgtgcagaactgcattagtgtggatgaatcaagctgcagtggagaaggaaatcaacaggttctgacaccatctcaagagctggtcagagcataggagttactgagcagcctttacagggacatggtctgtaccttccccccaattttccccacctgctgagggagacttggcttggaaatgcataggtctttctcgcagtctcatacaatttcacttttactatagttcacatggccaggatgcagggaaagggccacagcgtgggatctgtgattaagcctcccctaggcttaggcccttcggcgaaagcctacgcctagtagactgcaagcatatgtcaractgcttgggtatctcatcctgaacatgactcccacttggaatcacatacctttctctagaattgtctgatgcaaaaccatttacgtgccagcataacaagatttaaaatcattcttcattatctattttaagccccactttctctcccttcccactttaagaagctttttctttccctgctttgtgtttatgatttaaagtggtttttatgtcatcgtgaattacagctgctttcccacagtgatttacatttttatgtgttactcagaaaccatcctggacagtttgataaaacatacttcactgagctgaaactctgccttctatcctgttgtctgatgaagtttggaatggatgctgtcattcagttaaaaatccttcagtccctctgcaatataagcagactaaaacacacatccctgaatttgttattatttgatctttgcagtctggtgcaaagtattcctttccaacatttgcccatatttcagctccatcagtcaactcaaaactcccctatgttctccaccctctaaatgactttcacgcctgtgcatatctctgcaatttcacttatttcagtgtattgctgttctatatttcctattctctgcctgtctagactgtgagcaccttacatagagctatttgttttatctctgaacccatagtgacttatggtagtgacaggcacacagtacacactcaatctaaatgtgcagcgtaaacgtatacaggatctaatgtacacacgtgctctcgtcccttaagacacagtaaatgattatcagattggattctagctgattgaaaagggcgtgacaaaaagtccgtgaggccagggctcagccatcttctttctcttatacacatctttatgatrtcgtccctttcctagagagctgtttcatgccagaatcataatgcagaaattgatcagcaattgagacccaaatctgccgctaagccagtgggacactcaagtaggaattgtttgcatgttgtgatcaatggattgcttgttgacttttctgtggagtcagttaaataagtcaccttgtacaagatccttatgtggcctgcagtttattaatcaaattttacccccttgcaatggattttaaaagcttgttaaatcaagtaaattgaaatatttggtgattattcttaatgattgtatatctataccccctgctcaagggtaatgtgtcagcccatgaagtttgctgaagggtaaatttgatctrcaaataaggagggattcttattcttctgaattcctatctatatcttttaaagtatgaagagtgggcagtggccctgtaaattgtgaggcggctttttatagagacgggaagtaaaacatctctggattcccagtggaaaaaagatgctgtggagagtgtattttaaactctaaaataaatggataactcagrtcaatctttttagctagtgctattgatgtatgcagtaccaaaggatatttggtcctagcaagattactctactgccagttacagctgggaagtagggagtctacttcagacatccgcttttatctatctccagaagccatcttgacccatatgggctcctgccagctgatttttttcatgggtttagatgatcctccgaacactcaaggcctctgatttggacgaagctcatgacaaacaccgcttgctttccttctctcaaagtgatctctcagataacacttgggaaatattttaaaatctcatttgacttttttttttttyctttggaaacatgtcaaatttttatttatttatttattttaatgtatttatttattattattatactttaagttttagggtacatgtgcacaatgtgcaggttagttacatatgtatacatgtgccttgctggtgcgctgcacccactaactcgtcatctagcattaggtatatttcccagtgctatccctcccgcctccccccaccccacaacagtccccagagtgtgatgttccccttcctgtgtccatgtgttctcattattcaattcccacctatgagtaagaatatgcggtgtttggttttttgttcttgcgatagtttactgagaatgatgatttccagtttcatccatgtccctacaaaggacatgaactcatcattttttatggctgcatagtattccatggtgtatatgtgccacatttccttaatccagtctatcattgttggacatttgggttggttccaagtttttgctattgtgaataatgcsgcaataaacatacrtgtgcatgtgtctttatagcagcatgatttatagtcctttgggtatatacccagtaatgggatgcctgggtcaaatggtatttctagttctagatccctgaggaatcgccacactgacttccacaatggttgaactagtttacaatcccaccaacagtgtaaaagtgttcctatttctccacatcctctccagcacctgttgtttcttgactttttaatgattgccgttctaactggtgtgagatggtatctcattgtggttttgatttgcatttctctgatggccagtgatggtgagcattttttcatgtgttttttggctgcataaatgtcttcttttgagaagtgtctgttcatgtccttygcccactttttgatrgggttgtttgtttttttcttgtaaatttgtttgagttcattgtagattctggatattagccctttktcagacgagtaggttgtgaaaatattcaggatacaaaatcaatgtacaaaaatcacaagcattcttatacaccaacaacagacaaacagagagccaaatcatgagtgaactcccattcacaattgcttcaaagagaataaaatacctaggaatccaacttacaagggatgtgaaggacctcttcgaggagaactacaaaccactgctcaaggaaataaaagaggatacaaacaaatggaagaacattccatgctcatgggtaggaagaatcaatatcgtgaaaatggccatactgcccaaggtaatttacagattcaatgccatccccatcaagctaccaatgactttcttcacagaattggaaaacaatactttaaagttcatatggaaccaaaaaagagcccgcatcgccaagtcaatcctgagccaaaagaacaaagctggaggcatcacgctacctgacttcaaactatactacaaggctacagtaaccaaaacagcatggtactggtaccaaaacagagatatagatcaatggaacagaacagagccctcagaaataatgccacatatctacaactatctgatctttgacaaacctgagaaaaacaagcaatggggaaaggattccctatttaataaatggtgctgggaaaactggttagccatatgtagaaagctgaaactggatcccttccttacaccttatacaaaaatcaattcaagatggattaaagacttaaacgttagacctaaaaccataaaaaccctagaagaaaacctaggcattactattcaggacataggcagggcaaggacttcatgtctaaaacaccaaaaacartggcaacaaaagccaaaattgacaaatgggatctaattgactttttaataactactacgctgtcctggggtaactaccgatcctgrgataatttagagtccaaaattttaagcaaaaggagtaagtatttgactttcagacataagtgaaagatcagtaatgaaaattgtgtacatgtatacatatacataagcataactcttgcaaatcctgtaacacatgtactacatatccctctcccttcattgaccacagtgcttatttccaacaggtggagggtaatttaactgatgtgagacacttaagaagattctcttttcatatcttgtttaatagcataagttctaataaatggcatcctggatcataatgttgactttatgggaaaggagacattaccttctaatgaaaaatctgccatgaatgaatcattcataatttgttgaataatcctttacacttggatgcattttacagtgtgcagcagaatgtaatcatgcttgatgacctttgagcattcttttagatcgggtcttttctaattgtagcctctgctcagcaaagacatgatatttcatatggcttaatacatagaaatgatcagttacatgaggcacagcttcwtctcatccttttataggaggatgtcagatcatttgtccacaatttctgtaggatttgtgtaacatgaacttgaagmctgttttcatgaaagcctgcttccattttcatgaaaatgaaagtattgcattggttttaaacgatgaaatcggtgaatcagttctctgagaggcagatatatgcaggacgtcatggtgtgttttcttttctttgagacaggctcttgctctgttgtgcagggtggagtgcagtggcgcgaccatggctcactgccgccttgacctccctacctcagcctcccgagtagctggcaccacaggtgtaaaccacgatactcagcttttttttttttaattttgtaaagatgggggtctcactatgtttctgaagctgatcttgaactccggggctcaagtgatcctcctgtcttagctsaagtgatcctcctgtcttagactcccaaagtgctgggattatacacatgagccactgcgcccggcctaggacattatctaaagtgtgatggaagacctaattactgtcttcaaagtgcttacaattcaggttggggagtgcatatccaaaggaagctttatatttttgtgatgacaaggacttctagaagacactgtgttgggccaaataaagcaaaaaagtaaacttcaattcttttgtgactttttgtgttactttatcttttttaatatgtggtattttaataagaatcttcaataaggtaggagaaacttaggtattctgtgtaaaaaaagtcctagtaattgtatagacatgaatacctataaaattattatcagtttcatagcaaatcctttcaaaaaactttagactgggacatcattttccacatgaagaggtctggtctttaagaatgttaccacaatatttagcataaagctggatttgtaaatggatttttaatgtcaagtgttgtttgaaggttgcaaagatattcgagttttcacatccctattcaactgttccagtgtggaaatgtgctctctgcattagtccaatatgtttgtagatacaagtattgagagtgttgaatggagataaacaatttggcttaaaaatcagaaaactggcttagattcataggtctctctgatcatgtcttggctactgatattctggatgacttcagtagcgcattttgattctctgtatctggaacacagtttctgctttcagagactttggaacgaaactttggattcaacaattggtggtagaattctgttgagttatggaagcaagactgggaggccccagggcaacaaactaaagtgtggaaaatccagctgctcagaggcttggcatactgaaaaacgatttaattcaatcatcagaaacttctggttgtttagtttctctctccaggaaaatttttctccacctttttttttttaattgtgagactgtagaaaacttgaaagactagtacagtaccgcagtgatttactctatgcaccatttctttatcttttgacccacttgccttccttctcacacacaaatacccatgctacacacaccccgcactcacacaaaacatgatacatgtgtgtatgtatgtgagtgtgcacgtccgtgtgtgcgtgtgtgttggtggatttgtttgaaagttgtagtgtgcatctctttttttttagacagagtctcactctgttgcccaggctggagcacagtggtgcagtctcggctcactgcaagctctgcctcccaggttcacaccattctcctgcctcagcctcccgagtagctgggactacagatgcatgccacaacactcgggtaattttttgtatttttagtagagacggggtttcactgtgttagccgggatggtctcgatctcctgacctcgtgatctgcccaccttggcctcccaaagtgctgggattaaaggcgtgatctactgtgtccagccagcgtgcatctcttaaatgcaaagtcatcctgttccatcaccatgcctgtacgttgactcagtgatattatttcatgggcagcccttgtgcacatcttcccatccatctccgaacgtcttctgtggacatctgtttttcttctcccggttgaggtgaagcccacacgttgcatttggcggtctggtcatgtcagccacaacttcctgccactttttgtctgtctcaactctgacatacttaaagacgtcaggccagtccttttttgggatgtctcagaatctggatttgtcctgccgttttcctcatggtatgttcaggtgaagcatgtgtggcaagaccgtttcctagagggtgtgtactttacattacatcccatcagcaacacagaacgccagctcatctggtggcgtttgtgatccccactagcatctgatctgataaagtctctcccttgtgagtttcatactcaaaaggacatcgcccctgtttcaaggctgcctttttcttatgcaattagtagacaagatgtgggatactgctttcagaccatgtcaagatgctattcttcaacggtctttttaaggattcatttctatttctgcccaaataaataattgcatttgtggtttccaaaaaaccagaaagatttataattatattgtttgtttacatttgccatttagcattcttctttaaagaacagtttgagaaaaatgaacccctttaaatcagctcctacatagttttgatatgtccacattggtctttgagtccttgctttttggcacagaagttccaggttcatcttctatttaccaaaccctaggatctggctgttacatttagacataaacgttactaccaatgtttttgcttctagaccattttactatatggtagaatatgtgtatgtgtgtctgtgtgcattaatgagttcattcatataacttcaggaataccatagaattatctattgcctttcccctttcagtattcatatctaccttttcccatagtgagaacccacattaccgtaaacatcaatatattaatttatttcttttatcccatagtacacacacatagtacattcaaaagaattttgaaattgactaaaacttaaactgttgcaaacaacaaacttatgaacagaattcaacatagtgttaagtaaaacacaggatttatgttaatatttctagacagtgtttactaaatgattcatggtatgcaattggcatatgatgttaattgaatttgacaagtgaaacaatgactaatttaagcttggggatattgtatatgcttcagatcctgagtaatgtccaatatacacctacagcaacagtaccaggaaacagtttgactcataaacagctgagaaggcggtaaatgaaataaaaagcaatctttgtataagtgctcattggatgttggaaagtgtttaagggacagcatctgtagagaggaagagcttggccaagacagctcctgtattaatatatcagactataaatagcagaggagtgcacactgtaactcctaacttctcactaagaactggtgaaaactgcaaacacataaacaaacaccctatttctgctgagctcatggagtcaactctgtttactcatctgtagctttccttccttggtcagggtccgaagagccatagctggtccctgtatcatctctgcccctcatcgtcctggccagggctgccttgcgtcctcactcattattacttgtataaagtcctgaatttctgcacatgcagtgtttcgtcattggctattactaagtcagttgtattttctagtggattttataaaggatctacttcctgaatacagcttttatctctctctgtatattcttccaactttgcgactttctttgtcttactgatgtagaaggtggaagtcaactctggaggtggggctcaggcactggaccaaattgaggactagctaaaatagggctgggctggaagcagctttccatatgacacacccaccagggtgctgtgtcagtttcccattgccatggcaacacttgggagttactgccccttttcatgacaacaacttggtgacccttttctagaaatttcttcataatccatcccatgaaattaaaagtgggtataaatatggatgcaatgctgcctctgagctgctgccctggcacactgcctacggggcagcgctgctgctgctgtacaccgccacttcagtaaacattgctttttaacaccactgacttacccctcagttccttcctgggcaaagtcaagaaccctcctcagctaagccccagttgtgggtctcacctgtcctgtgtcactgctactataattagtgagtttgttcctgtgatggtgattaaatctatctagtcctactcagcaccatcctatgaagactgacttctcaacggtgaatgcaggaaaatcctcatccttcacaaacaggtcctccgttcaccgttctttgtcactgcactcagcatctttactggctgctaggcctatgtttaactaaccctgtcacaccaacaatttaatgacctttttaatattacatatatggtagttagagaactttagaattcagtctaattatctatttgaaatactctgcgatttsagttcctgctatgtttcagcttttgttgttgttttcatggtggttggtaggaaacactgacatttcgtaaaatgtgcgatttgctaaggaaagggtttctgaaaattagttcagatgaaatatgcataattatagtaaatacacacatgatctagatgtaatatttagtgaagtgcgctgattcctagtgcatttagtgaggctgggtcacagaaagaagcagtcctcccatggggaagctcccagaggaatggattcaaagggctgtaaagggctgtgtcttctggaacaaaggcttgtctttctcttttggcttggcattggcatgtggaaccatttgcatagattcccaccactaagcataatggcaaatctttccctgtgaagcaggagtgtgggacgtttgaaaaccaggtacatgtttggagcaaactgaacgtaggtgttcccaagcaaaggcatttgacatatcctttcttgaatgaacagataaaaatgcatccatatgtaataagtaatatattaaagaagtgcatagtgtatattaaatagacataatatgtatttccttccttcttccttcattccttcctcctttcttttgcaaataaattttgggcttggaacttagattctatggggttttcatttagagaaaaagtcaaagactggtgttttttgacaaacttgggagtaagaaataggaaaagtttatggaaaagctggacagaaaccttaggatctggggtttgcctgccctggtagacacatctttgtgattttcctgataacttcatacacaactatgcctgatgcctagttcacagcaacaggaaaagagaaaaaggaacagtgttgttgaggagacaccctagtgatataacagtaacaacagccagggttaacaaaggcatgtacctctcctggtcagtgttataaagttgctgactgggccatgctttaatctccaaaatgagaaactcttctgttctctctcatttaaaagattagttatttgctttataaattagccactacttggtacaactttttattcatttatttattttgagacagagtctcgctctgtcgcccaggctggagtacagaggtgcgatctcggctcactgcaacctccacctcctgcgttcatgcgatactcctgcctcagcctcctgagtagctgggattacaggcgcctgccgccatgcccggctaatttttgtatttttagtagagacagggtttcgccatgttggccaggctggtctcgaactcctgacctcaagtgatgcgccccctttggcctcccaaagtgctgggattataggcctgaaccattgagcccggccttcaaccttttatttttaagcaaggaatcttggtactcactcaagagttgtacctgatgggggttgtgagaaactgtttaaatgataactgttcccatttttttcttctaaccctacgctcacctctgagtgagactcttggagcatggggaatacggataggttgagtgacaccgagctcctcatgtgtattgaaagagcaaatgcacaggtaacctgaagcttttgaactgagaaattttcctaccataagaattctggaaagtgaacagtgagggctgggcagcaagactaagcccctcacattgcctttttgcccttctgggctagtcagtcaagactggagtgcatacaacatcgtgacacttgtgtcctgagtaacacaggaaatgactytagttcagtccccaggacaaggtcagacatatgccaggggaaggtattggttagaggcatggagctctatttcgaatgtgaatggttttcctttccgtgaacttgttaaagttgttctgtgctgccacagtattgccttgtgcaaatcttytgatttgtgcaaagtcccagaaraaatgacgatagamtgctgctctcctcctaagtaaaatgaagaagtatctaagagaaacagatgattcaaaatgcttttaaaaatagatattaatgaagttgaaatgtttaggttatttcaactgcttggttgtattaccatttaaaatatctttaattatggatgtaatacatgctttcctgctttcttcataaaatgaaaaaaaaaaaaaaaggaattcactctctcatgtcctcagttctgttccccagagttagccacttgtacgtgtttctccacttagttcttttggggattatcatcatcgcggagctattgatttatcaacattaaaatatgcacattcaccccccaccttgaaaacctaataatttggcattctttgccccacatctcttctcccagcctgttcccattgttaatctatccatcctcttcccgtacttacgggagctgtaatcatcaagtgcattgttactttgaacgacatactttaactctgatgtattcaacaaactttgatggaacttatcaaccaatcattttctatccacatttttcaccacttttttgtctcctcctaaattctgtcagatgtagtaatacagttacattgacaaggtttataagattgtattatgtggccgggcaagtatgtatgacgattggatccatgagaaagaaatgatatttgaatgtttctcagcctgtactaatcattaataatgttccaaacctcagagtttataggagatatcagttactaaaaatcttatcatattttagtttgtttcatatttggttcagatttatgcctttcttttactgctctattgttctcagagaaattgatttttatttttcttattggtggaagaaacatatgcctttatgttatagttaagaatatctgggccgggtgcagtggctcatgcctgtaatcccagcactttgggagaccaaggcaggtggatcacgtgaggtcaggagtttgagaccagcctggccaaggtggtgaaaccccatctctactaaaaatacaaaaattagccaggtggtggcacacgcctgtagtcccagctacttcggaggctgaggcaggagaattgctcgaacccaggaagtggaggttgcagtgagccgaaatcgcgccattgcactctaggctgggtaataagagtgagactccatctttaaaaaatgaatattttatttatatttgtagaatttgttgtcatataatctcctttctccttgaaggcattatttgttagttccattctttattttgatgtggtttggctgtgtttatagcatttctctcccaatttgaaggcactgctcttctaaaacttggcactactattgagaaggtgaattcaattcgggcatttgtttcatatgtaggtttcaggtgttatatttcttgtaaaacctctcagattttctatccccgtttagagccataaaatatgtcaaggtgggttctgtcttcttttcgctgcataccctttgggctgttttactctaatgcgtgatgagtgcttctcacttcactatgattttaaaaaccacagatacgtaagctatgcctccatagattatggccaaacaattggtattctttgatgccacccaaaatcagagcatgtagccagcatggagaactagtccttttatccttattgcccaggaaaatatccttatttttaaaattatattctcccctctctgatttctgccatcttctttaaggatgcctattagaattattttacttcttaattttgcatttactttaaaaatatctctttctttgtatatttttgtcgttttcctcctactcctgaaacatttcttgactttatctttttgatccccacccctaaaagtgtggaacgtggaccagcaacaattggtgttacacggtgggcttgttgagaaatgctgaatcccagagtccacgcctggcctgctgatgcaggctgcatttcattcwtatttatttattaataacaaatctcctggtaatccacttgcacgtcagagtctgagaagcaccggttctttgatttcttcttctttcatgtaccttccattaaacagtcctattaatatgattagttgttgtctttgtgcatcttggcattyctttttcatgttatttacttacctccaaaatcagatgattcctgcttgtttattaatatgtgtggccaaacaatatgttaattagtattggaaggttacatagattccctattgcattttggaggcatatgcacaccagaatcttgtgctggaaatacaccagtggaatgtgtgtgttcaggcgtcaggaggcttcccttgaggaagaacagagactgttctcatgttttacctggattaactcattcaccccttccaaccaaccttgaagtaggtgctgccattagctcttcatggagatgaggagtgcagggcacaagacaaacaaactgagtcatgcagtaagtggtagagctgagattgaaacccaggcagcctggcttcccagaccatgatcttaatggccgcactgcagaaggcctctcctttgctttgagcccttcatggaggggctttgctctgtggccctcacctccacagcacaggctgccatcccctgagactccacttgccctcttggcccagcttaaatcgtataaggccgaccctctcggagcatcttatgctctttcgagaacagtgcccaggatttcacagctacatacaggtgaggaagaggaggcagctggcagaggcattttactgagcatctcctaagggacagtgctaaacactgccactctcatctgccgtctgaggctaggtcccttcattgtgaatccgggcctttctgggctcagaaggcccactgccctggcgttcctctgagtgctagtttcaatttctcatctctggagtttgttttgtttgctgatatcatcctctattttttttttttcagaagttaaaatgtagctaagagttctcccagaaatttaaatatttttgcaatgtttgatatattgcccttatcaagttagagacttctgttccattcctggtttactctgttgttcttttctgtttgctttaatagtaaagttatggactattattaagtcattgcgtccgtattataagagataataagtgctttacctttcagtttcttcctattttaaattacattgatggggatttttcagatgataaaccatcctcacattcttgagataaatcttgatgatgggatattatttggattctgtttcatatgtatacttacaagtgaaatggaatttcatcctcattttcttttattgctcctgttttatttagaaattaatttaaacaaaactgaacagctttttttctttttcttttttttaaacatgaaggaattggaatgttacttgagagtttagtggaactcacttataaaaccctctgatcctgttttttttaaaaccattttattttagctaatacacattttcattcaagttatgtatttctttttttctttttttttttttttttgagacagagtctcgctctttcgcccaggctggagtgcagtggcgcgatctctgctcactgcaagctctgcctcccgggttcacgccattctcctgcctcagcctcccaagtagctgggattacaggtgcccgccaccacgcctggctaattttttgtattttcagtagagacggggtttcaccgtgttagccaggatggtctcgatctcctgacctcgtgatccgcctgcctcggcctcccaaagtgctgggattacaggcgtgagccaccgcgcccgggcaagttatgtatttctgccctgtgtgttcttcatcagcagtgtgccatgccctctatttcttctagaaattgggctttgtagtttggtggacccacaaccacttttccaactttcatgctttaagaaggcatggatcttttagataaaatacctgcgtatgtttttcaaatatttgtgcaaaaaatagtgaaggtcgtctccagaatgcagcatgagcagtcgaagaaaatatttatgtatcagtttccccgttttcatgagcgctttacttatcttttaagattaataatgtaattgtttttatacaccatgtctagattaacctaactagatagaggaaagtattgatgattgccattaattgttattgttttcctatatgcaaatgtagccaggaccaaaagagacatggcacctaaatgcaaggcatagtcttagctggtgcataactaatgcaggaacagaaaaccagacaccgcaccttctcacttataagtgggagctgaacagtgagaacacagggacacagggaggggaacaacacacactggggcctactgggggatgggtggggggacggagagtattgggaataataacaaatgcaagctgggtttaatacctaggggatgggttgatggggcagcaaaccaccgtggcacacgtttacctatgtaacaaacctgcacgtcctgtacatggaccctggaacttaaaattaaaaaagagaaaattagaaaaatgaaaaacatggtaagaaagaacataattgagacaacttacatcaggcctgtggattaaatgctaatagtgtatcaatgtgagttcctgattttggtgaatggaccaattgtgtagaagaatgtcttgtttttaggaaatacacagtaaagttttcagggatgatggagcatcatggcagcaacttactcccaaaagtagttatktaaataaagctggaggcatcacactacctgccttaaaatatataccacatagttagagtatctctagagatatagagagttatagtatctctagatctcagatataaatccacacatatacagtcaattggtttttttttttagagacrgagtctcgctctgttgcctaggctggagtgcagtggcacgatctcggctcactgcaagctccacctcccgggtttacgccattctcctgcctcagcctcccaagtagctgggactgcaggcgcccgccaccacgcccggctaatttttgtattttttttttagtagagacagggtttctccacgttagccaggatggtctcgatctcctgacctcgtgttccgcccgactcggcctcccaaagtgctgggattacaggcgtgagccaccgcgcctggcccagtcaattggtttttgacaaagacgccaagaatacataacggggaaagtactgtctcttccataagtggtgttggaacaactggatatccacaagcagaagaaggaaatgagacccttatctgacctcatatacaaaaatcaacccaaagtggattaaagctgtaaatgtaagaactgaatctgtaaagctcacagaagaaaacacagaggaaaagctgcgtggtattgatatggccagttattttttggatatgactccaaaagcacaagcaacaaaagggaaaataggtgggaatgcatcaaactaaagaacttctgtatcagccacgcaacaatcagcagagtgaagagacaacctatgaaatggcagaaaatatttgccaaccatacatttgataagaggttaatattcaaaatagataaggaactcaaaaactcaatagttagaaaataagtaacccaatttaaaaatggggtaaagaaacagaataaacttttctcaaaagaagtcatacaaatggccaacaggtatatgaaaaaatactccacatcataaattatcagggaaaaaattatcattaaaaccacaatgagatattacctcatacctgttaggatggctgttatcaaaaagacaagagatggccgggcacggtggctcatgcctgtaatcccagcactttgggaggctgaaggggacagatcatctgaggtcaggagtttgagagcagcctggccaaaatggcaaaaccctctctgtactaaaaatacaaaagttatctagtgtggtggtgggtgcctgtaatgccagctactcaggaggctcaggcaggagaatcgcttgaactcaggagggagaggttgcagtgagatgagattgcactccagcctgggtgacaaagcgacatctatcttaaaaaaaaaaaaaagacaagaaagacaagagataataagtgataagcgctggcaaggacgtggagaaaaggaaagccttgtacactgttggtgggaatgtaaattggtacagccattatggaaaacagctcaaaagttaaaaatagaactgtcatatgacccagtggtctcacttctgggtacgtatccaaaggaaacaaaccagcatgtcaagggatgtctgcactcccatgtcctttgccgcactattcacaatagcccaggtagggacctacctaagtgtccattgactgatgaatgaataaagaaaatgtgttatatttataaacacaataagataccataggaccttttaaaagaacaataccctgtcatctgtgacaacatggatgaacctgaaggacatgatgttacataaaatgagccaggcacagaaaaacaaatattgcacggtttcacgtatacgtggaatctaaaaacactgaaatctgagaagtagagggtaaaatgctggttgccaggggctggaagttggggctgtgtgtgggcggggaggtgttggtcacaggaagcaaactttcagtgagtcaggaggaaaaagtgatgtattgcacagtattgcacaatatggtgactgtagttaataacaatgtattacattcttgaaaatcactaatgactagatattcggtgttgtcaccacaaaaaataagtatatgaggtaatgcacatattgtctcaatttagctgttccacaacacatacatatttcaaaacaacattatatacaataaatagatatcatttttgttgatttaaaaatagttatttgtactgtgcttgcaatgctaagtttgaggttgtttcataaaagacatacatgtattatacttcaattaaacatttcaacaaagtattatcctgttgcctcttttatgccaggaattacaattaaagccgttagaagggaatttgtaaaattaaaagtgctagaagtcattggtgttacatattcataggttctgaagaactgtttctccagggaggggtacgcttctgtcaaaagctgactttcagtaaaaaacagtttaacttgtttcagtatgaaatttatgttaaaaagaaattacaagtttaacaaaactagtcatgtaggaaaaaaccctacttttaaaaatatgccttagaataatctgaaatgccctgaatggtcaaggtcaccaggtcttcacagagagctcttaatcccaagattgtacctgacggcccgtggccagaggtgattccatgggaacctcaagctgaatttaaaggaatttcaacggtgttaaagttggaaatggcatggaaaaatgtatgctggcctcaattaattttcttctttttttaaaacaagtatgtatatgtactgttatccaacaccctcttcaaagcacaaagagcttttattaaaagctatagtaccttgaaaaatgcatggcttctgtgtgtgaaaatgtcaagtgtaacggactccagattttgtatattcgtcctggtggcagagtgacaagtccacatctcattccacatccatccacccctcttcacttgctgctttagagttcctgatagggaaacaccattctctttcctgagcctgcaaggctaagtccttttcaagccaacgtactgaggaatgagtactggacaagttaacccttaattctcacaagtacatggaagaaatgtcttccaatcactccgaatctgacttttacaggataagtaggaataatgtagaaattttagattaagagtaaaatataggaaggaaggattttctaggtagggaactcagcttgagtgcagccatgacctgaaaggttgtacgtaagcacagtaaactacaaataaatgttgatgaagatattgagagatgtagctgcgagcataggcatggggtttctgggagtcctaagtagcagcttagtgtccaaatagcttagacttttcctgggctccaaaatcagttgatgcatcccaacggatgcgaaacataccatcagtgtgcaggaataaaatactaggactttcatttatattaatttttaatcaaagcaaataggaaaaacccctcactttgctcatggtatgcccactcccagttgcctgaatatttctgatggtcacaggtaacatttgggaaaagcggacattcctgtgtgccagcattgatttgtctcctgtagcacataryagtgttttgcagttgacatgatcctcgtttaaactaaagcaactcttacaaaatgaaatagtattgaagactatactaaggcacttcaccagccacrttaacaagcaaaaaaagaaaagaaaaagatggttttatcagatctgacaagagttaagcactatttgaaataagaattcatatccaccactattaaccatgagccttgtcctcagggagtgttgtgcaatgtgatgctgactgctaacagtgtgaggctgagaccatggtcaacgctcttaccaagaaatcacctaaaacttgaagacaaactttggtgaagtcatcggtaattaaaaaatttcaccagcattagagtaccattggaagcttttcgttggtttcctactcaatagtgaaaaacaaataaccacgtgtcaacattgtaattctctcatttggatctgttcttaaattctaagcagtgtgtattttatggtgtacttaatctcttagtagagtaatgcatataaaatttgtgaataaacaagatgctttgggggctgtgtgctcacattttttactagtaagtatgcctagtcaatcacacgtggaaacaaccatgcaaggtggaaccactggagattttaggcagagaagtgaaatggttagcctagaggtgaaggaatgaacattacaactattcagcaggcaaaatttatttccttaaccrccattacggaaattctccaagttgcattgactcacatttgaatcctgtctccaccacttgctgtgtatgtatttgggaaaattacctcaactttctaagccttcggtcatccatttgtcaaatgagtgtgtgactctgctcttacagactttgggacagctcatgtggatgatgtatgtgatgtgcttgaacacaagacacataatatgtgttccagcataatattctcttaaattgcatttatctaaatggtacacattagctatattttgacagacagttttaacttttttcctaaaaaaaatcatactatacgtgctcttttcatgttaaataataatttttggccaggtacagtggctcacgcctgtagtcccagcactgtgggaggccaaggcgggcagatcacgaggtcaggagttcaagaccagcctgaccaacatggtgaaactctgtctctactaaaaacacaaataattagctgggcctgrtggcatgtgcctgtaatcccagctactcaggaggctgagggaggctgaggcaggagaatggcttgaacccgggaggcagaggttgcactgagccgagatcctgccagtgcactccagcctgggtgacagagcaaaacgagactccatctcaaaaaaaaaaaaaaaaaaaaaaaaattccagctgtatgagtccattctcacactctgataaagacatacccaagactgggcaatttataaaaaaaaaagaggttaaatggactcatagttctgcatggctgggaggcctcccaatcatggcagaaggtgaaaggcaaaggcacatcttacatggcggcaggcaaaagagaatgagaaccaagcgaaaggggaaaccccttatacaaccatcagatcgtgtgagacttattcactaccaggggaacagtgtgggataaaccacccccatgattcagttatcttctgccaggtgcctcccacaacatgtgggaattatgggagctacaattcaggatgagatttgggtagaggcacagccaaaccatatcaccagctatagtacggttagtccttgaaataggagtgctttgtaagtgaaacatacaatgtgagtcaaattttcatcttctctaaaatattgattaaagggctaatggaacaggttggcttatctatttttatatgcttgtacttttaaaactacacaaaattggatgtgaatggaggattaatagctaatttatagctaattcttagagtttagggaacagagtgagaagcagcctggacattctagaaggtgtttggggtgcatcctaatctgtggtaaaacaaatcctcgggttctgatctgttattaatgctccagaagcaccaatcttacaatctacacatgtgtagatatctctgtcgttatagttggcagcatacctaccatcttgctaacttgtctgatccacatatgaaataagtgctccaaaggagtaagtacgttccctgtatggacacatttttcactctgtgcactcaatcccatcaaataaccaagacctcttctgcagatggaatgctgttaggcactgtgggtgtgtgtccaggatcttctttaactttatcctctcgatgacactctgaacttagtatcgctgtccttattttacagatgaggaaactgtggccctctgagagaaataaattgtccaagatctcaaagctatgcaggatacaaggtagcctggagacacacacctgtccacctctggagcccacgttcttgataccaaaccattcctgcaccagaattytttctggatattaagtttgcatcagtatacctcctgaaatcatgagagcctttgaaaagaaatgcaaaatgagtaaatacagatatttaggcaggtatcagaaacattgcacaggattgtgagttattctgmagatgtaaaaatataaaattcattacattattacttaaattaataggtcagcgatcgtaactgctgaaatctcagcaatttttacataaaaataaaataattaatctctccatgtaaactataaaaacatttaaataacctctcaacatatatggtgtgctgcataccaaattcaaagctaaccagttcattctagtcagctccaagccaacatttacctctaagcaccttcccctcaaagggcaataagaatgaaacccagagttccacaatctgctcatcttgttcatttttagagtcggggaggtgtaggcctcgtgaggactaacctatctctgtagtggcatatttgtgaccaggaccttatttctttcaaaatatatttgatcatctctaactccagaaaagtcaaaattcctgtatggatagaattcacttgtagtaattctaaagccaccttgtcgaaaagccttcccctgaagacccagtagaaagatggcttcaccccagccatcttcagccttctttgtttttcttcatagtgtcagtctgtccacctaccatctctccatctgtgtgactgtccatgtacccatctggcatctatctacctatcatctatctatctatacatctccatcaatactatttgcatgaatacacacacatattcatagttaaaaatctagactatacacaaaatagaaggcttcataatgtttctctgaataggaaatgtctaaatacatttaacagattaaaatttccctcctaaatttacatagtttatttcaggaatagttttaaatgtgggcaaactaagtcgtgggacaggagttgaattttaccacaatttgttttaaagtgacttaaaactaataatggaaaatgaaacaatgttaccgagagagcttgacaattcacaaattcagatcttgctgtggtaagaatatgaatagtctttccagtcacatgagaaacattcaaagtccttcaaataatgatacttcctctcactatgtcagggccctcccaacatagccttgcctttccaaattaaattaaattaattaattaattaattactttatttgtttatttcctaagacagggtcttcctctgtcacccaggctggagtgcagtggcacaaacacagctgcctgcagccccaacctcctgggcccaagcaatcctcctgcctcagcctcccatgtcgctgagaccacagatgcgtgccaccacacccggctcacttttttagtagagatgggctctcgctttgttgcccaggcttgtcttgaactcctgggctcatgcagtcctcccacctcaggctcccaacgtgttggacttataggcatgaaccaccacacccagccacctttccaacttttcttcctgcagccccagctcacagatgggcactgggctgcttgttggttcttgatttccaccccttgctctacctactcagtcagtgtctgtgttttcgtctcatctcgacgtgctgcctcgctcagacaaatggaaccactgcccagtgcttatcttgcttgagctgggttttctttgtcccgttttgcattcccgagacaccttgtcttctgactgattctgcacagagcatagtagataacgtttgaggttcatttaatgtattcatgtgtccatcctttcttttattcagtgaacatctattctgagtctgcatgtgctcagcacgaggtgaggtgcagaggaaacaaggaagaccacggctttgtccctgctttcagggaacccctagctgctgagaagcatggatgcacagtcaagccgttatgagttacggggggtttaaagcaaatgcctgcggtgctgcttaagagatacttcccattatatatgtgtgtgttcttcagatgtgactacttcacataaatgtttagggggtacaggagagcacagctaccccacgcactgacaagaaggtcctttyacattcaagtacatctgttttgaggtgaaatctgtttgaaccaaagtaatgggctaaattgtataattgggtctgtatctttcttagagagagaggggcagacaggttagtgcgggagaattttactggcaaggtgttmaagagaaaagatatgagtgtgcctctattaccagtaatacacggagatctgcaaattggttaataactacaggagaagaaagtgcaggaactgccgcctctgggtttcctttgccccatgaggagcgtgatgctagagttcctggtagaggcaaggaagaggaagtgcagctaataatttgaagatatttacacctttcctagtctgtttcacagtacaaaggcattagtgggagtgacaggaacaagttatagaccatttatttaggctatctggaaggatttaatctcacctgggtcatggagttgcgtattttctgggaattggggctactgtgatagccctatctgtaggcctggcatccaaagataagagtttaagtctggctggaattagaagcgacagaattagctagaacgcaagcctgaaaaccttttggttcaaattgtgaaatgcctctgggtrgcagttccaatctgtcctgatggagcttcggctctgagagctaagcgtgaggcagacatcagtaacatcraggacgtttctgcagtgtgcacaggaaatccagccctggatgatgcagtttatacttttcatccatcttaagtctccatcataatatgtctccagaagactaattttctacttcgtcagcatccgaatgtttrttttttaaaaagaacccataaacatgtttgaaaggccagtgattttagaatctatgaggtagctttgtatagaacttgctcgtttatatcactttgaaatatcagaaatagaagttattaaaacataaaacagcagataatgatgatactagtgtatttcttagttacatataccttattagtcccttaaactgtgtatttcagacttatggagtatgacccacatatgtatatttatttactaggtagtatcataagaccaacataataatgcatgcaattaatagattagcagtagacttacaataggatgggaactcaattgtgaatgatttaaaacaaaattttttataataatcaccgactataaatgttacttcgtcaaaacaaaatttatygcttcaactgttagtggtaaacttttttttcatttttttattttttattttttcattagactcactstgtcacccacgctggagcgcartgacgcaatatcagctcactgcaacttccgcctcccaggttcagtgattctcctgcctcagcctcccgagtagctgggactataggcgctcgccaacatgccaggctaatttttggtatttttagtagagccggggtttcgccatgttggcaatctggtctcaaactccygacctcaggtgatctgcccgcctckgcctcccaaagtgctggattacaggagtgagccactgcacctggcctattagtggtaaacttgtatgacctttttcttttctttgagacagaatctctttctgttgcccaggctggagtgcagtggcccaatcacagcttactacagccttgacctcctgggctcaatggatcctcccacctcagcctcccaactagcttgractacaggcatgtgccaccatgcccggctaatatttgtaatttttgtagaatcggctctcactttgttgcccaagctagttttgaattcctgggcccaagtggtccgcccacctcagcctcccaacatgctgggattacaggattgagtcacggcatttgtctggcctttttctttctactgataaaattaaacaaaacatagtgctacacaatatggtggrggcagaagattcaaatatacctggattctctgtttccaatcaaggtgaataccctgtctgccctgtatacttttagaaaaccagacgatcggtgcctgcagagagttcacctgtccttgtgatgktcatttacatgaaaaaatagttcagtaagaattgcaaagsatttctagtaggtcgtaggtccctgcataatgggatcgcaatcctagacatatccacactttctacattttaataattctgtgttgatggtgatgtttgtaagtctgattttcatagtaaatctcagcttragtgtttaaaagcctctttaaaccaaatgggagaagtataagctctattagtaaactgtatttattccatcttcttccatttttcagctcatttctgtctttttgtaggcagttatcggatgtaaatagctatcatctttattactaaaatgcatcctttaatcagatagcacatttttagatgtcatgtaactacaaagtatagttagatcatggccctgcccataactttaaaaaatgcttataatcatgtaacagtaatatgccttaacagaaaaaaaaaaaaggatagcaagagaaataaataaatctgtaacaaaatgggatggtatttctactaatatgaatgatatttcaagaggtcccaagggagctagcaaggctatttaaagtgaagccacatggttrctaattaagaatcttgtattatactggcaagtgtaaatagctggaaagcaatgaggggtgcacttttgtggccacgaattaccaaatagaactcagactgtggcgtctgtctcttcatgttcactatgaatcatcaaattccatggtaaatcttagggtctagcattttccaaaccttcagcactagagaaaaacacatttacatttctgtcattctagataggaaatgtcagttcagattatattctgccttttttggcttcatattttgtctgaaacatcgtcctacatcattgcaaagttatcacggctctttagtcaaaatatccyggtgtattgcaattagacacttgtatatttgatgtcgttgtgtagctagagcttttgtaattttccatatgtaaaaaagaaagaaaatcactagaccataagagaatattaagagaaaatgtggcttctctgtatttagttcaatggataatatatataggcaaaacaagtgaaatgtaagcagaaccagtgacctcttcagtaatgttattgcctaatttaattgcttttttattctggtcactactttctgccactaggaaaatgtagggcatgctgattgagggataactattttaaaataaaatgtaaacagaagttttccagaaataaacttcaactggccaactatatgttacttgtgtctaaaatataaatccactataagtttttataacattagggtaacaatgtattaaaagtatgtgaagcctaacaygacttctctagacatacatccttccttataatgatctgatacacacacacacacctgtacacagacacacacacacacacaaatactgcgtggttcctcagcacttttaggctggcttatggaatctaagataccaccttatctgcctttcaaaaaaataacagttgattgacttaattttcctaacattaaattgaccatctttacgtgtacagtttagtagtatattcatagagttgtgtaatcatcaacaccatcaaattttagaacactgccatarttcccaaaaggaaagcctgtacacagtagcagtcacaccccatgcccctgctcacttccctcttccccgagtacctggctaccacaaattgactttgtctctatgaatttgcctaattgggagatttatttaaatggaaacatgtaatacgtggtcttctgtgactgcctgctttcrcttatgacgtttaaaagttcatccatatttgcgacttgtggtacctcattcctttttattgccaaataatattccattgtatgaatatactgcattttgtttatgtattcatcaattgatgggcatctgggttgtttctacttccttgctattagaaaaatgctgctgttactgatcatgtacragtttttatatggacatacattttcttttcttttggatatatacctagaagggaagttgctggagatatggtaacactattttaaggtatgccactctttaaaagtggctgtaccaatttccctttctgccaataatgaatgagatttacaatttacctatgttcttgacagcacccgttattcttttcttgtttgttttaaattttagcaatatttgtaggtgtgaagggacatctcataattttgatttatatttccctaacgactaatgatgctgatcttcttttcaagagtttattgggccatttgtataacttccttggaaaaatgtctattcagattctttgcccattttttaattgggttatttgtcttctccttgttaagttgtaaatgttctttatatattctggacagaggttttttatgacatatgtgatttgcayttatttccttccttttggtgggttgtcattttactgtagtgatgatgttctttgaagaacaaaagttgtagttcagtgtgtmtatgttgtctttgttcgctcatgtttttggtgccagatctaagtaccttttccaaacccaaggtcacaaaggtttactcctaaattttcttctgagactgttatagttgtatcccttgcattaggcctcttatccattttgacttaatttttatatgtaatgtgatgtaggaactcagcttcattcttttgcatatgccgtttattgaggggattatttttccccattgaatcatcttgttaccctgttgaaaacgaatcaaatatttggttgaacttaccaaggtatcccctggacctggacttttcttcttggcagttttaaaattagtaacgcaatgtctttacttgttatgggtctattcagatttgatatgtcgtcttcagtgagttctggtaggttgtgtctttcttggaatttacccgtttcgtgtaagttatctatttgttggtataatcttatcttttaccagtgaactatcaggatccagattgtaatctctttgttcatttcctaaacaaatacacaaaattttgactaaaattttactaagccaatttaattttttctaataaatgcaattatcttaaggattagaaagatataacaagtagcttagaaaattgacaaaatatccagtaaattttaaaactagctatctgttattcatttactrttttccartgattgagaaaaacaattttttctagctccccattaactcggtaactgctgagagataataaggataatgaggtcacgtgatgaccctagctctcacccctttggtcatcagggtgccctaagaatcttcagaaactttcagggacatttatcttactgaatcataatatgggttcagaatcaatttagtccatagtcactatttttgtttctttgcccaattccctgttgaattatgagactgtggataatattgtgccctctctaaaggtcctcattgatgtgggacagggttagaaattggagcctgtactggattgcatcccttgcatcccctaatttgtctatctcyttctatctttgcattctgatgactctctctcaagccagaggagcgttagtgctcctgcgtttaggaagctggaatgtccacgctgtgcatactctatttgcattactattgtttagaaattattggccgggcgcagtgactcatgcctgtaatcccagcactttgggaggctgaggcgggtggatcacgaggtcacgagatcgagaccagcctgaccaacatggtgaaaccccgtctctactaaaaatagaaaaattagctgggcgtggtggcgtgtgcctgtaatcccagctactcaggaggctgaggcaggagaattgcttgaacctgggaagcggagcttgcagtgagccgagatcgcgccactgcactccagcctggtgacggagcgagactccgtctcagaaaaaaaaaaaaaaaaaaaaagaaattattctctaagcacctgtaggccctccactcacccacttgaagcagaaaccatgcttcctttcatagggaagcacagtgcctagcgtaaagtaggtgctcgtttctggcccaatttttaaaaaaataataaaattctaatctgtgccaactccaaatctattttgatgaacttcaaatgtatatttgatttttctttctactaccttttccttaagggcattctcatgttctcaactcttttattaaaactgatttttaggaaagtttttgatactctttatattgatatcttaatgtaattttagtcattatattacaaccaggggcattttcatttgaaacattttctaatatcatggaatgagagagtctacccataggtgaaaaaggtaagtggtgcttacattaaaacaaaaataaaacaaacactggctctgccttggggatgtatctgtattttctgagcccatgtcagtgatgacctgagcactggacagctgggggaccttagaaaatgaggtccctaaatgaagtgagtccagtgaagtatgcaattgggaacctctgtggcatattatttgctttctaaagttcatatttccttgtattttcatatttgtattaatggctcaatttacgcttgaatttccttcatgtataattaattcttcagcaatttcattccacaaatacgaactgtgagcctgcatggcagtagactagtcactggaattcagacaraaaaggtctgttctctcaaggaacttacattctaaccagagagaaaaatgtcctataattaatgcatcagtgatgtagttaagatggagataaatgctactaaggagaagtatttgaagagctgctagcattctcccagatgtgtctgtgaaggtgtccttttcaacctgctcaaccacattttyctctaatgttgtacagcctctccttgagatgctaatctttgtccagggatttagttttaatctccagtacctgatttgggctggctgtgggtttatctgttgataaatacagaaaaacatcttaacacatttttaaatgttgtattttgtagtgctgacactgctagtatggtaacagcgagtcgttttgctcctccatctcttcctctcttttctctccattggtgaaaaaggtgttaccttacaatgtgcttgtgtgccatggagttttctacactctcaaactacctgcttgtttcctcttttgcttatattcctagtcttctttgctttcaaaacaataaatctgataacataaagagtccactcatgcactcagagactctaagttttgagagatgcccagactaattctgaattcattaaaaatttaagatagttgagtgccaactagggtgccagcactgtgaacattaaagaaatgctccctaaagaatcatttgttaataggataatgaaagagtataatttttattaaaagaaaagggcattagtacattaattgtgagctgctctctgcttatttgccgtatgactattaaaattctcgaagtaacataaggagttctatggggagatttcaaagccttaagaaggaaatattagggggactaataggatggatagagtagaatggcaaatctttctcataggcactgttacatgacttgatcagaaccatctttgatactttatgttgcttcccctgtcacttttatttaacaataaaatctctcagttctgagaacaaaagtacttttaaaacaggtaaatttctgtcataaaagtgtttttcactgcagtgggtggtggtgagaacagtaagatgggaatgtaacctgccagcgctgattgagccaaccacccacctgatttgaaaagagtaacactcaacaaattcttggaattgactaatttgagaatacatgaatagtatcttaactcccctctctcacagttggtaagcatagttcataccaagttggaaacaaaattataattggtcttgccattaaatgaactcccttagtatgttatgcatttctttgtcaaatatctgctctttatgtcctccattaaattatagaataatagaatatagtcctgaatctcactcgtgtttgatttctaacatttaatacaaagtttaacacacagtagatgcatgaaaatcatttcaataactgaatagtcaaatatgtattgcttatttgaaatcatatctagattgaaagctattcattaatataaattagtaagttgataatacttgtgaagttagacaatccataatataatcatacttttaatttcaactcagttgtttttaggggtaggggtaattccttatctttcacctccatttatacaacatggtgggatttgtctagaattacatccatttctttgtgcaggcctatgtagggttttttaaaaagcctatctcgtatgtcccatttgggtttttcctcttaagacatctgtttccctatttccactgtctcactgcatgaggagtgagtctctctctttgtgtgtgtgtttgtggtaggacactgatcaactagtctgtatcaatatagcaatgagtgataatggaataacatgtcactttaaccttttttgtttgaattggattttggagactctgccttcacactaaatgaagttcaggttactgattgtaattccaggctatctgacagtacagagacaggaatattttgtcctaattgtgccttctatattatcattacctattttataattgaactttgcttggatcataattgccttataactgaagtttgcttgagtattttttaaatacacactatagagatgccacagttcctgtaactacagtacactcttagtaacacagagtataggaaaatttactaatgtatactttcattgaatatagcagtagtgtaacttatgtttgtagaaacataaataactcaggtatctctcagataatctgcatagctatagcaacagtataacacaattatttcattacattcataaatgtattatgattatttttgaagactcctataagtcctgttcttaatatccaaataatactaaatgataccaaaactacaattcctcagaatgttctacatatagtgaaacttacttcccacaactttattgaaagaaaccagcaacctgaattctttaacttgttctggtcccatggaggcagcgtcttcacgggcttcatgtacagatgttgactccacggagctgccttttcaatgcatgagtggatgtaggtcgcaaatgttaagtcaaatttaaagagattacaggatttggctttacagtacacattggtttggtgcaaaagtaatcgcaggttttgctattgcttttaatggtaaaaatcttttgcaccaacctaatattatattttatgtttggaaagagaaactatgacctaccccttcaaatattttcaataatatgtatctaatgcatttaatagtttttacctctgtcaaaaactaaatcaacattataattataatttctatttttatgagaatgctatgtgtatttcaattctttctaaaattattttttaattttcaattataatcaaattattagtgtccctggaaaaatattaattctagtaaccattccttcttaacattaaatctttgaaaaatgaagaaataccaacttttctatttttaaaatgctgtcaattcatatatgggttacagatatctgtctgcaggtatttttagttgagtgtcagaatttctttaacctgaaatgtaaatcatttctaargtaaaagagaatgaagggtactgtgttttgtcaaaatccttctggcatcaagttattaactgtgtaatgataagtggattgtgactatttttaattcctaaaaagagaagttgaatctctatggtgatgatttgatgttctattactagacaggaggacctgtttagttcataatcagaaaaaaaaattatttctctttttggaagtaaaaacaaaattacaataaaaagcattattcatgctactctaataatacagatgttgtgcaagattcttatggtttggcttgatgaaaatgaaaacagtacaggcgcacctcactttattgcatgtcacttcattgcccttctctggtattgtgttttttacaaattgaaggtttgtggaaacccggtattgagcggcaagtctatcagcagcaccatttttccaacagtgtgtgcccacttcatgtctcagtatcacattttggaaattctcacaatgttttaaacctttgcattattattaatctgttagagtgattggggatctttgttttcagttaatagttcagactttgtctttcaaaagtatatggcgggtggatcacctgaggtcaggagttcgagaccagcctggccaatatggaaaaaccccgtctctactaaaagtcccaaaactgggtgggcgtgttggcaggcacctgtaatccaagctactcgggaggctgaggcaggagaatcccttgaacctgggaggcagaggttgcagtgagctgacatcgcgccactgcatccagcctgagcaatacaaaacagaataatttttttaaaagaatgaaatttattctaataattttagggtatgatcagtgatctttagtgttacaattataatagttttagaataccatgaaccacacccatatgagatggtaaatgaaattggtaaatattgtgtgtgttctgactgctccagtgaccaaccatccccacatctctctccctctccttgggcctccctatttcctcagacaacataacatgaaaattgggccaattagtcctatgatgggctctaagtgttcaagtgaaaggaggaatggcacgtctctcacttaaatcaaagctagagatgattgagctcagtgaggaaggcatgttgaaagccaatatagaccaaatgctaggcctcttgtggaaaacatttagctaagtggagaatgcaaaggaaaattccttgaaggaaattaaaagtgctactccagtgtagacaaaaatgattagaaagaaaaacagctttattgctgatatgaaggaaattttagtagtccagacagatgttgaaaccagctacatttccttaagccaaaaacctaatccagaggaaggctgtattagtctgttctcacgttgctgataaagatatacctgagactaggcaatttaaaaaagaaagaggttgaatgcacttacagttccacgtggctggggaggcctcataatcatggcagaaggtgaaggcacatctcacatggtgcccgacgagaagagagcttgtgcagggaaagttccccttataaaaccatccaatctttgaggctcattcactttcaagagaatatcatgggaaagacctacccccatgattcaacaacccccaaccaggttcctcccacaacactkggaaattgtaggagttacaattcaagatgagatttgggtggggacacagccaaaccagatcaaagacctgtaccctcttcaattctatgaaggctgagagaggtgaggaagctgcacaagaaaagttgttcagctggcagaggtagattcatgaggtttaaggaaagaagccatctccatcacagttcaagttcagggtgagtgctgatggagaagctgcctcaagttatgtagaagacctagctacggtcaatgatgaaggtggccacagtaaactacagattttcagtgtagaagacacagccgtctattggaacaagatgctatctaggactttcttagctagagagaagtcaatacctggctttaatgcttcaaagaacaggctgactctcttgttaggggtaatgcagtgggtgactttaagttgaagacaatactcatttaccattttgaaaatcctaggtcccttaagattatgctaagtttactgtgcctgtgctctataaatggaacaacaaagcctagatgacagcacacctgtttacagcacggtttactggatattttaaggtcactgttgagacccactgctcgggaaaaaacattcctttcacaatattacttctcaatgccagtgcacctggtcacccaggaactctggtggaaatgtatagggaagtgaatgtagtcttcatgcctgctaaaacaacacctaaattctgcagtccatggatcaatgagtaattttgactttcaagacttactattttaaaaaaatttcatgatgctatagctctcatagatcactaaagatcattacatttctctgatggatctggggaaagtaaactgaaaactttctggaaacgattcaccattctagatgccattaagaacttcatgattcatgagtggaggtcaaaatatgaagattaataggagttggaagaagtcgattctaaccctcatggatgactttaagggattcaagacttcagtggagcaggtaactgaagatgaggtgaaaatagcaagaacagtagaattagaagtggaggctgaagacatgactcaatttctgcaatctcataataaaatatgaayggatgaggagttgcttcttatggaagaacaaagtggtttcttaagatgaaacctactcctgatgaaagtgctgtgaacattgttgaaatgataacacaggatttcagacatgaaataaacttagatgatcaagcagccacagggtttgagaggactgactccagttttgaargttctgctgctgtcagacagaatgacatgctacagagaaatcttttatgaaatgaagagtccatcagtgcggcaaacttcattgttgtcttattttaagacattgccacatccaccccagctttcagcagccatcaccctgaacagtctgcagccatcagcatcgacgcaagacctgccactagcaaaaaaggttatgacttgaaggttcagatgagagttaacattttttagcaatgaagtattttttaattaagacatgtccattctcgttttagacataagactattgcatacttaacaaactacagtatagtgcaagcatactttttgtgtgcactgagaaacctcagctttgtgtgacttgctttattgtgatatctgctttattgcagtgatctgtaactgaacccacagtatctccaacttatgcctgtaactaacattacagtgttttagggcggaaaagaacttttcatgtgttttgtttgttttatcctcaccaaaatcttacaggatatcgagagctgatactatttcttattttacacctagacaaacctgagcattgtagaattgaaattacttgcccaagggtacaatttcatatataaataatgaatcttgaacttaggtacttttcttctaaattctgtatttttctattgcactctctctttagaaatcatctcgattcaccgggttctaataaacacacaggatgatagtcattattctgaatcttcatttgaaactgagaaacttgtttccatcagtctcagttgctggggaagaatcctagggaaatgcagtcaccagaaaatgtccagcaggaaagcaaaatgtgtcagcctggaccttaagatatatgtgcttgtagtaggcaatagcacagagcaggtgaggaatatttgagaaagttgagaattcatttttccaataaacataacytaaatgcagcattatactaactgtaaatgcattactctcattaaacattcctgagaccttctgattgaaagaccctagaaagtaaaaaaattttctaagcagagaaagtttccaggaagattcaaaatcacgcataactctatgtttccttataggtgtgcctgtggatttctatgtagagggtgacaataaggtgggtggagagaggtggggaaggagggaagtgggcasatgagaaaagactycctgagctgtgttagggaccagggagcataaactgtcctgaaataagggggaaccatgagaggggtttaaacaggggatgggcagggttttgtttttctttggaaatattcctccggcaggtatgtgaatacatttgagagaactgagaaggacagcacaaaattagttgacaagttactgcagtcatccaaaagggagtatgatgtatcaaaataagatgctggctttgggtatagaaaagaggacaccgatttacaaattacaagaacaacagctagctagaggtcaggatttggagaatatgaattcccttttgagttgggcaacggagtatctgcctattctgtctgtagtgttgctaatggttcccaactatcgtccttgcttttccaaatagattgcttcatttccttgagatctcagactacaaattcgtgttccgctacaccttccacttgaccttgttctcatagaatgatgctgtcaggkgctgtggagctgtgaacagcgatttccatccagcttctgaaaaggctcgagtgctgagctttgggaatttcatgttaacttttctacctccttcatgactgtgaggctatcagctgtcaccgcttatgagttccagaatggcaacctctgatgacttcaaaagaaatttgagtcacgtaagactttgtgattttgtgtgaagacagactgtaaaggagggtctgatctattaaattaaatcttacctaatcttttttaaagtattaatttattaattattaagtattaattattaagtattaataatcttgcttagtaaccctattcttttcatttaatggctcygagttgtgatgtccctatcttattcacaccaggagaacagaaagcctttacaagtttatggtttgtggcacacryatttattcccaatacattatttatagttttcttgataaatacccaatacagctctcctttgcttagtcattttgaggtaacagggaatcaaaatgaggccctgcaaaattgcccagaaaagtggctttwttatcaaacttaaaaatgtttgacactaagttctaattaaaatataactgttttcttggccttaggtaagagaatggtagatgtcatctaaattagctaaaattaagtaacatgattttggggaaagatttccttaaaccagagcataatttgggataacaagcaagctctgtgtttccctttgttttttgattcctgaataatatcacaattactaatacttctatgaataaatgtattaatatggcatgtttcaagatcaagtatgaacatgcctcagctttcagactgatctcaagaagcatagtcagatgttagaagccgtgggatacaactgaacaagtgtatccatgcactaaagtcatgagaagttaaaaccgtgaaaaatgagagaacgttgaatttcttcagatgctgagaacccatgatctgttggctgatacsatacatttttttaatgargccagtttgagctgttaacataaaagacccaaaggtttatggaatatcaaatttcaacttatcccatatgctataatcagttgaaatgtaggtgtatgctagtactgtgaataaaaaataatttttttttttttttttttagagagagagtctctctctgttgcccaggctggtgtgcagtggtgtgatcttggctcactgcaacctccgcctcctgagttcaagtgattatcctgcctcaccctcctgagttagctgggattacaggcaaatgtcaccacgactgactaatttttgtatttttagtagagacagggtttcaccacattggccaggctggtcttgaacttctgatctcaggtgatccacccgcctcggcctctcaaagttctgggattacagacctgagccacagcgcccagccatgaataaaaaataaacattttaaagaaaactcttaattttttccttacctaaaccatcctggatttttcatttttgttaaaaattaatcattcatggaatagataaaattagtagtgggagtggtgggatgggctattttgaaagaatactcagctaataatcacaatcaatttataagagacctcctccaggtccctctattttacttgcactaatttttctccatcaacaaaataaacagccataaagtggcaaacgtgcatggggcagtagaagtgcagtcaygcattgctgaactgtggtgggataggttctaacaatgtgttgttaggtgattttgtcattgtgcgaacatcatagcatgtgtttagacacagctagatgctgtagcctaccagacacctaggctttcagagcaagagaataggtcagcctattgctctgaggctgtaaacatggacaacatgttactatattgaatgctgtaggtaacagtaatacagtggtaattatttgtgcatttgaacaattttcaatgaactgtatccttccatcttttgaaccaagagggaaatggatgttgggtcaccagcctccatgtctgccacgttcctggtgaaggtagtctggggaatctgagcacgggtttgcagtcccaacagcctgcccactctcttccctctgactgaagtgacacactcatcatgcagagagtgtgtggacggcgttgtggatgagtgagtgaagaagatgggagttgcagttctctgagcaatgacaggcatgtgggggaagaaaattgttcccctgaaaatattattatgtcaaaaagttaagaaagtcaatgatttataaccaagagcttatttgttcttcagcaacaatcttttccacttcatttgatgaaatccatgtacattgcaagagcaaattttaagaaaagttggtttattaagtcaaaaacatcgatctaaaaggaggataaatgataaaataataatttggggaaattcttgcggaaacctgtgagaaacttaaaacgtttcagaataaactgtagctggtttaaatcagtgctaagaatgcccagatgactacaaatttagttagttttcatctaaaattaagacttcctcttctctctgattagatcataaagaaacaggcctgaatgatttttagaggtgattggactttgattataacacaatcgggggaaagatagaagagaggaaacaagaaagaggcatcggaatatcttgaagtgaaaaggctcagagggaaatttatagactagaacatctatacaatgtgtattaaaccagaccatgtttgaaacaaattaaaaaatatgtatgtctttgccaacatacttgtccaaggacaaagtgactcttcttttggccaaatcttatttggttttttttggattaagaaggccttccttggctgggccaggtggcttgcaacctgtaatcccagcactttgggaggccaatgctgggggatcacttgaggtcaggagttcgagaccagtctggccaacatggtgaaaccccatctctactaaaaatacaaaaattagctgggtgtgggggcacatgcctataatcccagctactagggaggttgaggcaggagaatcacttgaagccaggagatgaaggttgcagtaagccgaggtcatgccactgttctccagcctgggtgacagagtgagactctgtcttaaaaaaaaaaaaagcaagcctttcttttttcatgtctacaaaccccaggacagtaaggggcaagaataggaacccctgcccacaatgtgtacggttcagtgaaaagatggggataaatgtaccttataaatacatggtagcatcattagctctcagatgattggaagcctgctcgttacatacgtgtttaatgtttcactggggggcctaagttctgttgcyctttaggacccttgaaaagcacttttccttatagtccttgctaagtccttatctagccagcttcttacttcagtgatacatgcctttctcacctccaccactccaaaacgttgttggagtggtcaagatagttgttgaccagtggtcaagatagtcagcccagattgataatacatattcacgggcagtacattatatagaagcaatagaaaattaaatacaatgtggactttttataattttaaccataatccgatgttatttgtacctttccctttcttaaaaataaatgcaggcgatcaagttaagttttatgtggggagttagagtactatactacacaccaaaatgtgatgtgttattcataaagcttaattttgagaactaaataataatatttctatgatgatgatggtatctgagcattcactrgaaatctaataaacttcttatttaataagcatagttgagttccagtcataattatcaagatcataaagccagctgaggtaactatgaatctttatatgatgataaatattattcaaatagatttacatgccatgaattgaaatgagtgctaccatctcaacagctagaaacatattttgctgcctgaaactgcctctaatctgagctacagcaaactttcctccatgcaacagccagactatttttagtaaaggaagcttgaacagacgaagataatcatatggttctcctaaattaaatccgttaagagtgcgttcatgtgaatcaccagatctgtaaggctttattgtctccattgtttaaattctatgaaacggaacaacaaaaaaaatcactgctgtttcaattctgctatccctgtgatgtacctacagcaaagctgtcaacacatagtaatataactgaaggcatcttgtggttcaggaatagtttggtgactggaagttgtgaagggggaaacgcgttgttggcatttcattggtttaacataggtacaccctgcatggagggactcggtaagtaatgatggtgattgactgtgtcaaaacccagcggagctgcattttcgtggaggacgagtcacttcacttacactaatgagaattattcttaagaaatgtgacttttttttwtatatactttaagttttagggtacatgtgcacattgtgcaggttagttacatacgtatacatgtgccatgctggtgtgctgcacccactaactcgtcatctagcattaggtatatctcccaatgctatccctccccctccccccaccacacaacagtccccagagtgtgatattccccttcctgtgtccatgtgatctcattgttcaattcccacctatgagtgagaatatgcggtgtttggttttttgttcttgcgatagtttactgagaatgatgatttccagtttcatccatgtccctacaaaggacatgaactcatcatttttatggctgcatagtattccacggtgtatatgtgccacattttcttaatccagtctatcattgttggacatttgggttggttccaagtctttgctattgtgaataatgcggcaataaacatacgtgtgcatgtgtctttatagcagcatgatttatagtcctttgggtatatacccagtaatgggatggctgggtcaaatggtatttccagttctagatccctgaggaatcgccacactgacttccacaatggttgaactagtttacaatcccaccaacagtgtaaaagtgttcctatttctccacatcctctccagcacctgttgtttcctgactttttaatgattgccattctaactggtgtgagatggtatctcattgtgattttgatttgcatttctccatgtgacttttttcttgtgataattttctcagagtgggtaaattatggtattgagtattagattatgaaatgcttgctttttatgataccaaacacgtttttgtattggaagtgaattatctgccaaattatgttttaaaagctgtagagggctgagggcagggcatcaagcctgtaatcccagcactttgggaggccaaggcaggcaggttgcttgagcccgggagttccacaccagtctggccaacatggcgaaaccttgtctctacaaaaagtataaaaattaaccgggtgtggtgatgcacgtctggagtcccagctacttagggggctgaggtgggaggatcgcttgagcccaggaggttttggctgcagtgagccatatcgtgccactgcactcaagcctgggtgacagagcgagaccctgtctcagaaaacagacacacaaaaaacaacaacaaaaaaacccaaagctatagaggtagtacttgggaaaattttcaagaccagctgagatgttctgtttaggcagccattgagttaacttggcagtactgagtaataaatacaggaatagacacttgctctggttaacgctgaggccaacagcagctgcagcattgtgttttaagttcacttttacttgaaagtggtcccaggtttggggttgttataaagtgagtaagcgtgagtacaattctctctcctatcagacggtttcaagactaccccttgctccattcattcatttactactatctgtgtgacctgtttgctgtagcttcaatggttttcacattaattagctcatttgttatcttatttgaccctgagctcttttggcctgtacccacactttacagataagatagtgaagcatgaggatgttaaatcgatgaggtgatactcaagtgaaattgcatcctgaacttagatcttctgagtctttctctactgagttctttccatgatgatattgttctactgtggttattcagcagtacccactaacgtttatcgaatattcactatgcgtgtggtattttgctaactactttatctcatttaactatcagtcctgtttgttacgtgcaattgttatttccacattacatatcataaaattgatgttcagaaacacccccatcctgacttggctggtagtggccattagattcgaaacccagtcattctgataccaaagcacaaaaccactgtttatcatcttgacatcctcattgctttgaaatcrggaacttgtgtacattacagttacatgtatattacaattgaattgtgttatcaagactagtggtatggatggagatatttaggaaattgcacgaataaaaatggattatttatggattaattgtcagtatctgagaaatcatcttgtttgggatcgatattccaagaatcaggctcagggcttgtggaattttcttctgttctccatgctcagaatactacttcttcccgcaaaacctactgctgctactcattcctctgctctcagcttaaaacccagctctctcagaagtcgaggtctctcatccctccaatataccctcaaagagtctcagtattaattgcctgtttaatatttttttttggacggagtctcgctctgtcacccgggctggagtgcagtggcgtgatcttgggtcactgcaacctctgcctccctggttcaggtgattcccctacctcagcctcccaagcaactgggattacaggcgtgagccaccgcgcccagcctgtgtaatcacttttatcctcctgacgtgcaaaagtctctttcagtattccatccccacaatctggcaaaatgtgtgtcactttttagatgctcattatttgttaaaggaattaaaaaatcaatgacttaaaattagcaacaatgaatgctttttcagaactttatgatagtgtttggtagtgattccaaacactaggagaaatgaagagtgtctttgagaaactagagtaattaagtaaaataggttgggtgcggtggctcaagcctgtaatcctagtactttgggaggccgacataggtggatcacttgaagtcaggagttcgagaccaggctggccaacatggtaaaaccccatctctactgaaaaaatacaaaaattagtgggtgtggtgccatgtgcctgtaatcccagctactcggaggctgtggcacaagaatcacttgaacccggcaggcagaggttgcagtttgccaggatcgcactactgcactccagcctgggctacagctcgagactccatctcaaaaaaaaaaaaaaattaaattcagtaaaataattggaatccactgataagttcacagatactgtctgcccatgcccatgacctgatggaaatttaagagggatcctattggacttttggagaaccagaagaattagtgctgttgtattgtttaggtgtctgtaaactatattccatgagatacattactgtttcatgatatttaaattatctaaaggcctttaataaagcatatattactaaggtattttgaataacaataaaggaaaatcaaaatgggccacattgtcagaaagtggggaaaatgctgggaatagagtgacaagagatgaggctaagaagagctgatctactaggaaggtgtttggtgctgtctctgcccccatttcacagatgagggcatggacagcaccaaacaccttcctaagggtggcagtgctcaagggcacaaaatattaaactgcaaatgtcgaataccgtccagtgaaatgccagatgaaaacgtgacacgatgtgctgttagaattattttctttaaataccaacctcttttagcacatctgagctctgtgactgcttcactaatagaacgtgttagaaatgacactctgcccatttccaggctcaggccttaagaaactggaagtttctacttcctctctcttagggtagtcacctttagaaagcacctactgtgccctagggcagcggtgcccaagccctgggccagcaggggtggcctgttaggaaccaggccactcagcaggagataagcagtaggcgagcragcattacagcccgagctccacctcctgtcaaatcagtggcagcatgagattctcctaggagcaagaactctattgtgaactgtgcatgygggggatctaggttgcacgctccttatgagaatctaatgcttgatgatgtgaggtggaacagttttatcctgaaacyatcccactgggtccctggaaaaactgtcttccgtcaaacctgtgcatgttgacaatgacagacaactaaaaagrttgggggccactgctctagggcacccccttgttaagaagaactaagaacaccagcccactgacctcagcttatattcagcatccactcggccatgcaaaagagccacgttgaaaagaaaccattcagtcccactgaaccatccgagctgaccccacatagagcagagtcaaacttacccagctaactctgcccagccttgtgatcacacttttactaaaatatgactatattttccaagaaaagcatggacttcagttgttctattacaaaatgagggaagatccttgttttgatgattaacaaatcgttagataaaatggatactcttatgaaaatgcatgatgtaatcatcaagatatacccaagtagttacatgtgagaacccagtgaatacttgggcttggggccagggttttgttgggaaacagttctgcagttacacatgaacaaattatcaacacatgaccaagtaatccatgtgtggctcagagctctatagaacacagcattaacagattttcactggaaatcaaggttggcttgggacatgtgaaagcgatttgtagacaaacctgttttatactaatgcaaggtgatgccattgccattgcttttattatgatcatagtctcttggagactggctggaatttacaaaaatcatttttgcctctcttgtgtcctgtataccatataaagttttttcaaatgagggatttttcattattcatataatatcaaaatcagaaatgaaaaatattaataagaactagattaggtgtcttcttaagatcttctcttaattattgttttccttctaatatttgttttaaacaatttgtagagataacttggcttacttaggaacaattaatcctttctatttctttctgcagaattaacttctgtaaacttctatttctttctgcagaattaaccgtagtgagccttttagttaactgcttctataatacgttcttgctctaagaaatcatagggaataaattcaagttagaaaggaatatatacactcattaaagcaagacatgtttctgtttgtgtaacatattctaatcttgtaaagtttaacatgccagaataaacagaaactcagtttctggttacatctggtatttatttcttaatatctcctgtattagtcaattttcacactgctgataaagacatacctgagtctgggaacaaaaagaggtttaattggacttacagttccacatgactggggaggcctcagaatcatggcgtgaggtgaaaggcacttcttacatggtggtggcaagagaaaatgaggaagaagcaaaagtggaaacccctgatacacccatcagatttcatgagacttattcactatcatgagaatagcacgagagagaccagcccccatgattctattacctccttctaggtgcctcccacaacacgtgggaattctgggagatacaattcaagttgagatttgggtggggacacagccaaaccatatcatctccmaagctataaaatgacttatttgaaattttaaaaggagractccaaggaagtgttcaaatattcacgtacctaaactgaaacatgtgtttatatttttgaaaaatagcctgagyacttgacaactaatgttatatattgagttaccatttctgaaactttaattttatgaaagctcyttctcctaatttgttaaacggggcatggacagacatgaaggtgacccccacccccccggcccagtgacctcccaccacctcctgtacatgctcatgtgaaattgctttctctaaccaagaaaatacagcaaaagtgatttgatttccctgaccgtgccaattatgttatctaagacttcccctgaygatattacttatgatggattcagtggagactggagcagaccctctccttgttgatttgatgaagtgaactgccaaggtgaggaagctcacatggcaaggaacggcaggaggcctccagccaacaggcagcagaaagccgaggcccttgtaatgacagctgcaaggaagttaattctgccaacagcctgagagagcttagaagctagtttygctgtaatggagtctccagggaagagagcagcccagccgacatcttgactgggcctcatgggactctgagcagaagtcacaccaggcctgccccacagaaactgtgagatcataaaagcatgttgttttaagcaacaaaattgtggttatttgttacacagcaatagaaaagaaatgccaagtataatgtctcatatgatttctgagataaatgaagtaatgtacctggaaaaacctgtcgataataaagactttaaaagaaaaacamctacaaaactcaggaaataactaaatgaaaagcaggttatcagcaaagaggccaaaggagtataaagatattgacatatattctaaaaatgtatgtccgtacacatttcttgtaacaaaatcttaacttggtggtgttttcataattagtaaatgtagttactgatttcctacccaccagataggaaaatgtccaccatccygacatgayggtgacatctgtccgacatcggcctctgaaggaaagagatacagttagcaaggatttcactgtagttcatggtaaaacagtaaataaaaaatgcttatttatttgacatgtattttttaaaactgtgtctgaaaagtgaacaaaacaacaaatacttttatgataaatggactttgttactttgtaaacttgtagccttggacatatctcagcatctccaagcctcagtctctccatctgtaaaaaaggctgtggcactgcccaccttgttttgtttataggtcactagggatgaggtgtacatatggtattaactatggcttctggcaagtggcatatattcgttacaccattgctctttttagaaagctaagtcatcatgtgcatgtcgcgtgtaatctgctgaaataaggatggactatagaacacatttggtaaagattttcatcaaaatgatcaatgcttttttaaaagtttgggttttatggtcaacttctgtaattgtaaaaactcatgaactyataaataaggtcttattccctgawgtattataagtaatattttactkttgtcttccaaaagacttatttatcttcctatgtcaacatcctcatgtatgtaaaagaaaattcttgttggtttcttagatcatagaatattgctactgttttgtgtgctccattgatttttctatcaaaacaaagttaatttaattgtaataataatgaccattggatttgacagtgaatatcttaaaaattcaaagtaacagtgacttatgtaatgtgagagttcagtttttctctcatgtaaaagtttagataggtggttcaaggctgctgtggcacttcatgatgacaggaacccagactctttctatattgttgctctacgttgtataaccttgaacttgtggttcaagatgcactatgtatattacaaacaggagagaaaaaaaaatggatgaagaaaaggacaagtagaagtttccacaggacacctctgttatatcccgttggtcatcacttacatggccagtcaggcaagggaagctgggaggtagagtcatttttccagggagtcatatgctcagctataaatcagaaattctgttaccataaaagaagagaggagacaactgaaagcttctgccacaacataaagacaaatgtctgtttcacctggataatgtcatgtgatctgtatcagtgattcaattaagtattttaagaatgtcttagttctttttgtgctgctatattagaattcctgggtctgagtaacttaaaaagaacagaaatctatttctcacaattctggatcaaggccccagcaggtcaaggcctggtctctttgcttctaagatagcaccttgaattctatgtgctccagtagggaggaacagtgtgtcctcacatggtcgaagagcagtagaaagagaacccactcctgcaagctcctttcttaggggtattgatccattcatgcaggtggagcccttgtgacttaaacgctttccattaggcccccctcctaacactgttgcattaggaactcagtttccaacayatgaattttaggggacatatctagaccatagcaaagagcataatatatgtgttctaatgaacatatatgttagccacagctaatatgtgtttccttaaaagagagagagagaaaataaaggatggccttttaaggatttgtgtgatggttagtattaggtgttgacttgattcgattgaaggatgcctagatagctggtaaagaattgtttccaggcacaacagatgctggagaggatgtggagaaataggaacacttttacagtgttagtgggagtgtaaattagttcaaccattgtggaagacagtgtggcgattcctcaaggatctagaactagaaacaccatttgacccagcaatcccattactgggtatatacccaaaggattataaatcatgctactatcaagacacatgcacacgtatgtttattacagcactattcacaatagcaaagacttggaaccaacccaaatgtccatcaatgatagactggaataagaaaatgtggcacatatacaccatggaattctatgcagtcataaaaaaggatgtgttcatgtcctttgcagagacatggacgaagctggaaaccatcattctcagcaaaatatcacaaggacagaaaatcaaacaccgcgtgttctcactcataggtgggaattgaacaatgagatgacttggacacagggcagggaacatcacatactggggcctgccatggggtggagggctgggggagggatggcattaggagaaatacctgatgtaaatgacgagttgatgggggaagcaaaccaacatgtcacctgtatgcatatgtaacaaacctgcacgttgtgcacgtgtaccctagaacttaacatataatttttttaaaaattgaccaaaaaaaaaaaagaaaaagaaaagaattgtttcaaggcatgtctgtgagggtgttgccagaggatattgaaattcgagtcagtggactgggtgaagaagacccatcctcaatgtgggtaggcaccatccartctgctgcccccatggctagaacaaagcaaaccaaagaaattgggataaactggcttgctgagtcttctggcttccatctttctttcatgctggatgttttcattcctcctgcccttggacatcagactccaggttcttcagcctttggactcttagatttacaccagtggtttgccaggggctctcaggtcttcagccacagactgaagcctgcactgttggcttccctacttttgaggcttttggactcggactgtgccactactggcttctttcttcctcagcctgcacacggcctatccttggacttcatcttgtgatcatgtgagccaattctccctaataaactccctttcatatacacatagatcctattagttctgcccctctgaagaaccctaatacaatttgattcaaccatcttctgccagattctttaccactgtggacttttctctgagcatacccatggtgtattattgtaagagacttttaggatttcaaattgttttctgtggggagggcccttaagggcatcacatgggacaaagagaaaagaggccattaatgagaattctggggactcgtccttcttcttcaaccacattgggtcagctttatttgttttatgtatttggttactatagacaatttcatgtaatgaaagtaccctgcttaaaagaaaatgtaactttgaaaacacagatttttcagttttcattattttacagatgagaaaattaaagtctgacttaattattcttgtgtattcactatgtttaggtaaaacatttatctattcacagcaaagcacatagatatatgtaggacacagtccttgactttaagagttttgtagcctgatgatgaaggttagtaaccagttcaaagccctaggactggttagtcttttgtgttgattggcagtgacttggattatcttataacagaaatcacagactattgtttccaaaagctaagaggaaatcactgaaggatgggataggagattcagtctattattttaaattatagaacaatttacactctacaaaatgcactgtgtcaattctaaaagcttcgacagttacatacactcatgtaactactaccccaaccaaaatgtagaacatttccagaaagttcccttatctctttttctagtcagtacctccccattccaaagataacctcttctgatttttatcgccatagattaatctttctttttgctggatttcatataaatggaatcatataatacatacttttctatggccagctccttttggtaaatatggtgttttgtttcgagactcatccatgtggttgtgtgactcagtagctctcttttcatttctgagtctgccactatgtgagaccccatggtttattctagtcactgtcaaaggacatttgcttgtttccaggtttgggttaacatgagtaaggctgtgatgttagatgcttgtacgagtctatgttgctctgtgtgtgtgtgtattttcatttttcttggaccaacaccttggagtgaaagtgctgagtcatagtttaactatatgtttaacgtaataagaaattccagggctgcgcgctgcggctcttgcctgtaatcccggaactacgggaggccaaggcaggcggatcttttgaggtcaggagttgcagaccagcctggccaacatggtgagactctgtctctactaaaaattcaaaaattagscgggtgtggtggcaaatgcctgtaatcctagctacttggaaggctgaagcaggagtatcacttgaacctgggaggcagagtttgcagtgagyggagatcgcaccactgcactccagcctgagcgaccgagtgaaactctgtwtcaaaaaaaaaaagaaagaaattccaaaaccgttttcaaagtggttgttttatatttccaccaatgatatatgagagcgtttgttaatctttatcctcaccgacatttagtattatcatagtggctaaaatgtgaaatcaagtgaaaktgtatcttgtgattttaacttgtattttccctgttattaatgatgttgaccatcgttttatataattattggccacttatacgtcttgttttgtgaatagcctgttcaaggtttttgcttatatttaactggtgtgtttatgtctgtattaytaatgtgtcctttatattagctctttataagctctgagattacttattttacaattatatgtattactaatattttcccaagtctgtggcttgcatagtcatattttagtgtttttgatgagctctaatgttcattgaaattcaatttatacattcctttatgtgggattagagccttctgtgtccttacaagaaggaagttctacctgttccaaggttataaagaagttcccatttgctttctgtattgagtgagatatttatattcagtttttcaagcaacatttgctacagagagcctctgtctcttattgagtttccttgtcaattgctcagttcatttttttccttacccactttattgagaataatttgtgtaaatagactttctctatttgaagggtacaatttaaggagttctgacaagtacataacaacgtaaagccaccagcacagtcatgataaagaacatttccataccctctatatttgtctgctaggactgccatgacaaaataccccagactggaaagcgtaaacaatagaaatgtattttctcacatttctggcagctagaagtcgagatcaacgtgtgtcagcaggcttggtgttttccaaggcccctgtccttggcttgcagatggtcaccttctccccatattttcacatggcctttcgtctgyttttaaggacatcagtcatattggattgggactcaccctaatgacctcattttaacttaattwcctctgtcaagacctatctccaaatgcattcacattctgaggaactgggggttagtacttaaacataaattttgaggggatgcagttcagcccataacccccaaaataacccttatgtgtttatgtggcttgttcccactctgtgctcccagccccaagcgacctctgcatttcatatacatggaatcatgccacatattccatgtttggcttctttcactcaggctgattttgagaattgttaatgttgttgcatttataggtaacaggacactgcttattcttgagtggtcatccactgaatagtcatactacatcttgtctatccagtcagatgaaatatttcatagatatgtgggtgccctccagtttacatttgctatgaataaaattgttaggagcacttgcctgcaacattctgtgtggatatattttcatttatctcacatgactacctaagagtagaataactgagtcatatgttacttttatgtttactttaaaaaaagaatgcctagtagatttcagcagtgactatactattttccatttgcaccaacagtgtgtatattccagttgtcttccaacttgcctgtcttttacatgggcattttcaaaaatcttactcattttaatggatgtgattggttcatttgtaataccatttttttgtagctactatagaaagtctacaagaaaagcgattattctcccttttttataactgcagtctcagggtttaagagcaacaataaatacttggtaagtggatgaatattttggtttaacgaatttttttcgttctttttcctggttactatttaatgattgcatttattatgctgctgctctaaccacggcactgtgcttggctttgtgacagtgtaggatctttaaatcaaatgaaggaagatggatgctcagaacagtgtcagtgtctactatatgacagagggcgatacatgctttagaagagttataaacagcatgctgtagaaagtgacatgatcctggggagggctggataatagggaaattgagaaaaaggataaattcagaaacccactgggccgtgggtccaggtcccttggaaagggcttcttactgctcagtttttactaaaccaaaaataaccctcttcaggcagttctattttgagaaataagaaataatacttgtaacagttgccatttttttaactctctatgtgccagcaactgtgtaaaggcgtttgttgtgttgcctttgcacagtgttgtttgtatttgtgttgtttcatttaatcttcatgcacactctgtgaagtaggtatttaattccttacttttcagatgaagagtactaagtttggaatgggtccatgcaactagctcgggaacatatagctagtcattggtagaaatgaaatacaacaggtttgtgaacttcaaagctccttctttgtatcattttgttgcagacacagatagaaaaacatcaagggaggactcaagcttctgggtacagctttttcaagatagttttgctgttgttgtattatgtccttagtatgatttacaaaattattttagtccctgacacttaattatgtggcttaaatgtttgtggattattcaagagaatatttgaaatccttcatattcgatgacaagatgagataatagggtaagtatagtttaagtaaaattactattaaataacatttttcaaaaactgtaaatgccatggttttctattaacattttggaaaatagaattagcaatttattttaagcatcaatgcatatactcacatatgatgagcagattatagcatttatttagataactcaagaaaaatagttattttgttttgtcagtctggrctgtgtctgaataatatttggatatgaaatagtcagttacatacttcaattttccacttttctgggcattgaaagacatagccaaaatggctttcagattatgagttctagaacttttgaaaataaattttaaaacccacatgttacagattttatcaatgctttccctctgtggggtcatttttctgtatttctgatttacatgcatcatatagacgtgtttagrtaatatttgcttcacgcttttctatagacagtaacattagtcaggaccagtcctcaaatgccatctctagttgtcattttccacttactgatgcaaacaatttgatgaatcccaggattcaattgctgcttctctatcaccgtcttctcggaattctcaggtcaacagcactaaggttttcattgtaatttctcacttgagacccaggacatacctactcatacaaacatatgcgattatatgttagccaaagtgctgccacaatattaaaaataaaagagtacttttcagtatgagtttggaaaatttaatttgctgtagatcaggggttggcaagttttttctataaagggcccgacagtaaacgtgataggctgtgtggttcatgaggtctgtgttgcaacagctcattgtagcatacaagcaaccatgctttatgtggctatatgccaataaaactttatggacaatgaattttaaatttctcatagttttcatgtgtcacgaaacattcttctttttgtgcttttcaactattaacaaacatgaaaacatttcttagcacagagtctgtataaggtgggatttggccagcagcccatggtttcctcaccctgctagtgttgctaaaataatttatatatttttcttggttatcgtcattactaggcaaaaaaaaagagaacgttctctaaaaaccagccaaatttttcctattagactatgtgacattttattcagatatctttctctaattcggtagatttgagggatgaaatagtggttttgcttctctaattgacgtattatcatccatagctcccttctactgccatgcatttttgcagtcctttttaatctgaagacctttcttgctactatttaaaaactattaactataattgttttggccatgcaactcttaaaacactgtgttcaatgattaggcaattaaagttttatgttttccaaaatttgacaggagcacagttaaatctgctttgtaagggtataaattcacttggacagttgtttctgctttcaggatagccatagcattcacactattagtgtgagcagctgcataaactaacatatctattttactgtgttaaagtcccagattcaaaagaattccattcagttttactacttacaccattgtgttatggtttgaaatcaagaagaatgtgtgaatgagttttctataatgtctctgtagaacacgaatttgtcagataacatagtacctgatgtggcaattacgggaattgttccataaatattttagttgctattagggcagtaaaaatttaaatatgaaaaaataaacatctgtgatatgcacagaaaagtctcactgaattctagactttgaggtaagaagtcttactctgtgaagcaaaatataactgggccctaattcctgcatttaattattggtgctacttcttttttttttttttttttttcttgttgaggcagagtctcactctgtcgcccaggctggagtgcagtggtgtgatctcggcccactgcaatctctgcctccctggctcaagcgattctcctccctcagcctcccaagtagctgagattacaggcacccgccaccatgcccagctaatttttgtgttttattaaagacaaggtttcaccatgttggccagggtggtcttgaactcctgaccttaggtgatccatcctcctcagccacccaaagtgctgggattccaggcatgagccaccatgcccggcctattagtgctccttcttggctgttgccacgtaggtgtgttattgaccattgcatgtgtcatgagtcagtcagaaaaaacttccagagaagagaagcaatgttgtcccatttagttaatggttaaccacagcgaaatggatttcttttaaacgcagggacttttcggtgcctcaagcacagtgtggttcactgggaattgccaccagccacagtatgagagccagagcttggcacaggcatctggccagagatcaccttgtccctggaggcgagatgacctaccatcccagggagcacggctcctgttagagctgtcagtcaggttacatcacaaggcccgacaattacctaattatcccctgactcgtttcagaatgatgtgacaaccttgcagggatacatgcagatgaaaaccaggaaaaattaaattagatgaggaaagggatcaaaggaaagtaatatgaagccaagggtaattttggtaaacgaagtgtgtattatgatttatgtaaaattgcaagagctggtccacaaatttgactctaaagttttcctaattgtctaaaaaagagagaaatctgatttgtagtgtccgtaaaggtagaacaaatcacaacctacagagaaacagacattaaaacaaacaaaggggcaagatgtgccctctgggttcccctcaaaggatttgcaatttgccatgtaatttgtacattacatatatatttaataatcataattaaaatcctctgttgaatatgggaattcaatataataaaatagacatgctaatttatccacactactcacactattagtatgaatgttatgactatccagaaaatagaaacaaatgtcccagtgaatctatgccattacaaagcacgtttaactttgctcctgtcatattttagaaaatataaaacctaaattgcctaatcgtcgtacacagtgttccagaagttgcatggctaaagcaactatagttcaaagtttttgtataggagtaagaaaggtcctcacgttaaaaagtgtattcattgtagcagactgcattctagccacatttatctccactgaatttctcactttaagccagaaaaatgaggctgatgaacgtgatcaaggtcgtaggtatcatttcttttcctctcttttatttctatacatttgtaacttttatcgagtgaatatatgctcatgtttaaaaatcaaaggtgcagacaaccttctaataaaaacagcttggcaggtcagggaattcatcagcacttttctgttttctctccagcctcacttctgccttccaagtcctcacatttctgtttttgcttttatattgtccaagctgaataacatatatatttggttacataatcataattaacatcctctgttcagttttaacagtgttactctaaagttgaaaatcacataagtgcttccattatcgtgaacacagtgggatgtgcaaagaaaatgaaacggcttgttctttgtgactggtgtgatattaatgatgagccccgaccctcctatgtgcctgggagaacattgccttgatcaccaatcctatgtcgtcatgtcctgggcccccaagaccacctcccccctccagattcagtgattcaccaggagagcctgcaggacttgctgtcctgtcacacacatagctaagattcactacaacaaaaggatatgaagcgaggggaaaaggcccagggggaggagtttagaggaaaccgcaggcaaggctctgagtcctcccccagtggtcactcgagaggcactcagttgtgacaacgcgtgtgaagtgttgtctgccaggaagctcaatggagagtcagtgcccagcgattttagtgggaactggtcatgcagacacctctgcctggggcttatcaaaattccagccttgccgagggtgagaagatgttgtgcatagccatggtttgtgcagacagttcaggctctgcacaccacccgtagcagtaagggaatgatgtggacgcttccaaaattcacattcccagatgccagccaagggccaagcttgaaagcaggcttttcaaaccatcgcagcttcagtcctgctagaactcttctgcaaatttacctccatattaagcggtggcctttggattaatgatcggtggatcccagatgcagctccttttgaagtctggggtaaagagcctccgtcaaaaggctcagtctctttcaggtacggctcaggcctggagaactgctctgcgtccccgacttttctctagaatagtgcgtgtgtgcatgcatgagtgtgtgagtgtatgtagtatgtgtatgcctgtgtgctgtgtggtattgtgtgtgtgtgcgtgtgtgcgtggtgtgtttatgcatgtgtggtgtgtcttggtgtgcatgtatgtgtttggatgtatgtgtgtggggtgtgttaggcgtgtggggtgtgagggatacatgtgcacatgtacatatgtggtgtgtttatgcatgtgtggtgtgttttggtgtgcgtgcgtgtgtggtgtgtcttggtgtgcgtgcatgcatgtgggtatatgtgtgtggggtgtgtgaggtgtgtgggatgtgtgtgcacgtgtatgtatgtggtgtgtttatgcatgtgtggtgtgtggcatgctgtgtgcgtgcatgcctgtgtgcgtgcatgcctgagtgtgtgtggtatgtgcatgtatatgtgagtgtgtggcatgcatgtgtgtgtgcacacatgtaatggtaaaggagggagggagggagcactcctgcagactggcaggggtggctgtgaacccctgcccacctcccacggcattttcctcagcatctgctacaaagtgccagggcggctctacactggttcctgaagcagagatgggccttgtgatgaccgatttagctcctacaacttaaacactagctgggtccaaacgtcgtcggtagtaaaatcaccacagcctctgcccctgagtcctaaccttctgccttgcactgggcagtggcctcataccacgtctcctggaagctctgtcaatcccctccagcccttgatgccaccctccctcctcctcctttctgtgtcacagctggggagacaacccacctcttactccgcccctcccgtggccacctcactgctccacccacggtgaggaggtccaggctgccacctggggctttcctcaggcatctgatcatttcctgaaccctgagccctcacagacatacaagccaactttccaacttgcatctccccaagccactttttcccattctcccatttaattgataattaggtcaggcacagaattttaggttgaaattgaaggtattgctgcaagttaaacattctattttgatttttgtttccaagtagatggtctgaactttctgtttagaagatttgaggatctggaaatttgctgctcctgatcccctgtgccctctcccctatctgccttttgcttttgattttttgtttctttatttgtttgttttttgagatggagtcttgctatgtcacccagactggagtgcagtggcacaatctcggctcactgccacctctgcctcctgcattcaagcgattctcctaccttggcctcctgagtagttgtgattacargcgcgtgccaccacacccagctaatttttgtatttttagtacagacagggtttcgccatgttagtcagactggtcttgaactcctgacctcaggtgatccgcccccttcaacctcccaaagtgctgggattataggaatgagccaccgtgcacagcccgatttcttaaaatttagtcaaaaagttatgaaccagttgaatgcttgtgatgctttttactggtttgctttccaagaggaatgcaataattgacactgatatttcattttaaatgatcttctctaatttaaaagaagtgttgcttttattgaatttttatttctttgatgcctagggaagcttgctgcgcaccccctcgatgccaggccctcctctaggtgctgggatgcctcagggaacagagcagaccaagttggcttttgtgtagctgtggtgactagggacagacagcccttgctctgtgctgggccactgcatggtggggttgggtggggatggtagtaataattattatgaagcaaaggaagcctgaaagggcagacacagaagtggagcaaagtcagggatggcctttctagtaaggtgcatttaacctcagccgtagggggaggctataagtggaaaacgaacaggttgggagcaaaatgtcaaatatcgtctttgtatgttgatgaacatagttttgacctagcacatcccttgaaagggtcacggggacccccagagtctgcagaccacactttgaaaatcattggactacacactaatttcactattattttataacataagtggaaacatgtcttaaggagtacatttctattataactcatataagcatatattgttgttttttcccaaagggtccatcttgctgggatgatgttttaattccaaaccggatgagtggtgaatgccaatccccacactgccctgggactagtgcagtaagtacctggtcacattcattcctcttattgcaagaaaatgatgacatcttcactgtttgccaggaaattagagacaaaatgtcaactgactgttcttccatctaataatgtttgccaaaagtgttatgatatttaaataggttaattacattcaccaaaattccaacctgtgcccctgcctttcagggtcactttcctagtgacttaatcatttggggggaccgtgyggaaatgtgccaatttaaactcattgcaaagttatatccatagaaggaaaaggagaggtgagaaaaggagagccagtgcagagcctccaaaagaaaaattacagaagcatgagattcaccttctctcctgctccagtgatattttatatttatattccccatcattcaaaattgatttttttttctgctttatctacttctacctttctttagtaattttctgacatagtggactattacaaaatatagtatgggtggccggcgatgtaattgaattaccatcctctgttctttgtaatcctttctctctttgcacatatatgccatatgtttcatagaccgcagatatttcctgaaagaacccctaagctctgaatttatttttaagttaattttgttattatggtcatgcttcacatgtatattgttgtatttttttaacctcaaaactcgctggctccgtcgtaatctaactgtatacatttcctgagttgtaaatactgttatgctgccagcacaaatgtcagccttagttcccaaactgtcagagccagctggcagttaataccttctctcaggaacagagtctgtcaacagcaacaggtacagcgtttgagcgagaatcatgagaggagctttctcttgccaatctgctggctgatcggaaggataccaggatggcagtgggcaacaataaacagtcactctccaccagcctagggctagggactacgaacagatttttattcatccaaatcctgaagaaagataatgacttgtatgtcactcacagatttttgaggtatcacacagtcttgccagtttcctaccaggatgaaattagagtgcgtatttcatagggcagaattcttaagtgtaattacatacgtttacatgtatacaaatgtaatatgtatatattatagcatacataatatgtagatataattgcatctaataatataattatatatacatctatgtttccatatatacatatgtgttatacatatatacatacatagaatcttgcccctataaacttgtaagtacaaaccgatgggtttatgcttacaagtttttagggtcaacattctatgtatgtatatggtatacatatatacaacattatgtgtataatgttagagttatatctataactcaaacctgagtttggggccaatattcactcttcctgtgcggcacagaaagtcctgggtctagaatgttgtttaatgtagtcagtcatgagttgtagtcctgggtactgggctgagagtagcccaaatcctctaggagccctgtactttcaaaggagtcctgaaataattttctcagtgtttcaaggaacataaattaacaatcagaaaaatcacaacatatatgtggaaacaagccatggtgaataagagtgagcagaattcaaaacagtaaagaacatagaaattgaaatcatcaaggatagagtataaggatgcttaatatgtttaaaaaataaaagattaaaaaaacaaaacaaaacrattggaaatatccagtcaaattaaacaagcacacacacacctgaaattctagaattatatataaattataataattgacacaaagtttactaaatgggctgaacagcagataagacataggtaaaaagagaaaatagaacttagatctgaaattygacctgaaaaaaattatcctaaatgcagccagaacataatagatttaaaaaataaaagagaacttaaaaaacatggaggatagagtttgataatacagtcattcctgtctacggccataccaccctgaacgtgcccgatctcatctaataacacagtcattcctggtatctttgggggatttgttctagggcaacttctgcccactttggataccacagtccacaaataaggggactcataggctgtttgaagccatcacagctgtcacatagagactttaaaatccatgggacaaggaagccttgcccagaagcttccagctgacaccccttgggtccccttgtccagattaggccagttctgtgcacaggacagtctggatttgctccagggtagtgtgggtgacactagaggctgcgttctttgatcatgtgggggcggcagctgccccaccaggatggagaggaaggaaggcttcttcccatcagccctgggggtgacaactcaccctgggttccagggaaggtcagaaagtccatcatcgcccccgaaggcctcacaactctgtggcccttggcatgggtgctctggacatggggttgcatcatgaccgaagcctttctcacaaaggccacgctcctgctcgcctctcaggcaggaacacattgttcctgaacgaggatgcggaggcgcgtgcacagcagccctaagaccatctctgatgtgcactcccgagggtgtacctgcggcrgaaagtcccccacgctggctttgctcatgaggcccgttagcctgtgaagttccgggtgacaaatgaagcttcttcacacattrcactcaccgggcatctctccagtgtgagcattcgggatgcttaaggcctgagygtggctgaagaatctcgcatagacggcctctcctgggtgtgaattctcygtgctgagtgagtgggaactttctcagcctggcttccccaacaaatcccttctgcagtgtggactttggaattctgaaggaggcgacagctttggctccaggtttcctcatcttccctgcactgaaaagacctttctttgcataggagatcctggtgccaaatggggggaattttggatgctttcttgtcattgcagcacttgtaggacgtgtgtggttcctcacactcctaacacatatgggacytgcctcrtgaattttctggcagtaaataatggctgctgcttctccaggcctttccgaacaccatgtgtttataggttcagagctgggcctccctgtcttggctggattcgagtccttgctgttcagtaccctggcttctcatcaactccagctgtgtggccacggtgattggggggaggtgggagtggcctcaagtcccagcgagggctcgagttcaaaggtcttcagtgctccgcatggaccacgctcctctgggcctggtaggaagccccttctccaggagagacagccagtcatgtcctcaaaggtcatggtccctgtgccaaggtcattatcttccccgcccttattggaacctcaggcttgggacctcctgggaagcaattcctggaccagtcacttggtcagtctagtcattgtcaacattaaaccctcaaagttagaggtgaacctacattgtctagtataaccattcaagggatagaactgaaatacaaaatgccaaattgagagatgaaaaaaaaaagagagggggtgaaatataggaaaatgggacaacttaagtagtgcacacaaaaatggcacaagtaaaacctcatgtaacagaaatgaaaagaaatggaaatgcactaactgaaatgtgaaagacaatgactcttagactgggttaaaggaacagaatctggctttatgcaggttacaaaagacatacctaaaacatgtgagcagaaaaacatcgaaagtaaaagaatggaaagtaataatccaggcaagtattaactcaagaatgctgttgataccattttaattgcacataaartagattttcaggagagggtggaaacattactaaaaaaggagacatgcgaggttttgaggaaaaatatgttcagcatcccaggaaaaggagacttttgaggttttgaggattagaaaagtttagtaacgcaggaagataaagcagtttaaaatggtatgatcttagtaacacggattcaaaatgtactaaggaaacattgtcagaattaacaaaatatgtggataaatttaacaccatggtggkagagagagtaacacagctctctgtggagytgagggctcctgcagtacaagcttaggaaggacgcgtccgattcrtaccaccagtgagcccacgacatcaggagagagtcactcggcaactggaggatatcaacaactggtcgtgttttaggacattaagaaatttaactatcaatagcaaaaatataactctaaaaatctgttacacgtggacattcaaatcactgagtcaatgttaagatctaaatggaaataagggaacaaacaacaatgaaagggtaccacatagcagatatttggagtgtagctaaatttgtatttaaacagggaattaaggatcataaatacccaaagatattcttatcaaggtaggaaaaggaagcatcatatccaactatattttttcttctgtatttaataaacaccaactaaatgcctgttaagtgaagggactgaaggtttgagcactaaccatgacaatagctagctcaagttaagtgttcagtgtgagctcaactctttcactctctcttaaaaccatttttctggattgcattttcacaatgcagctaaatataaactctgactcctgtattttctaaagtcaaggttttgacagtattttggaccctatatataatttattttatatattttaagtttattaaaattttgaatttctatcacttagacaaaatatccatgtacttagaacttaaaatagcagtgttcctaatatattcttaattaattaatatttatacccttaaagataatcttagtagatagttttaaatagcagtaaagtttacccttggtttttaagagtacaaatacaaacttgaccctaactctcctttagacagagaaacctgaacctaattcagctttatgctaatcgctgttattttaggagggagcatactattagttcttacctttttataaaaagaattccggtcagctcaaaggatatatgcttgagattaaaaaggggatgaaatcaattaggattttctccgttagtgaaattaactcaactttggatatggcataagactttagttattctgtgtcgatcttcattttataatttacctatgataccttaaaccaagcttgttcaacccacggcaccgtatgcagcccaggatagctttgaatgtggcccaacrcaaatttgtaaactctcttatgagatttttttttttttttttagttcatcagctatttttagtgctagtgtattatatgtgtggcccaagacaattattcttcttcctatgtggcccagggaagccaaaagattggacacactggccttaaaaacttaaaacaataatttgtgtttgtatgtgtactgggggatgtgtgtttctcttacttgggcacacataggctaaggaaaaccctgaagtcctagtgcctgagcattatttctgagttccgaatcctaactsgtaacactgaggtccactgtcatccaacgctcccctccgagacctgtggtttcagtggtgcttttctggtaatgaggtgccccttagccaactgcaagaaccttgcctgttccctcacacctgacagtcacacagtagggtttaggatgggggtatttactcaaataaaaaagaaagaaaatttaagtgatctctttaaagtaataaatgaccaaggtcattttaaagaaattcttattgaggggtgttgatttcctattacacaagctataatattttttatatatcatctatttttgagaggcagaatttacctgaagtgttatgtaaaataacattttcttttttagattatttgattttgactggagttcaactcttatacatcaaacattttttttcttatcagaacaagtagcgtaacacctcttacaataactccaagatttatttcaaatgaaattagatacttaaaactatcccctgaactataataaataatgtaactattaaactcagtataataaatagagtgttttcatcttactcaacatgcaatctatttttcacactttccccctcttaggctcagtatatgccaactggaacgttagtttgaatgaaagttaatattcatggtctgcacctctgatttcatgttgttgagagatgttgactgaaacaaaattaatagcaaataagtctcctaatactgagcaattgtgatttatgtcagaagtcatttccgtattttatgtccaaaaagtttcttaataatgttttagtttgatcaaattactatcctccaaggaatctgtatttcttttgtctgtttttattgttgttttagacttcattagaatcacagaaaatgagactcagaatttctcaggatggtttcatgtgtgaactgtatgttttgggtttttttttttctggtgtctaataacaataaaaggttggtttgcttttgtttttaagaaatgctcttggattgaaaagtgtccctgagatagtcacaaatgacggtcttcatttgcacagcatgagagccgtgggctccatattcttgtgttgcccatgctcgtctgcactgtacaataactatcagcacaagcatctccaaatatatatttaagcaattccagcctttgtggctttgaggggtcccactgtggtcaaagagcagctggacacttaaatgtagagagtggaaaatgaaaacagaggtaaaggacaaatggactcattcactccccttttccttctgccctggtgtttggctgaagagaaatgctctgcctgcccttacgttggtccccacagtcatgttttcttaattctaaacaaaattgaattgtgaaaactttgaagtcaaactcagattatgattgaatggtgtctaagcgtgacaaagtgttctctgttgtctgacatgcaatttggggtgacaaactagaaagttttcttagaacatttttcaaaaacccaatccagcattcagactcaaggacagcttatttctaaaccaagttttgaatacttgataacaaaaaawttcttgttttttttttttaattgttaaggttaaaattagaagatagatttttattacagaattagcttaaattttgcaaatttgaatcaaaatttcgtttrtatatgaaaacgcattagtttcccatggaaaaaagtgtcaatgatggtatgaaccctaagcttaatttaattctcctttttctgtgagataaccatgacataacttctttttcatcagggctcttttataacctggtggaaaattgaattaacagccatcttcttcatggtagtgttaaagattccttgtaaactgctacatgaaaaaataatctccagaggaagaaaaccaggtgccagaaccagtgcggctgtagcagagaatctgcacgtgtgaaataacagtgttcacactgctatcacagaacatgaccttggtttagtctatgacgccatctttccagcaatatgcagcttccaaaatacatacttcttgcttccctgttctaggaaactcctagtcaaggtgaatgtcagctgttttttacacttgatgatctgcgatcttctgttctatagtttgtatcgcactttatgtgcagtagaacaaaatcatgcatattactacaacatattcaaatatgaggaattttataccggtttataaaccccagaggcttcaaaagtcttacttcgttttttgcctttccatagaatgattcaaaagccaaacgtgtcagtccgaggctgtgttgatggttgcattgcaggtttagacaaaggccctgaaaacaaagaaacaacaaagcacttwatcacaattactcagaaagaggtgtgcttctagaccactaggttttagattaggagagagtacatatcgatctactggaaaagatagtaatagatacaaaaaagataatttcaaatagatttataaatgagattctgagaactagagcaaagaaagattaaataccgctgtaagctttcccaaatgtttcaatcgagatggtacattagacccaaatggaaatatcaaggattagagatgggaggtcactctgagatagcctcagtgcagatacacaggagcctaatggagtgagaagaatagaaggaagacgtgagagtaatgggccaagagattgaggcctgcttctcggccgggaaacagccctcctagtccttccagcaggtgattgatggctcccagggacccgcacttcatcatgccttgatggcggtcattaaggagctatcatctgtcttactcaggtcaagctagctctcaaaaagttatcaagagccacagtaaaatttagtttttaagatatatgtggcaaaaatcccttaaagccagtttaccaaacttgagatttagaatggaaattataagcatatggagaatcaaatcacaactgagacgatgtcacgtactgttgacccacatgtggtgaaacactcccttccactaatgtttcttggagaaaggaacatagtttgggatcttcggatcatctgagcttcctcaagtaggcagtcatcattccccttaatactcagggtttgggaaaataacttcagtggtgatcatcttacgcaagtattatttacaaggtacagagaaaatgtttatgtttcaagagtggaaaagcaaaagatcgtttttaaaatttgcatctttccattgaaagaaatgtagataacttttataacacattgatttgttgtgctagtcactatgcagaaaacaaagactgactttcaggatgtaggaatctagccgagtagagaagacttcacaaaaatggctgcaattcagattccgcagagcaagtaaaaagcttaccaagcatctcttctgtgccaagcactaagatagaaaaacgagtattgaattcactgctttcacagtttgggaaaaattggggatggagtgagacgtgtaggcaaacgatgatttttatgccatgacctaaatgctaataagattggatgtgaaggaccatgcaaggacttccctctgtgaatagggcagaggaaataacacaagttagtatatcatgagtgatgtgaaacacgcatagaaagtgcttatggagttcagaaaacacaaaggtgatcaaagaggacttcatggaggtgaggcccaagggaagagtggtgggattttcacaggtggtgatgttggcatggttgggaacattttgtgaggtacaggaaatgacaggaataaaggaatagaaaattaaggttcatgcattccataatcctactggccacttgctctgtgccagactgcccactcagctccagtgtataaaatcaacattccctgctttgatggagctctatccagtcctcatgactttgaacttgtcaagaaggaagatgagatagaaaagcagaggatgttaagaggacatgaaacagggcggctgcctggaatctacgctgggaaattagacgttgagctgaaatgcagaggctgagctagacttgatgactaggggttgaggacatgcctagcagggaggagctcctgcaggagccccgtggcagcagggaactgctctgggaagcacctgggaggtggtgatggctgagaaacaggaggtggtgcattacttccttttcgtttgttcgttcctgtagaagttcattagcgtaataggcgtaatctcagcatgttgaagtttaggtgtttcaaaggctgagacagcagttgcgaagtctgtagtatggttgtggtggagtgatggcataaagaacaaaaagagtaaaagagaatcttgaagggaacaaaaacaaaagattattttgtacaattttttctgccttccttgaatccctggcaaagtgtgaataaaggtaaattagaattggcatttttgtcttccctaaaactcagaacacaacatacaaatgagatgttcgtttagaactgggtagaagtgccactcttttcttgtatttattgggttattaagatcagccatctggtggtcttctgtcttgactgttcgtgtttctccagggtgttcctcagtgggaatctgcttagtggttgactgaaattctatctttatcagcaactctgttatctataatcgctagaaatggatgatccagtatgaagattttcctgcctttctcttcctgctgcttccttcttgtcaatcttcctagaaaactgaggacccttttctgttgccgttaccttttcaaaatattagaggggagacaaaatgggttactatgtaaagtgaactttgagactatctgagacttcatcctttccaaaggacaattgagtcaatagcaactacatgctggacagtttgagaaactggattgagagtttgggattctgtctgtaactccttctccttctatgtccatggccattggcctctgttcatctccatttgtccatttgtgaagcaagactgcacatcagtgaattttgaaatttcactgatcatttatgcagacacaggattcaatgaagcttccttggctttcaaaactgaaggatgttctgttgggtttatctaactgtgtatatatggagatttttcttattcaaaaaccttattcaaaaacatctatatttttctggatcccagcattgtsattttttcctcagggttattgatatggtttggctatatccccacccaaatctcagcttgaattgtgtctcccaaaattcccatgtgttgctggagggacccagaaggaggtcattgaatcatgttggctggtctttcccatgctattctcatgacagtgaataagtctcacgagatctgatgggtttatcaggggtttctgcttttgcttcttcctcatttttctcttgccactgccatgtaagaagtgcttttcacctcccgccatgattatgaggcctccccagtcatgtggaactgtaagtccaatgaagcctctttttcttcctgtttttgggtatgtctttttcagcagcatgcaaatggactaatgtagttatctaacttactaatttcttacctgccttataaaaatgaactattttaacaatcaaagaaccatttctccatgtgcttctaccattttattaaaacttatactgatgttcacaagaattataagtgccattaagtaattttatattaagcaattaaaactcatattacctagcacaatgtacaatatatgaagacactttagagaatcaattctaatttggtatttaatagtgagtagtattaattattataaggcctgcatttaaatgtggatattttattgatagaacaatgaaaatattttaaatgcattcaatgcttaaaagggctatggttcagccaggcacagtggaccatgcctataaccccaccattttgggaggccaaggcagtagtattgtttgagcccaggagtttgagaccagcctaggcaacattatgagaccccatctctatgaaaaataaaaaaaaaaaattagctgggtacatgcctgtaatctcagctatttgggaggctgaggtgggaggattgctttagccccggaggtggagtttgcagtgggctgagattggccactgcactccagcctgggtaacagagcaagactgtgtctcataaataaggactatggttcagtcatgaaccatagtcagtgcatttttctccatttatgtttgcttttatttcaataaaataaatgtttgtttcatttatgttattataattcttgtgaacatcttgtgaatgtattctccatttatatttgcttttatttgaatgaatttatttcattcaaataaaagcaaatataaatggagaagaatgcattgatgcattgtgaggttcattacagctgagtaattatggcctatggctccatgagaactaaatcacaaaactagaaatgtaaactatactgcatgggagtgaagcttgagagccttctcagcaaggccttgtgtttcctcctagggaacatgcaggatcaatagaactgttctaaacaagtggccactctaggataggatatgtcagccacacgtacgggactaaatgcacactgtaactgacagatcccaagaaagcaaataatagaaaggttacccaaaccagaagatacttaggagtctacaaagtcacaattgttacaatttaggggctataatccattaatactggttatcatgcactgtttaaattgtggttccttagaagccatgcaatgatatactgagaactatgggttagtctgatttcaccgcattttcttcccagtgatcacaactggagtacctcctgcaaattctgtcacagatacgacaggtggacctcaaaaaacaaagcaaagctaaactaaaccacagtaacaacctaaaccctttgaaatggtgagaaccaatctctgtttagaaagagagagaggtgggggaatgggtggggcctggaggcatttggagctttaagaggagctgaagaaatggaatgtctttactctctccatcaaatagtgctttgtggctaaagacatgttgaagagaatggccaccaagtggtaagaattgccatgagtccaaatgtttacaggttcaggaactaaattttagcaactcagttcttaaagagacgaactcatgagctatctaatacacagtagactatgaaccatgatgttcatttattggtttatactctgggaacagctccaattccayggtattcatttttattttttatttttttgagacagagtctcactctgtcacctaggctggagggcagtggtgcgatctcagctggtcgcaacccctgcctcctaggttcaagtgattctcctgcctcagcctcccgagtagctgggactacaggcgcataccatcatgctgggttaatttttgtatttttagtagagatgggatttcaccatgttggccaggctggtcttgaactcctgacctcaggtgatctacccacctcggcttcccaacgttccatggtattcatatcttccctctcagctgcatgactttccctcctgccctccactctgtccctgtctgattcttgttgtttttcttcctcactactgttctccttgggcagctccccactaacttgacctccctcaatgttaccaagctattcatccttgcgtggttctttaaaaatatgtctgcaggttcataaatacatcaaaaatgtggttctaggccaggcatggtggctcacccctgtaatcccagcactttgagaggccgaggtgggtggcacctgaggtcaggagttcaagaccagcctggccaacatggtgaaaccccgtctctacaaaaaaatacaaaaaaaaaaaaaaaaaaatagccgggcatggtggtgggcgcctgtatatcccagttacttgggagtctgaggcacaagaatcgcttgaacctgagaggcagaggtggcagtgagccaagaccgtgccattgcactccagcctggacaacaagaaagaaactccatttcaaaaaaaaaaaaaaaagtggttctaatttccctccccacagacctaggtcagacttagtgacttgtttctaagaacagaaaacagtagaacttatgctgttacttctgaagctaaatcataaaaggcaaagtagcatctaacttcctcttttgttgacctgtacactagcagcccccaaacaacattgtaaatgcccaggtttcctaccgcttctgtgctggagagaccagagggaaaggcacatggaaatggagagagatggctaaggaacccaggtgtaccagctcccagcagtttgagtctttgcatcgacaaccatcgtgtttgagaacaagtgagctttcagacaattccacctcccagcttttaaacctcctcagctgttgtcaagcagagcagaggcaagcagtgcccaccaaatgctgctttaatttaatcctgtttaaatttaccagtaaaattaatttttaagaactaaaaaatatttaatccactaacatttggggtggtttgttgaatagcagtagatgacgggcataccttccacagtgttctctgtgatcatgctgttatacagaagactatacacactttgatatatacatctgtctgtctgtctgtttgtgtgcatatgtgtgtgtacgtcatagttttattgaaagggggctcaaattagcaacagacaatgataattgtttagtctgtgttgctataaaggaatacctaaggttgagtacttactttataaggaaaagaggcttatctagttcacagtcctgcaggcagtacaagaagcatggcgctggcatctgcttctgggggagggcctgaggccgctgccactcatggtggaaggtgaagaggagtcttctgggcagaggtcccatggggaaaggggaaacaagagagagagaaggaggtgccaggctcctttcaacaaccagttctcaggagaaccaacaatgagaartcattcactcccttgagaatggcactaagccattcatgagggagctgccctcaggatccaaacacgtcccaccagaccccacctccaacaatggggatctaattcaacagaagacttggtggggccgaatgaaccatatccaaaccatagcaatgatcaaagcatccgaagtagagttatgtgatcttgaaagagagttcattcaggcagggctagaattatttctatatttaaagtatatctttgcattgaatggtgtcagacaaacagtagcaagcacttttttttttttttgtgagatggagtctcgctctgtcgcccaggctggagtgcagtggcgcgatctctgctcactgcaagctgcgcctcctgggttcacgccattctcctgcctcagcctccagagtcgctgggactacaggcgtccgccaccacgcctggctcattttttgtatttttttagtagagacggggtttcacactgttagccaggatggtctcgatctcctgacctcatgatccacccgcctcagcctcccaaagtgttgggattacaggcgtgaaccaccgcgcccggccagcaaggactttcaagtcaactccacctcttgctggttactaattgcacaacttggtcatgcccaaggcattgaaatgaagttatatatctatcaaatgtgatcctatcatgtctacctgaggttataccctggtctcttagrtttctaagtacatatttttcaagtcaacatcagtgacatatttacaaatgattttatctgatggtttatttttctgtagttttcctctaaaagagacraagcttagtatgtagcctagtagacaatagctcagacagtagagaaacttgatttgaacttttgttatgatacttacaggctggtggccccaratgaaacctttgcaaccctaggagcttccatattttgatacagatgtataggtgactattatacacagctgttttaagcattatctgataaagggtataaagtgcttacttcagagcctgtcattgtaagggatcaataaattgtagttattatgaccatagttgttataatgtgttgacttttactaggtttgatttcagaaggtggcattctccagccttttccacaaagactacaatcaatttgccataattcctacacagtcaattgccgtttctacaaataacatgtattcaaattaagtggctctgacaataactttgtaccaaactgtaacatttgtaattttcttaaataaaaatgtacttaatttgcattttatataacagattattatgacatagataataatctataccagttgatctggaggaaaaaataacatggtcataatggcttaggaaaagttttattattggtttctattttttttttcagaactgtgtgccagtatgattattaccagaataccacacatttttaaatgtcatactagatgtgtaatttaaaactattatacctcattttcattgaattattttcataataaatgttgcattttctgattataaaaacataatgttggctgaaaaaaaaattagccaacgtactttcacctaaagaggagggtaaggccggatgtagtggctcatgcctgtaatcccagcactttgggaggctgaggcgggtggatcacgaggtcaagagattgagaccatcctggccaacatggtgaaaccctgtctctactaaaaatacaaaagctagctgggtgtggtggcgtgtgcctgtagtcccagctactcaggaggctgaggcaggagaattgcttgaacccaggaggcaggggttgcagtgagccgagatcacgccactgcactccagcctggtgacagagcaagactccgtctcaaaaccaaaaaaaaaaaaaaagcagagggtaaaacctcttgaatcaaaccgcctggagataatcactattaacactgggtgcatattcttccaagtctgttttccatgtgcgtgtgtgtgtgtgtacacatgaaaacacacggacacatacacatacacctgtttttgtgtctcacgtattattttataacttgcatcttttacttcatataatgtgctcattatccatatcaagagatacaggtctctatgagcacatttggtgatgcatcccatttattttgttgaagagtcttgcattgataagtttataggctgctctacatttcattataaaaacagcacattagtgatcttccttagacacatctctagtaatttgtctagtcacatttttgaaatataattttgggagtagagttgcaaagggcaaaatattttacatgtaatgtgttagagtccttagttccaaaaggtaccctggaaagtttccatcaatttccactttcccccaaactacatgtcagtatggttactttgcatcctctaacactgggtgcttttattctttttaatttttccaattatttaggtgaaacatgacatctcatgtaaaattgcctttctccaattactaggaagcttgaatacattttcattatttattgcttactattatggttattttcttttattataattgcacggtatagataaaagtttcttacagtaagtataagaaattatttcttatagtttgtttcttatgaccatttcatatattcttgtatgaaaccatttcttgtcatacatgytgaaaatatgtttaccagtaagtaatttaattttcaggtctttttaaggcgtttcaaaattatttcagatggccaggcgtggtggctcacgcctgtaatcccagcactttgggaggcccaggcagggggatcactggaggtcagaagctccagagaagtcaggccaacatggtgaaaccctgtctctactaaaaatacaaaaaattagccgagcgtggtggcaggtgcctgtaatcccagctactcgggagggtgaggcaggagaatcgcttgaacctgggaggcagaggttgcagtgagccgagatcctgccgttgcactccaccctgggcaacaagagtgaaactctatctcaaaacaaaattatttaaactataattttgatgtaattattgttttctttctttattttgttttgttttgttttgagacggggtctcgctctgttgcccaggctggagtgcagtggcgtgatctcggctcactgcaagctccgcctcccgggttcacgccattctcctgccgcagcctcccgagtagctgggactacaggcgcccgccaccacgcccggctaattttttgtatatttagtagagacggggtttcactgtgttagccaggatcgtctctatctcctgacctcgtgatccgcccgcctcggcctcccaaagtgctgggattacaggcgtgagccaccgcgcccggccgtattgttttctttatggcgttatgtctttgttatcattattaggaggatcttctctacacttggagatatttaatgaaaatcttttctagttacagtttcactttttaaaacatttaaatatttgattcatacagattttattttagtgtgaagggtttctatgaatctaatgttacttatttctcaccaaaaatctacaaattactttttatgcatcatttattgaataaaacatgtttccccattgacttgaaataaatctcatctttttattatattaaccttgagggtcttatctctcgagtctgttctattccattcctctgctcattctgccctgaaaactgtattattttgatccctctaacatttaatacattgtaacatatttaatatctgctatagtaaattctccaaattgctgtcacattttcttttactagtcacacagattaatttttctacatgatctataattttttatgaagtttgaaaataaatcagatggacttatttttaacacctaagttaagcatatcatcctggagaaatatggacgagagagaatgtactttaaacacagatcatataatggcaagttatatctcattttttagtttctgagaaaacctagcacccccaaaattaattctttagttgatacagtttggatatttgtcccctttaagtcttttgttgaaatttaatccccagtgttggaggtggggcctggtgggagatgttcgagtcatggggacagaccctttgtgaatggcttggtgcctcctcaaggtaatgagtgaattctcacttgatgagttcttgcaagaactgattgttaaaaagagcctagcctctctctatmtatatatatatctctctctggcctgggcccctttcctctctttctctctgtctgtctttctcttcctgccatgtggtctctatatgtagactccccttcaccttccatcatgagtggaagcttcctgaggctcttaagagaagcaggtgctggtgacatgcttcttgtacagccttcagaaccgtgagcgaactaaacctcttttcttttaaattacccagcctcggatatgcctttatarcaatgcaaaaggactaagacattaacattttgttacctccatatgyaagctctcggctgttattcctcatggaccagcaatttgaagctatgaaatcataattccgtgataaaaggttaacattccatatgggctatatttttcctgactgaaaaagttagagtcttggataaagttaactgagaagaatctgttctctgaattacatgtatccagtaggtttcaattggaatgaagtatgttgagtcattagggtttttaaaattattatttctatttgatttataaggctacttggaaaagtgtgttaacaaaatcagtaccaaagtgttcttcatcataaggaattcttctaagcctaatatctcctgttcacctttcaagttttgtgtaatttttataagtgaaactttatgcaaaaacagataggaaggaaatgaataaactgcaggaaatatgcttgtttctacttgtctctacctattgtggatcaatttatgaagacagcacagtatagccttaaaggcattggagcaagaaacacccagtttctagctgttttaccagcactactttttgagtgaccttgaaaacagtttctgcacttttaacatagggaataataatagcatcttccataagggttgttttcagcaagctctgaggtgctaaatatataaagtaactaatatagtacctgacatgtagtagacactctctctctctctctctctctctctctmmatatatatatatatatatatatgtatgtgtacacacacacacacacacaattgaatgaccctgtgagcgaggccaattttgtgtatagcttttaaaaatgcatatttgctgctcccctttatttttcataactttcaaacattatgatactgtattcccaaagatcgtttatactacattatctgaattgatttaattaggaccagttacatcaaagggcagcttccatgttataatatttcatagggctatgtcagaattcaaagagagacctttcttatactttgcatattgattcatgcattctacaaatatttgttttcaaggcataattctaaattctggagattaataaataaacaagatagaaaagatggaaggaaaacacacaatgaacagttaaatgagtgaacagcataatttcatctgttgataactcacacagttttccaaatgtctgaaaattagctttatgataaaaaacgatttctaagatgaaagctaattaattaaaaaatcatgctttaactacaagagaacctctgggaatgattagaactcaggaacctggctttccattctacctctttaaagagatattgaccaaattcccctacgaaatgatattttggggctagatgatctttaaaattcctttaaacattaaatatcattgatctatattatttttaaagaaaaaaagaagcatattagttataactaaggcacatatatataaagtatgcattgtgaattacagagcataaattatgatagttgaccaatggtgtgcattccttatagtacatatgtagcacatttaagggtttaacacatttagcaaataaaagtataaaagtaaaaaactcctcttccagtttcctgttcttctatgccaacaagtttttaagactgaaggtatcaatgaatgtcttccataaaaagagatgtttcagaagggtgaaagccagtcatatttctgtaatgtaaacacattgtcctagaccctgatayactcgaatatgatccatggtcagcacttgtaaagagctgtgaaaagtgatggaggcgagatcattcataacatgtgagacagctgagagaggagccagtgtctggaataaaagaggcagaaagattgggcaagaattctctaaaccaagaataaaacaagagtgtcaggttaggggaaagccaggatctcagagaaattgggtcaagcttcttggatattacagtcccaatcaggagtgtggtaagacatcttggaaagcacttcaaacatgcagctttctttgttttgtcatatttatctctcgttggattgcatgtgggagcattgggttcatttcaatgraagagtgatgaggataccactgtaagtgtggtttctcattctgccacacatcagagatgagtcattgtctcatggggctttctgtaactttcaagatcttctagccatgctttctctgaaaaaggarccaagagcagtgaccgttagctatactgcagaaccttggcattttactttaacctctctcagcttcgcttttttcatcgatatgaagcgataatcatgcagtattttcaaggagaaggaatgaggttatatacgtaagataaccagcagatagtagctagtaaacatgaaattattttgtcctctctagaggtggttgacagacaaactggcctaggctgcaaagtggcccccactttgcctcaagattcagacatgttttctgttgtctcctgattttaaaatgttctctccttcactcccatctctgccttagaattccttttctacagaacaaaataggtatggtttttagagaaaagtatatgactaggtaatcttatgatcatatttgccttgtttttgcttggtggttttaaaatattattattttcattgttaaaaataaaattctccaaagagtggtatgacagcagcagaaatacatttatgcaagatggctgatggatattgtaaggggagatgaatatgcttcttaaatataaacatttaaattaacccttaagaaactctgcgctgcttgtgctgtcggctaaagctgtttgaaaaccttgcagcattagtagcaagctgttatgagccagataatattgatgacacagttatgttttatccatgagtacaaaggcaaccagagggtgtaaacaattttgaatttggaattacagctgaaataactagaacattacttcacatgtagttagtagaacaagctttcagctaactgggttctgaattatcttgacatggtatttctttctgttgcctgacttcatatatcctcaggacatgcaacgatccacaaaaaagtgactcttagttgggcaccatggctcacaactctaatcccagcactttgggaggttgagtggggtggatcacctgaggtcaggagttcgagaccagcctagccaacatggtgagaccttgtgtctactaaaaatacaaaattagttgggcatggtggcacgtgcctggaatcccagctactcaggaggcaagaagaatcgcttgaaccttggaggtggaggttacagtgagctgagattgcatgattgtacagcagcctggacaacaagagtgaaatgctatctcaaaaaaaaaaaaaagaaaaagaaaagaaaaagaaaagtgactcttttggcagccttttgaatataatcttacttttgcatcataatatttgtaaataagctttgactataaatgctgctcttgcctatgagagataaaaaaaaggattagatgttgagagggatgtggaggatggggctcaaccaataatgatcgagtaccttccatacccacagcagcagatggacactctgggcaattatttcaaacatgcagtctaatttgaatgataacatatattcttgtcaccatttgttatcattaaaaaaaaaaaataggtgcccttggaaaggtgtgtgcagaaagaagccaaaggctttctcaccattcctagatcactctagaattgtccttctcaggccttggaggacatccgagctggayatctcagctgcattgtttattttccattatcaaaatgtcaagttggccaacatcaaagtgttacttatgtaatgtcaacttcttcctctctcaccactcagtcttatcttagaggaggaaatgcgcyatagtttctttttaatttctttgttctctcattcttccttccccatttactcctttcgtggctcctccagaattagggtggaggggctggagtgagctgaggagaggtaatgatsaggaacagtattcatagactgcactcttgaagaatctgctcttgatagagatgtttcgttaattctccaggagggtgtccatcacctgtacatccacaaattccagtacctagagctctctctctgcggtcctcttaaagcaccttgctcccttgtcttcagggtgtgagcccagggtctcaggtctctcatttcattctctgtaactgcctaggaacaatgattctcagactcagagcctctgcccaaattctgagacagcagaaaaagttgcacttagaacagggagtgtgcagggaagggttttggcaagtgctggaaaggccttaaaccatgaaggttggaggaaggcttgtaactgtacaagggtaaaaagaaggcttgattccaggaaaggaaggggcttcctgcaaaggtgcaaagatgcaaatcactgtgacatgttacagtgacattaagaagaccagccagatgagagcatgaggcagccatgactaatgacagtttctgagatctttccagtaactggggccgttttacattcagagtacmtctaattcccagcagtgatttcatcagtggagatgggcagataacggggagctgcagtaacatgggaggcaacatcatttgtcaaggagtgggaagaaagtggcattattagttgtagggatgtattaaaagtttcagccagctgtctgggaaatttggggggttctgagaaaaacatggaacagaaaggtgcagcggctgggcacggtggttctcgcctgtaatctcagcactttcagaggctgaggtgagaagattgcctgaagccaggtgttttagcacagcataggcaacatagagagagcccatctctacgattttttgttttaattagctgggtgtgatagcgtgtacctgtagtaacagctactcaggaggctaaagcagaaggttggcttgagctcaggagtctgagattacagtgagctatgataataccactgcactcccacctgggtgacagagcaagatcctgtcacaaagcatgggactagcatttgctattttcataaattactgagatgtcataattaatgtgtttttatattatggtgtatactaggaaggagttgttaacaccttccaatgataacaacaacaaaaataatgcccaagataatccaggacaattaagcaaatacaaagttatggcgtttagtgggaacaaattggacagggtcaaggttgagaataaaggatgaggcaaaatcccagcagagagggagccaaacctcatgaacaactttgctcagcagagcaaagagcgctggcatggatgaactagagtgcggtgcacggtgccatcgaggaaactgggatgagcaaataggccatttcagcagcacaagtacgcatttcatttccccacacattacctcctgtgggaaatacaaggakgtgaaagccacatcccttaacttcaggaacttgccttactaatgattgagagacataaaatacaaccttgaagaaaggtccttcatggtaaatatttgatgttgcgtatccccaattgatttctgcaaactttaacccaatttttaataaaagtatctgtaagacagaattacctggaaagttttcttttttaaaaaatagaaatgtcagacccagtgactgaatttctctgtatcatgtgtgggggtggaggtgggtgggtttgtttctgcagagctccttgggtgattctgaagtgcagggagaactgggagctactagtaagggcagggcaaataactggcctgccacaggagttctgattgtatttgggcacaaatacagtcactttaatggttgatgctaaacttccaatgacatatgtttgttccacctgaatttctggtacattccatcctatcattctaaacatcaccacagtaataatttatgggactctccaaagagctcaggaaatgtgcgttcacagcaccctcttctctttggtttccacatggcttgtgccatgtttcattcctgagctctcctcctgggcgatgtccactgtttgctgtcaccctgaagccagtcaaacgccaccctcttggctttgctacgggtcccccatgtgaaaacaccaatatccacttccaggttagtagctcccaatattcccaagccaatgcctgtgggtgcccagacatgctgggctctgtgtggctttggacagcgtccttcmctccattcactgctccattttgtagccagctccctaaagcaataatgcttgtgcccgtagctcctcagagtctctcaaaggaagcagcttcttccatctcttgcctactgcttatttcctaaagaaagatttccgtgcccggaagtttccacgcacacctccacaggagcacacagcagccggcccagggctccgtcatcaatggagatagaaccagcaaagatgcacctgcagcttgtcttcccctgcctcgccccaaacctctccgtttcagagcacagactttgctttcactttgtgttaactaaaatgtccatttagatggttcactgaaaacattgacrtacttgttccaaaggggaatttaagcctccacattatagaagatagaaaactgatggcaatgtttaaatggcagctgttctagcttctacctatcaggttaaaaacacgcacacactttaaaaccatgttttagataaaatacgtcaataaacaaccaagtttttataacacctggcttttctaaaagagcacagttgaagctgtacagaattctcctggaaagcctaatgacatgacagttctcagtgtttctgaccatctttctttctgttctttggaatctgggtcagaggcagtattcggagtatatttcttatgtgatttttttttatcctggcaatatgggaaattatggaaaaatcaaaacatctagtatgaatataaaccacactccaagttaatgtaattaatctattcctccttccccaccttccttcttccctccctctctccttttctgccccttcttcctcctctccactttctccctactttccacaaccatgtattaagcacggaggcaacctcagcaactgtgctaagatctgtgaatatagaaataagcatgccccttcccaccccccagcaagtatttattgtcttatgagaaaggcagatgtattaaaacattgcagagtataatcacttacagtgttatatggcatatctggaaacacaaatttgggcgtggttaacttcacctggcatagtcaggaaggattaacagatgaagtgacatgagcttgctcttgaagaaattgctgatatttctttagttttgtaacaggataaaggtattgcttacttattctacttttgcctgaggactggtttttctacacaagaatatacagaggtttgtcgcactcgcaggaactgaaaataagtggaaatcagagcaattctctgacaggatagatgcccagagggaccacaaacatggttactttatgaggatggtgcaaaacatcaacttagggtgttctgtgattataacattgaaacatgtsaagattaatatcatggttaaacatacagaggaggatatccaaaaacataggaatcataagatgaattcctatgaagtatggagactaaaaatacagtcaatttcttgatatagaaagaataatgcttagagtcttgaaacactaacgattgacatgggttttggggagagcagaatttgtagagaggtcataagtgagggttctgaagttagaagcccagatttgaatcccagctctagaccgcagcataccacgtgaccacaggcaaaattgcttatctctcttttttagtttcattatctattaactaggaattcaaagtggtttctagtttataggtttgttatcatgattaaatgagaaaatgcctgaagtacagtccattacacatacggtagactcaataaatattaacttctcaccatcattattttatgaaaagcaagctattaagcaacatgactctggcaacttaatcctgattgccaacaacataccaataatttgctcttcatgtgatctgaaattttccaaggtttgttgaatgtacacagttggagaacgtacaacagcacaattacgtttcaagccattactatttaacttattttgatgaatgccatttgtggggggaaaaaaaagcaaagcagataagtacatattaagatgcctttagggagctccactttccctactaaaagcatttttctaagtwatatagcttcrgaacatcttgactgaaatagctttagaatatttacagcaaaagcatctcttttaggaaagttgaggtggctgaaagtgaatgtgtcttaatgcatgaagagcttacaggtccacaagattgyaggacatacgtgttcatgaagccaatgaaaactcagtaggttacaggacctacattctggttctttccaggagagttgacgtagagctggagtggcttcatctgcctctatttacaatgagagattatgagtacataattgcagtgttagcagaaggcatcacacgtgtgcctccgcattttagggaaagccaacttgccttccatttgtcatgtgtctatgaatacgcgaatacatayaagagttctctgtcttcacggagttgcggaagtgatagtccacaaagttacacagatgtcaacatatttcaaagcaattcactgaaagaactaagaaatgaagaagctcagatttctggcttccaggctgttgaactattctgcatgtagctatgctgacaagtaatttcatttgacaggacctgcgagcccatgtctgttctgctaagaaaggattgttaacctttccttgactgcaatagtggtttgcaactgcttgtttggccctcatctccctatctaccaagccttgattgctcctgtatttaaaagcacattaaacacaccatggcccgggggcagtgsctcatggctgtaatctcagcactttgggaggctgaggcgggtggatcacttgaggtcaggagttcaacaccagcctggccaacatggtgaaaccccatctctactaaaaatatgaaaaaaaattagccaggtgtggacatgcctgtggtcccagctactcaggaggctgaggcagaagaatcgcttgaacctgggaggcggaggttgcagtgagctgagatcgtggcactgtactccagcctgggcaacagagtgactccgtctcaaaaaaaaaaaaaaaaaaaaaaaaaaaagcaccatggatatggccactgggagatcacagaattcactgacaaggtttccttaaaaagttgacactgcaagaaagggtagtcaatagaaggaagtcactaaaaagatggaatgaattggacagtatatagggagagacatgacacggattagaaaaggctcactttctgtactgcacaggaaggaagaaaacaaaagtacctttgcagatttgatggtcaaatgagagtatactaatcttctgaaattatttataaataatacataatttaaaaatacagactgggtgcggtggctcacgcctgtaatcccagcactttcggaggccgaggcggtcggatcacaaggtcagaagatcgagaccacggtgaaaccccgtctctactaaaaatacaaaaaattagccaggcgtggtggcaggygcctgtagtcccagctactcgggaggctgaggcaggagaatggcgtggacccaggaggtggagcttgcagtgagccgagattgcgccactgcactccaggctgggcgacagagcgagactccgtctcaaaaaaaaaaaaaaaaaaatacaatctggacatgaacacaayatagaaacgtatagaagttatatacatatataaaaatatgtaataaatgtttcataatataaaaaaagacttatttggtgcaygtgctgactataaacaacaaaggaatgaaacactggacttatttttgagatgcttacagtttagtctaatttataagactgctttctctttgtttttgcaaatacttcaggtcttcgatgaactcaaaattcattcttaggtgtaaaagttagatctttgtttgggacygcaccaaggtcactagagttcagaactgaagcatctatgtggttttagaagttcctgagtctaaaaattgttcactatagtgacaacaattcgctttacaagagccttacacacaaaaagtaatattcctgggaatacatttaatcaaggagatgaaagatctctttaaggagaactacaaaactctgttttaatttttaacaaaaaagtggtaaatgtaaaaatttaaaatagaaataagtgggctgggcgctgtggctcacgcctataatcccagcactttgagaggccgaggccggtggatcacctgaagtcaggagtttgagaccagcctgaccaacatagcaaaaccctgtctctactaaaaatacaaaaattagctgggcatgttggcacatgcaattacccccagctacctgggggctgaagcaggagaattgcttgaacctgggaggcagaggttgcagtgaaccaagattgtgctattgcactctagcctgggcaacagagtgaaactctgtcaaaaaaaaaaaaaaaaaaaaaaaagggttgggggagggagggaggaagggagggactcgtacctgacacaaacaaactggaaaacatcctgtgttcagggatggaagaatcaatatcattaaaatgaccatactgcccaaaacaatctacagattcaatgtcattcctatcaatataccaatgccatttttcacagaactagaaaaagcaattctaaaattgatatggaaccaaaaaagagtccaaatagccaaagaaatcctaagcaaaaagaacaaagccagaggcattacattacatgatttcaaactatactacaaggttatagtaaccaaaacagcatgatgctaatacaggagtactggaaagggaagagtatggtccttctaaatgatagggagggaagggaagtgctgggtaaaggagggcgtggtccctggctacggctccacccccatggacctaggtgaagacaggtagtcctgctttcgggcccaaatgttgcattttctaagaccaccctggyccgccacacccccatcctgggtctstaaaaacccgataccctagcaggcagacacacagacggccagacatggagaggagcacatcggcggaagaagatgcaagccgctagtcgtggagagggcgaggagaggagcaggctaggagaagagcacaccgacaaacaccggcaggcgaccagcagaaccacgtggagtttggctggggcggtcggaggagagccctggccccgaagcagcccgactccagggaaaaaccgtcttccttcttgctgccccatcagctgagagatacttccactcagtaaaactttgcacccattcgccaagccaacgtgtgatctgattcttctggtacaccaaggcaagaaactggggayacagaaagccctctgtccttgtaacaaggtagacgctctaattgagttgrttaacacaaggtgcccgtaggcaaactaagagaacaccctgtaacacacgcccactggggctttaggagctgtaaacagtcaccccgagacactgctgtggggtgggagccccacagcctgcccgtctgtatgttcacctagaggttggagcagcagggctctgaagaagcaagccacacccccaccgcatgccctgctagggggacaagggaacctttcccatttcaatactggtacaaaaatggacacatatatcaatggagcagagtagagaacccagaaataaagcctcatacctacaagcaactgacctttggtaagttgataaaaatcaacaatggggaaaatacaccctattgaataattggtgctgggaaactggctaggcatatgcagataagtgaaactggaacgcttcctctcaccgtatgcaaaaattaactcaagatggattaaagacttatgtgtaaggcactgatttattaaaatcctagaagaaaacctaggaaaaactcatctggacactgacctaggtaagtaatttattactaaatcctcaaaagcaaatgcaacaaaaacaaaaattgacaagctaaagagcttctgcacagcaaaagaaacaatcaacagaggaaactgacaacttacagaatgagagaaaatatttgcaaagtatgcattggataaaagactaatatctagaatctataagaaacttaaatcaacaacaacaacaataaagaccggttaaaaggggacaaaggacatgaacagacacttctcaaaagaagacatataggcagccaacaaacatatttaaaaatgttcaacatctaatcatcagagaaatgcaaatgaaaaccacatgagataccagctcataccagtcagaatggctattgtcaaaaaataacatatattggcgcagatgtagagaaaagggagtgcttatacactgttggtgggcgtgtaaattagcacaacctctatggaaaacattatggagatttctcagagaactaaaaatagaactcccattcaaccctgcaatcccagtgctaggtaactacccaaaggaaaagaaatcattctatcaaaaactcatatgtttaytgcaacattattcacaatagcaaagtaatgaaatcaacttaaatgcccatcaatggtagattggataaagaaaatgtggtacatatacaccatagaatactatgcagccaaaaaaaaagatcaaaatcctgtcctttgcagcgacgtggatgcagttacaggccataatcctaggggaattaatgcagaaacaaaaaatcaaataattgcatgttctcacttataagtgggaactaaacgatgggtacacatggacataaagacgggtacaatagacactggagaattctaaagtagggagggaaagaagggggcaagggttgaaaaactacctattgggcactatgttcactatttgggtgatggattcaatggtagcccaaaccccaacatcacacgatatacccatgtacaaaactgcacatgtaccacctggatttaaaatttaaaaagaagaaatgcaggatctcaacccatcccagaagtagggaatcaaaatctgcatattagcaggatcatcaggtgatttgtacgcacagtaatatcctagaaacttcggatgagtaatatgtttcttatctgagcatgtggggatattttagtcacggaggaagggacttcaaaatgttcatggaaacgaaattaaaagattattttaaaaaagagcttaaggaaaaaaaaaaaaatatatatatatatatattcccygtaatgccgggacatcaaaaagtatgagaggaacagattctagtcttcataaagcataaagggattggatgaccttgaatttgtactgaccaattatttgaaagcctttgttaaaaagcatyagatttttagtcatttgtttaagtgtggttttatatgatagtttaattatgttttcttatcaattaagtacattatatatatatttgatgtatatagatgttatatattatatatattatatatatataatatmtataywyatatatattttatatatatatatatatatrtttttgtttttttttttttgagacagagtctcgttctgtcacccaggctggagtgcagtggtatgatctcgactcactgcaacttccacctcccggattcaagcaattctcctgcctcagcctcctgagtagctgggattacaggtgcgcrccaccatgcccggctaatttttgtattttttgtagagatgaggtttcaccatgttggccaggctgatctcgaagtcctgacttcacagtctgcccgccttggcttcccaaagtgctgggattacaggcatgagccaccgcgccgggcccattacatattttaacagaaaattcaaagagagctattcttgtttgtcatggcattcctaaattttaaaatgtagaaatatggggagaatctttattagtcctatatgtgagaaaaaaatcaatttctgaattccactacatattaactgttaactccccaatttcaacatttaagatgttttttgaaatgcttttctcgagttagtagatgctgataagcttgaacttttttgtttacctacatatatatctgtcccttaccaactgctttgaaattgtgaaagaaccaagatatgtatgtttagcctatcagctacatccaacttcatcaaccactttttgatattcaaatgaaaatattttcagtatcatgtacaaaagaatatctagaaaaacattcatatctttaaataggattttgctcttttcagacatcatttgtatgtttctttgtttttatctgttttttttttttttttttttttttttgattcattggtcacttagtcagcattctgtcactgacaattccagttccatccaagctgtccctatattctatccatgtttactgcaagtcagaagtgcactgcagtcacagatttgcagggctggagcctaatgagctctctaagcctgaccaagccacaaaaacacagttgttctccgcaggaagagtctgctgtccctccatcctctcaactttgagcacaggttacaaatgcacatgcacttacaggtgctgctgacattagaccaaggctgagcaaaaccactttgtgatattttttttttttcctttgagacggagttttgctcttgtcgcccaggctggagtgcaatgtcacaatcttggctcactgaaatctctgccttccagtttcaagcaattctcctgccccagcctcctgagtagctgggattacaggcgcccgccaccacaccaggctaatttttgtatttttagtagagacagggtttcaccatgttggccaggctggtctcgagctcctgacctcaggtgatccacccaccttggcctcccaaagtgctgggattacaggcgtgaccaccatacccagccatgatttttaatacataaagttatctagcatatgtgcaatcacagattaaaggctcgttgtagtctgttgtgctaacaaagcrtggaccaaggactccccaagtgttctttggcatgccagatcttaaaagctccagaagcactcttcagctgggtcctgtcactgctcagcagattaattacacatcagcgcaataagccataagcgttccaggggaagttattgcagtatatcatttcaatgatctgtagatagcaggctgctgggagacttgttttgaacrgtgcctttcaatccatctctgagcttgagggtgcaccgaggcatgccagagttggaaacacttcagtgcccctcaaagtattctttcagctccttagcccatgtcttacatggttctggagattctaatgacactctaacagctatagcacttattatttacttattcaacacacaggcatgcagggcccaatggaaaggtgaatgaggaagatatttagggagagacttggcacttaatgcttaagtcatgaataaccttgttggtctctgtgtacctcatgtttttctccataaaaatgtaaatttgattatagaattttagccctagtgtttcattctgatagtagaaagaaaataccttggtagctcttcctgaaatgttgtatgagtcagtaaaccatctaagtatggttgatcaccaaagttctagaaggaagcatgtgatgctttacataagaagaatttgtgatattttaatgtagtgatataataggcaaagaatgatgtgatattcagctagtgcaccaaggctaaattatggggaaataataatataaaaacaggtgacttgctaagtgtagtgctctagattttatatttaacttagagtttcagataacataaagtcattacatagtaatctcattattgcagagcccactcatgtaggatttatttaatggtagagagctatactcaagataggttttggctcttgggaggacaaaaaagcatcctaagtatataaatacaattagagattattataaaaagctgagcacactgagaaatcactttgaaatgatcagttcgcacattacaattttctatactaattgtaaatcattcctgttgctgttttaaagcaggtcctaaaacacatctgtcaagattatgagagcttaattcgtattaccataaaagactgaaaataataaaaacatgcttttcttgcaaaatatttgataatttagactccaagtaattcaaaaatggctcctctcatcattagtttttcttattttaaccacatctcccaagaatgggatatgagcacatgtgcatttgttttaaaccagctattgagcctcaagactttgactttgtctgtctaaaagttattatgggccgggcgcggtggctcacgcctgtaatcccagcactttgggaggccgaggcaggtggatcacgaggtcaggagattgagaccatcctggctaacacgatgaaaccccatctctactaaaaacacaaaaaattagccgggcatggcgatgggcgcctgtagtctcagctacttgggaggctgagggaggagaatggcgtgaacccaggaggtggagcttgcagtgagcggagatcacgtcactgcactccagcctgggtgacagagcaagactccgtctcaaaaaaaataaaaataaaaataaaagttattatggcctgtgttcttcatctctgttccagatctttcccgcagggtcatggtgctcattgcacatagacagccagctacctcagcaagacacataggaacaacagaggctctctcggggtttcttttttcatgcttggtattggtttattttaagatgaatgcagcttgtcttatagaaatcaaaaaagaaatagaaacgctaagtgacagaaaaggttaagtatgaaattttgaagcctatatatagtcccttgctgtgacaggcaacgtttcagaagatgatggatgtgattttcccaaggggatcttttactgtaatggagaaaatatctgaattaattagatacaaaagcccatactgttgagcctctgatgagaaaaactatatttgtcgtgaagaatgatcgcatkaaatgttmaaccayggtttttcaaacattcttgaaatatttagttatagttacaatggttaaaattttcagtgttacattgaatgtggtgattttctatcatttagtcagaattagatttttctacaatatttatgacatgaacataatggatatgatttatggggcacttaatattgtcaggcaccatgccacatgccttctatacacatattggatcccatttaaccctcatagtttctatgtggtaagggtcattttcctcattgtaacatgtacatgcatgtaaactaggcctagattagcaaacatttaatgctacataactagcgattcccagacctgaatttcaaaccagttctgatggattcccaagtacagactcttaaccaccctagggagctgactccataagatatatctccctatggaagttctaaaaatagctatttacaacattttcatgaagccacacaaaataatgaaatgagcttcacaaaatgtaaaacacaaaaaattaatccacatgctatgatcttagatatttaagacaaactctttgttaataaggggccatttgagcaggcccgggagagaggcggatgtttgagttgcacacacacagttgactgagtggaagtgtgtgaatttcagagccgcgtgtgtgaggtttcggaaggtggagttggcgtgttgggtaggcatccatcctgcccatcccctcttgttactgcatgatcctgaaagcatcagatgcagaagggactactgtgagatgagcagtgagggctgctttatcgccaggatcctgtgcctaaagctccatgacatctccctggtaaaggcgaggtaggactccatggcatgcttgggcttgagaccgaagacaaccttcaggctctcaccatatataaattgtgatctcagggttgttactaytgagtgaccagtggggatgggtcagccacgaggagagtgttccagggtaacttgcatggatctaataccctacttctagttggccctgctagcaatagacatggcccaactaaggaatcaaatgttgtccatcataagaaccttctccctcctcgtgatgggagatgaaagttggcaagggacagtcagaggacctcaggagtcctgtgcactttccacctatcaagacaagaagaaagacaggaggagcattttatcccctttcaaagaggatattttgtccaaggggcagtctgcaggggttccaagkcaagttacattttgtgtatggaaagtgagtgatggaaaaaatgctcagtaattttctaatcggcctgtattttcaagagtctattattaatttgaattaaattcatgtatgtgattcatatgtataattaatgtggcttacagaaaataaattggaacaacaacagatgtgtcgcctttgctatggattcagttttttttttattattattttaaacaagaattagtcccaccttttatttctttggcagaaaattgccctataacataaaactgactttcataaaatatcagcaaatttgaaatgccagatggagaccttcatcttggcagttttgaactgttcttttccattttagagtctcagaatgaatacttatcttgtcagtttatgctctattgtacaaaggttctgtttcrtgtaaatgaacttcagtcaatttacaacaaattgatttccatctctaagaatatcctaccctgcgagtagatactttccatgaatatgtcatttacatttgatttctgacctcagccttatatattgattgtaacatataagcattcatactttcagtcttgaaatttgaaagttctcggcttaccattttctcactgaaggactttcctgtattatgttctttatatctgaataactctttcattcttctagctggaatgctatagagtacattgtaatttgcttcaatttcagagagtagaagggtgagcagtggaaggtgacaggggagaaaggaagggaggagggatgcattgaaaacaggattcagcagcaagagcgtagctgacaatctccagcttacaaatgccattcctgttgaaaattaggctgtggctgaaactggaccttgaacgggagaatattacagccctgaattgagttggttctgcgcttctgcctgaaagctgggattgccatactacttttccctttgcagttacctttgatacatagctctttttttctctagtttctgatcatcatccttagcccatatacttgttactgcaattgagggaaaagaaaccaatcatataatctcaaagaagccttttttctcccagaagaatgaagctcagcggtgtacttgtgtgagttccttttctccactgccacagtttagcgatttgttagcctaacatttcagaactcacagtcaaagaaaccttccccaccacttcactagaggaaacacttgacaataaatttgaacggttggcttccaattttcaaaaggatcaatcgcaaaagttgctgttcttaaaatcatgctgcaagtttactcaagataatatgttttaaatttcatgttttctacaacgtgaacatgttgtctttcaacaatatgatattatacaaaaagtaattgttattgaaaaataccagaaacaacctaggggttgcctaaaccgggagagtacaaccattcaatagagtactatgcagctgggaaaaaggcatgagaaagacctctacacactgaggtggagtaatttaaggactaccttgctgagtgaaaaaaaaaatacgaaaggtgatctgtattgtgttatcttatttgcaggagtgaaggggactgagtggagtggagtaaggagctcccctcagctgggagagagagccaggtgtcagagtagccatttaaagcaacaagcccttaatgagttaaacctttcatcactcactgcagtgtatagggagtggtatagggaggaagcaccagctcgcttccgttcctgtttcctccatggaatggtgcactggtcaagggtcaggtggatccgtgcggacatgcgtgacccaacaaaaggctccagcagttttatggaccctgtggccaggtgaagagagctcaaagtggactgagtcacagtgaggaagcatgtcttcaaggtttcccctcctcctggaaggaggcctctgcagaggcgcctgaagagggccttgcccagggcctcagctagagacctaggtatgtagcagtgtgagtacgtaaaaaagcctgactggccgggggctctgaaaccttgactgtgcagggctctggctgtgctctgaatcccatgtgggagggcagctttgctcaactgcccatgctccgcctgaaatgtcacacatgggtttttaaccaggccccacactgaaagtatgcatgtctgctgatttttatcaaagaaatgggaagaataaaccagaaacaagtgagataaatttcccgatggggggtgagtaggaactgaatgggaggtacgagggggtagcagtgcccagccagggcccaggttaggacagtgacccttctctgaatctttttgtatagctttgacctttggaaccttgttaatgtattatgtttaaaaaaatcagcaaggacacagaataaaacaaactaaaaccaattataaatgcaaacaaatgaacttaatagtatttcaaatagataatatggcacagtgaaagggaaaaggaaatttccaaataactttacccactgaattatttactacatacttttagcataaagtcagaactcaatataaaaatgaatttaataagtagttttgtttttgttctgagttgtcatttctataactcctgtgtattctaaatttgataaacaacaaatattgagataaccagagtcagatttatcagtgtcacagaaggaagctacagatattgaaaaagaagagtctcgaataaacactgtgatgcttgattggaatcacagttatcactatgcacttggggttgtcataaagatatttttgtgtataacacacacatttcctagcttcgtctttgagaatatctggaagcaatgacatcccactaggaatgaatacacctggcactcagtttctgaacattttctccactaaaaatactagggctcctcatagaaatggttgattctggggttggagccggaaaagtataataggaggctggaacatttttcttacaccagaaaagaaagaaggatgcatgtaacagtgaggacgtatccaaaagacaagggatttagcttcagagggctcccattggctactctaggggaattgagtatcaaaataaataatgatattatgaccaatagatgttaacccagtaaaaaataggaatccatgggtctgtatgatataaccaaataaatacatacataaataaatgttagaagtctcttcctctctgtaaaattccacatgtagaaggattgattcatttagaaaaactgcagtttggcaaccatcatactaataattgattcaagcagggattatcaatggatactaaaactggtaagtagaggtttgattaacagcagaatatttgcatagccttgtcgccccagaaaacacttattcaacataaaaataaaaatcaggaaccttaacagtggagaaacctggcaggaaccacctgaaccaaatgatcaaagctgaaatattgggacaaacgatagcatgtgtctcctaatataaacatcagacaaacccagattgaggaacattctacacaaaaactggcctacactcaacagaaaatgtcaaggctatgagagagagattgagggactgttccagatcagaggggactgaaagtacatgaaaactcaatgcagcaggtggtcctcggttcaatttggggggcttgggtgttacagatataattggttcaatttacaagtaaggatcagatttgctcaataaggtaacagcattctatcagtattttctgattttgagaaaagtattgtgtaaaaatttatgtaaatgaatgtttttattctcaggaaatcccaagtgaagtgtttaggggtaaagggacatcctatctgaaagttactttcaaatggtttagaaaaagtaattacatacataaagatatataataatgtacattatatatagttaaatatgtatatatgcatatatttactttgcatttacttgttttagtttactttcttttttaacttactttctctatataatgtacatagagaaagattgagagaagaagataaactaaacgtgaaaaaaataccagtatttgaggaggctggatgaagaatatgtaagagttctttgtacaatttttgcaactgttctatatatctgaagttattttaaaatttataattcccaaagaaatcaaatatgggctttggcatcagactaaggctgacatcatggttaaacgatttctcatctccgcaggatgacgtgatcaaaggaaagtacccacatggtagagttgttgaagaccctgtatttaacaatgcatggaaagcattttgcgtgtcattattaaaatatgacatagcacagtgtagtgtagtattgtctatatctatcctctagctagctagctatctaaatatatatctacctaaatctctgctatccatcaattatttctccagagtaaagttctcacagcatttatagtacaattttcctaatcaataaaactaattttatatgtagaagtaaaataatttgatagttgctattttgtaaaggtttatgcactttcagttatttcttatggttagaatacccagaactttgtaaaatttaaaaatatatatttaatctgaagaaaggtcattagcccagagtgaccctctgaaatacagccttttaaatatgcactatggaacaaacaccgctatcaaggtttttgctgtaacaataaagatggttattttagtcatctgtcaattattcatagcactgsaaaacaaagtaaaatagaaaataaaaatatcaaaccaatcttaaagtcagtctggaaagttttatatatatatataatatatatataataaatatatattatatatattataatatattatatattataatatatatattatatattataaatatataacatatatattataaaatataatatattatatatttataatatatattataaatatataatatattatatatattataaatatatattataatatataatatattatatatattataaaaatatatcataaatatatactatattacatattttataaatatatattataaatatatactatattatatatattataaattatatattataaatatatactatattatatataatatagtatatattataaaatatactatattatatataatatagtatatattataatatatattataattatatattataaatatattatatattataaatatattatatattataatatatattataaatatattatatattataatatatattataaatatatattataattatatattataatatatattataaatatattatgttataaatatatattatatattttatattatttatattaattatatattatatattatatattatattatatattatatatttaatatattatagtatatataatatattatataatatattttataatatattatatatattaatattatgtattatataatatattgtatatattatacattatataatatatattatataatatattatataatatattatataatatattatatattgtatattatataatatatattatataatatgtattatatataatataatatatataatataatatattatataatatatagtatattatatataatatattatataatatattatataatatattatatataatataatatattatataatatatattatattatatataatataatacattatataatatattatataatatataatataatacattatataatatattatataatatataatataatatattatataatatatattataaatacattatataatatatattataaatacattatatatcataaatattacatattataaatgtatattacatataataaatgtatattatttatatattatatattataaatgtatattacatataataaatgtatattatttatatattatatattataaatatataaaatatatataataaatatataaaatatatttatcatacataatatatataaaatatatattatgtataataaatatataaaatatatattatgtatatataatatatatatcagaaatttgttccaaagcaaattgattgattctgcaaggggtctccctgtgctaacacgagccaggggaagtgacatctgcagcaaaggcaaacaagagacattcttcccatttctaaaatgttccattgcttcctctaaaagattgttgtttgtttcattaaatagtaactccaagcgtaggtgaagttagcatgcagatgttgaagttataaacaacttttacaagtacacctagttatgaaccagaagactttatttttttttgacgcagagtcttgctctgtcacccaggctggagtgcagtggtgggatcttggctcactgcaacctccacctctgaggttcaaatgattatcatgcctcagcctccagagtagctgggattacaggtgcctgccaccatgcccagctaatttttgtatttttagtagagatggggttttgctatgttggccatgctcgtttcacrctcctgacttcaagtgatctacctgcctcagcttcccaaagtgctgggattacaggcatgagccaccatgcccagccgcgagaggacttttatttcactgcatgcatcctgtgtgcctgtgaagggcaatttttatatttagtgtgcaaaggttacaaaaaacctccgagtctgtgtttgagcttcagcttttcttctttgtggaaaaatgacatctttttacctccttttttgccataagttattgaagaatagtgattctgacggttgtggtttgtgggtttgttttttcattttgctgaaattgtcatgtaggtgtttcattagcttatgcagtttgataatttctgacagtgttctgggaattcattgctttgatttccatttttcccaatttttatgtcaaaatttccacttaccttccaaggttgaatctagacaatgtagtatctcacctctttctttgctttgttctccaagacagagtcttgctctgtcacccaggctagagtgcagtggcatgatctcagctcactgcaacctccacctcccgggttcaagcagttctcctgcctcagcctcccaagtagctgggattacagggtcacaccaccacacccggctaatttttgtatttttagtaaagacggggtttcaccgtgttggccaggatggtcttgaactcctgacctcgtgatccgcccacctcagcctcccaaagtgctgggattacaggcgtgagccactgcgcttggccacacgtcacctgtttatgatcctttttacatagtttattttgctcctgaacccacataactcttacaagggtatccagccagattcctttggttctcaaagactgttaaatttttctctactgtagtcatattcctttatctttcctgttaaaatccccttcaaatattgtaaggctaaataaataatattcctattctaatgccaggatctaattcactggggccatggtgtctttttctcatataataagttctcaggatgtatttttctattctcatggtctatttccttttattttaaattgggaagtgttccatacagaattttgttttaaatccaaggaagactgataactgaggtgtgatacccttagcttttccagattctcctggggttcattaaccaccagactttgttcaagttcctgctgcagcttctatctggtggtaaatgattgtgtaacaacactgaacatgatgcatttcgrtacactgttctcttctcagccttggcttgagtacttagtgaggcctgaggaataattacctctttctccattttcttttgtagctgctaccaattgaccaaaatcagtaagaagctcatgtagcccatgtagggtagcgtcctggggcccccggggcacgaagcaggtggagaatggtgggaaatggggctgaagagacaaatagcaggcattctgcctccaagcacacgtctccgtgtctcactatctggtgccaaatgttcatacacatatatgtgcatctttctctaatttcttgacttctatagtctcctgagagtttacaggaattttcatagtaaactttgcagctcagctttcctggataccctcaggaggaattcaattttttggtcttaggtaatccagttatgcctcttatccctttgcagttttttcagttgaacttcatttattattttagtatcttgcttaagtgtgtggtatcttataaatgctcccctagcgacatctgaaaatatatccacagctataattttcaaacttgggttgaatatgaaagcttttcattctgctgtattggaatgacatgtaaatagagcacctggttgttttggatgtatattgattctggctttttaaaaaggtgttcaaaatttagtgtttgtggaatgaagttattatagagaactcaggatagctataaattcgaattgatttggaaccatattgcatgcctttgggagatgctaagccgttttccttattttttttccttccaatatcatatcattaaggtaataatgttgtctgccagaatttgttgtgatgagcagatggattactaatattttgttgattgatttcttactcagctctgctataaaacttaattgatgattctgccatcaacggtttaagtggtacctattaaagtttagacttggagaccctgcaaaactcttgcccattaagcttggtttttcattttcagaagtatattcacaaaacttcccctatccctagctcaagaaacatgtgtcatactatcacattatactctgggacggtgaagttttttcaacagttttgatttcttgcctgaaatgtgtctgctattatacttgcattgttgttgttagtgaatatttctctaaattcttagcatgaaagaatgaaccccatggcctttttaaaacgtcatatagtcaaatttctatgagacaccttttactgtgtgttatttcaacatgaccactcactgcactgtatcctgagagcagtgacatttctttaaatgcacagcccttcattaaatattgaaaaatgactaatagcaaccttgctttttcaggcaaaattaaaactgtttttttaaatgctcattttccatcgttcttctaaatatgtataatttttggatattggctgatagtatatttcccattcatttatccattcagttattcatggttcatttgtttacttgtatatataattttttaactgtatatatagataatgaagccatacaatgtgcctggcgctcttctaagttctagagtacagttgtaaaaaggagggggccactggacttatggagcttatattctggggttcattgggsgcagtatgtcaagagaaataaatttcttagttaatactaggtaccaataagtgccatgatggagatcagtatgggatgtcatcatgcaaacaataagagaagggtgggaggctgctttaggatgctgaactcagccccaaatggcaagattgagccagrtgtgcaaaggaccagggggcagagctctctcggctaatgagacagctagtgcaaggcatcgtaagcagagaaagagcttggcctatctgaagagctgaaaggaggacagtgctttgaagagggcagacaggagtggagtgcagactgggccaactcacgttggtcttgtagaccatggcaagaaatctggattgtgttttccaagtggaatggaacactagaggatagtcagtaggggaagaatatgatctggtttacagtgttgaatttggaatctggtttacaatgtggaatgttaaattgagtgcacaatgttgaatgtggaatctggttgacattgttgaaagactcattttgctgtgggaagaatatggggcaaaagcatcaattagtggtgtgagaatttttccattcagtgtttaaattgaatggaaattgaattggaactcttttaaagtcccaggaattgtcagtcgtttaatcaacaaacgccaagcaactgctgggtgctaggaacagtgctgagtgatgggaaacaaagatggaacaaacaagtcattagacaaaataaaatcacacacatawataacttcattttaaatgtttcaaagctctcgtgtactttatagtaattctaagaaatgcagatttacttaatattgttcaaataagatagcaatttttagtatgcttttttaaatttagcaatgtcaccatcatcataaaatgtgagtagatatatatatatatacactatccttttatattaaattcacaaatggctataaaattctacaagtgttggactcagattataggattaaatagatttagataatagaaataatacacaacctttctccttcccatcttccaaccctgacatctagcaccggttttctaaagttaacttttttccccccaaaaaaggttagatttgatatattagcaaagaccctgcagttctgtatctcaactactttaaagctaacttggaaaagtaaactgagcctaaggagcttttatcatgaatgaaggcttttttctctctagcccgaggcattctcggcagggcaatagattcgggctgtcaacactcaagcaagaacacaaataagggctcaagagtttcattccttttttttttctaccaatttaatagtcctgcagagacagagagagagagcaagcatgtgcaagagtcagaggtggcttgagagttgagttgaatcttttccactacagcatttctcctgcttaatcaaagtgaagaggtcgacttaatttttagtgatatgataaaatgtcttaccatgtagcatatattatgagtcaacagtctttgtttttatttttggacatatttcttacaaaattcccaatgtgaacaactttcctggtattctatattgtcctatactttatttcttttattaccaataaagagtcaaatgcagaccaaactaaaagtccccaaagtttgagactttatcctggaagaagcacatgcttgaaatatgttgtcatttccctttttcttacttaattgtactaacttatttaatattaaacgttagctcgatttttatattagctttctttttcaggcatatcttcagatttcaaaagctattactctgagattcatttcattttaatttaagtgcctttacaggcaagtcttcctttgtgtccctacagacaattaattaatattttcctatggaaagaaaaatgtatatgtttagtattttgcaaaataatgccaattcaaatagagcattatcttcaacatttttcttaaatacaatttatcccactgagcccaacatcaacactatttccttgaaattttctttccattcgtaatcatacgtgagcctgaggagccacttaggaagtgaacctgatcaacagccagtttgcaaaagctgttgctcatcacaggggagacataccatctgcagtgtggtaaatgagtttccatgtggattccaagtgctcccagttctatgagttcattagtttctttctgaagctacaattttgcaacagacatcttcagaaaactttcagtgctatcattatgtttatattacctacgctggtgttgaggagtttgctaattgctactgcaacaataaatgctcattatcttcaagcaaataattaagcagtaagcaccaaatatgaactgctggtcagaggtctatggtggcctgtattagtgcattcttgctctgctataaagaaatatagaaaagagagttaattggatttataagaaaagaggtttaattggctcatggttctgcaggctgtacaggaagcatagtgacttctgctttggggaaggcctcaagaagttctaatcatggcagaagacaaagggaaagtgaggtgtctcacacagcaggagcaggagcaagagcgggtgaagcagctggtgctacaaacttttaaacaaccagagcttgtgagaactcactcactttctattcactaggacagtaccaagtgggatagtgctaagtcattcatgataaattcaaccacatgatccggtgacctcccaccaggccccacctccaacactggggattacaattcaatatgagatttgggtggggatacagatccaaaccaaatcccagctttttcagatcaactcctaatttatctgtgtgacgagaccaaggctttaagtgtttcaggcctagaaacaagttgctgcagtgagaatacgttgaagttgcaagataaaaagacaaatccataattcaagtttcagattccaatacatctctttcaataatagaacacataggtagaaaatcattaaggatatggaagatttaaactgtattaccaatcaacaggacctaattgacttttataaaatattgtgcaaaacagcagaatacatattctttacaagtacaccaggcatatttaccatggtaggctatattatgaggtgttccaattgatctttaacaggtcaatgcataaacaagttatggtatatttatacagtgatatagtaaactgcaataaaaatgaacgaataccctctttcagaaatggacagtttcagcatgtaaataatcagtaaggacatagttgaactcagcagcaccattgtagcataatgagtctcccacccattagccaagggtatatgtctaccacctaaaccttgaagaccaggcagtgagccaaggctatggggctcagccaagtagcaggtgttcctgagaacctaagcatcctagaaagtgtctgagaacctagcaagaaaaatagtctcagcacttaaacacaatatacaaaaattcagaaaattcgcttaaaagtagtttaagaacaagaggtggtgtggagctctaaagctgtcctgctgccatccaggaggtcctcatatataagtccttataacccatctactcgccaaactggacatgtccaaattttttttttttttttttttgtcaacaacctcccaatttgggggaaggtttttctgtatgattctgggattttctcattgcagccattgatcaactggatataattgacctctatagaccacttccaccaccaacaacaacagaatacatattcttctcaagctatcatgaaacattcaccaggacacagaacattctgggccataaaacagccacctttacaaatttaaaagaatagaaatcatagaatatttgctctcgactacagtggaattacactataatgacagaaagacagatggaaaatcccaaaatacgtggaaattaaacacaaacttctcagtaacacatgagtcaaataataaatcacaagagtatttgaaatcagatgaaaatgaaaatataacttattaaaatgtgtggatacagtgaaagcagtgttttgagaaatctacagcattgaatgaatatattagaagagaaaaagacctaaaataaatcatctcagtttctatgttagaaaagtagaaaaagaagagcaaattaaatccaaaggtggaagagaagtattaaatttagagcaaaaaatcaatgaaattgaaaataggaaatcaatagagaaaaatgaatgaagcaaaaaaaaatggttatttgaaaagattaaaaaatcaataagactatccatgttaagtaagaaaggaaacacaaattactaacattggaaataaaagaacatcacaatagatctcatgaacaatgaaaggcttataaagaaatattatgaacaaatctatatttacaatctgataatgtagctgaaattccctgaaaggcacagctagtaaaattcacagtagaagaaatagacagtctgaaaagaatggtacctatcttaaaaattgaatcaggaattaataaccttccaaagagaaagcaccagctccagttaggttcactagtgaattccacaaaacatttaaggaagaaattttaccagttctatacaatctctttcagaaggatgaaactgcagaaattctttctaattccctctatgaagccagcattaccctactacaaacaacagagaaagatattgcaagaaaagaaaactacagaccaagatcttgcatgcgtatagatgcaaaattcctcaataaaatatgagcgaatcaatgtattgaaaaattataacatgcagccaactgagatctatgacagatctacaagggtgttcaacatttgaaaatcaattaatataatccatcatatcagcaggctaaagaagaaagatcaaatgaccatatcagtagatgcagaaaaagcattcgacaaaatcaaacacccattcatgatttaaaaaaaaaaaaaaaaaaaagctatttgcaaactagagatacaggggaactttctaaacttgataaggaatatctacaaaaaacctacagtgggcatcatactcaatggtgagaagctagactctttgccattaagatcaagaacaatgcaagaatgtcatttcttaccactccttttcagcattttactggaaggcctaactaatgcaagaacaaaagaaaatggaacaaaacatataaaattgggaaggaagaaataaaactatcattggtagcagatgacatcattatatatgtggagaatacaaaagaattgaccaaaaaaatcccccaaacactggaactagttagtaattatagcaaggttgcaggatacaggtttaatgtgcaaacgtcarttgcttccctctgtaccagcaatgtacaagtggaatttcggattaagaacgcaataacatattagctcctctaaaaatattattagctcctctaaaaatgaaatatttaggtaaactaacaaaactgtccaagatctgtatgaggaaaattacaaaactgtgatgaaagaaattaactaaataaatggagaaatagcccgtgttcatggataggaggactcaatattgtcagaatgttaattcttcccaattttatctagagtcaatgcaatcacaataaaaagtccagcatgttaacttgtgaatatcaacaaactgattcaaaagtttatatgaagaggcmaaagacccagactagccattgcagtattgaaatagaagtataaagtcagaggactgacactatccaattttaaggcttaactatacaaaactacagtaatcaaaacagtgtggtaatagtaaaagaatagacaaatcgatcaatggaacacaatagacagcctaaaagtagacccatacatagtcaaatgatctttaacaaagaagcaaagaatatacaatggagaaagtgtagtctttcagcaaatggtattggaacaactggatgcaaacatgcaaaaaaaaaaaatctggaaacagatcttgtactccttacaaaattaaaactttcatagtcctcactgttaaagtgcagaactataagactccgagaaagtaacactggaaaaaacatagatgaccttaggtatagtaataactttttagatacrataccaagtgcataatccatgaaagaaataattgataagctggattttattacaatacaaaacctcagctctttgaaaagcagctgtcaagagaatgaaacaagccatagactgggagaaaaaatttaaatagacatctctaatgaaaaactaccatccaaaatatacaaagaactttaaaaactcaacaatacaaaaacagacaacctgattaaaaatgggcaaaagacctgaacagatacttctcaaggaagatataaacatggcaartaagcatataagaagatgctcaacgtcttaccatgttagggaaattaaaatttaaaaaaacaaacaaacaatgagataccagtacacatctattacaatggccaaaatccaggacactgacaccaccaaatgctggggagtatgggaatcaagaraaactcttattcattactgatgggaacgcaatatggtctcatcactttggaagacagtctggcagtttyttacaaaactaaacatagtcttaccatacgatccagcaatttaactgcttgctgtttacccaaatgaattaaaagtttatgtccacacaaaagactgcacatggatatttatagcgactttattcataattgccaaaacttggaagcagccaagatgtccttcagtagatggatggaaaaatataacaagtctttaaatgtaagtctttaaaacaaaattttgttctaaagaactcacgcatagttaattttaccattaatataagcatcttgttactattagtatttctttgaaatataattatcagtatttttcaagttgctagtaactcagttcatcatttattattattgttattgctattattattttggtctgtggaatctaaaatctggcatccatatgcatcaagtaaaaaagtcctctaaagcttgtttgcggaaattagctgaccaaagtgtcctgttttcccacattcatgttttggtgcattagtcttggtaacaaaagtagttccatttcatcattcctatctgtgcctaccactgcagctaacaatcaccatagtgcaatcactcctcacctcttgccaccttcttggctcgggcattgtgctttatttcgtgtgactcttggacctcgcacattgcttagcacatagraaatgcaaaatgaatgccattgcataaatggaygtgccatgaaatatttgctcatgcatagatggggattcactgcttgtgctttcaccttttcactacaagacacgtttttatttttcaggaattgtggagcaattccgaggtagggacagtcactctttttcatgatgctgttacagcaacagtcaccagtaaagtccagtgtccagatgggcacaagaggagttcacttcctgaaatcaattgcagtgacatctcctccgccccaccccaagcaggttgtcaattttacatttatccagactgcctcttctctaagcagttgacactgattttgttcgttgttattgctgagacttgatagctcactgtggcaatgattctgagaggtgtgaagaggggtttataggagaatcgcttgtggtggaggcaagctgtgtataattctgtgttgcggttgttagaaatccttcttcaccctttcctaaatctactgagaatctacttatctttctatcaaatgtttttgtgtgttaagaggacaaaataaagtagaatgtttttcattctcaaaagactagaaaatgattatgggattgtgaggaaaattacctaaacacacatactcagttcacactactcatctttggaaacaaactgacaccataaattacttatttccacagtatgatttccctgaagatcccatttatattgaggcattttgggggttaggaaatatactggaaattgacccgatgacaaatttacactgcaagtatgtataacgggattggatttctcttacactatcttttattctctcaagactttcctggagcccaggcaattcgctgaaacttcctcttattgaaagtgtaaataaatgttgttgttttttaggaatggcagtctaagcctgatatacaaactgtagctaatgaaacagtagctacctgctaccagagtagaaagctgtaactaggataactggatggagccctggccacatgtgaattgcctgctgaggttacactcattttatctttgtcagataaagatggaaattggacaaaacaaataaatatttatttacatgcaaatatatgggggttttcatatgtgtagttaatagattgtttccaggttcataagaggaggttataaaatatttagcaacacatgacttcatgccaactatgatttactgagaaatgaagcgtttcttggcaaccatcatagcacgaataaagatttatgacagtgtatctactttgtgtgtttgaggagttaaggctgataaatgggctgaaaatagtcaactcattattctcatattcatagactatccawaagtgatatagttactgcttcctcactaaatcttagatgggaaatctcatacttcccaaaaatccctataaagaaaagatgactattgtatttaaaagggctatataataaccatataatatatgttttatgttttttaatatattttgcagtatatgtggttctttatttccacattattgccatataaaccatttctgtcagctgtctttcccatggttatgaaggtcatcaaagctcgtcattacctggctcctgtattttaggacacaggtccagccaactacgagagggcttttggccatttttgcacagatgggcttatatataaccagccaagtaatgatacattcattgagcaccaggtgttggtgatgaaaggaatgtttgcagctaaaaaatattgataactctgtccaacttgagtttaccctcatgtattttggtttgggaatggtgtttctatcactaactgctggttttctgaaaagaaactagatttgtacatgtagagtgaggaagagtatttcacagtcaccacagaatagcaggtgcctgatatcacttagtatgttctgagtagacagattgacccaactgattggaaaagtgtaatatgagtaacagccaccatgcctctaccacagtgccttgagagatgccatctagctggctggtactgagttaggtgattggggaaaagaaatttcttgcttatgtgattgagtccccatgtaggaaggcacagagacactgcacaaaacccacaagttgtaaacgatgtccagttatgtggaatggcttagatcaagttcccagccgtccagaggaattagcaacagaaccccaggaggctgatttttatacctcctgttctaaggagaaggttgtagtttgtacctctcagtaacataaaattaatgttttcctaggcttccactgcagggtagaaataaattttttcgcagaagtcactatatttaatgagtatacagatctatgtatataaggaaaataacttcatttaatgcaccaagaagtagaatggaattgtctatggaatagagcacgttgcgtcaaatgtgctagccacctagatctcagtttattacgtatttcattgtacatacttattgtcattcgagaacgcaattgaagcttgctcttttatgtgtatagaggtagactaggtttgcaagatttatgggtcatttcagttgtgagctagctacccgctgatatgagtccaatgtcaaggggcacatgtaagtggttggattgttttcagcgtgatttccttttgaagcatgatgatttaggtgctttctccatgttaatttaaaaaaaaaataaaacgtttttcccctagaaaattgtacaacttaatcataaacttctcctgtatctaaaaatatattttgggggtaggctgtttttcatacttatactgttcccttcacatatactaactaatgctgaatagtgttgttatctatgtaaatataaaagtattgaaatagcaatacatgttaacgtaactattaaatttataacaaatagagagtctgctattcttcatttaattagctgaaattacttataccagttacatgtaaatttgattaagaggagctaaaaattggggaaaataaagacgcaaattaatttcagtaaatttggaataccattagagattacagtattatttttgatgsatcagtcaaccacattttggcaaatcagccaaaaagaaaataagcggggtttaaagtaaagtatgtagatactgctggcttgaagaaacatataggaaccttttatttgggtcagttcaataaaggtccagtaaccagaatgggattaatgttcacctttgactttggaaaggtatttgtccagtgcctggcttattttgcttaacataatgacttctagttcatccaggtttctgcaagcataggatttcaccctttttgtggctgattagtactcgtgtgtatgtgtgtgtgtgtgtgtgtacacaccacgttttctttatccatttatctgttggatttacacaggttgactccatatcttgacctattgtgctacaataaacatgggggtacaggtatccctttgatatgctgatttccttcctttggataaatacctagtcatgggattattggatcatatggtagctctaattttggggattttttaattttttgtgaaaatggggtcttggtatgttgcccagacttgtctcaaactcctggactcaagcagtcttcccacctcagcctcccaaagtgctgggattacaggcgtaagccaccttgtgcttttagtttttggagatgcctgcatactgttttccagaatggctgtactaatttacaggttacaccagtgtataagagttgccttttctccacattctcaccaacatttgttattttgtgtctttttgataatagccatactgaggtaagatgatatcttattgctgtttggacttgcatttccttgatgattagtaatatttaattttttttcatatacctgttggccatttgtatgtcttcttttgagaagtgtccattctaaccttttgctcactttttgatgggtttatttgtatttttgcttttgagttttttgagttccttgtgtattctgggtattagtcccttgttgaatgaatagtttggagatattttctcccattctacaggttgtttctgttgattgtttcctttgctgcacagaagcatttttgcttaatatagtcccatttatgtactttttattgcctgtgcttttgagctcatggccataaaaatctttgcctagaccaatgtcctgaatgttttccttgttttcttctagtagttctatactttggggttttatgtttaagtcattctgccttgatttttgcatatagtgagagataagggtctagtttcattcttcttgtatacatcttgcctagcactttttattgtagtgtcctttctccaatgtttgtcgttgttacctttgttgaagatggttggctgtaaatacactaattgatttctgggttcactattttgttccattgctctatgtgtatgtttttataccagtaccctactgttttggttactatagctttgcagaatattttgaaatcaggtagtgtgatgcctccagctttgttcttttgcccaggattgctttggctactcagggtcttttgtggttccatacatattttaggactgttttttttttttctatttctatgaagaatgatattgttattttgatagggattgcattgagcagtcattttaacaatattaattcggtcaatgagcagggcatgtctttccattggtttgtgtcatcttcaatttctttcatcagtgttttgtagttttccttgcaaaggtcttctacctccttggttaaatttattcctaagtagattttttggtagctattgtaaatgggattgctttctttatttttttttcaattagtttgttattggtatagagaaacactattgatttttgcatgttgattttgtgtcctccaactttactgtatttattagttctaagagttttttggtggagtctaggtttttctgtatataagatcatgttgtctgcaaagagggacaacttgactttcttttttccagtttggatgacttttctttcttgtacctgattgacttggctagtactttcagtactatgttgaattggagtagtgagagtgggcatcctagtcatgtttcagtcctttagaggatagacgttcaccttttccccattaggtatgttccttctatgcctagtttgttgatgttttatcatgaaggaatgttgaattttgtcgaaagctttttctacatctattcagatgattatatgggttttgtccttcactttcttttttttttttctgcacaccatgcttctatatgtccttcattatcttgatgtgatgtatcacatttattgatctgtttatgttcaaccattcttacatccctgagaaaaatctcacttgatcatgatatgctattttgttgaggatttttgcattgatgttcataacgggttgctatagtttggatatttgaccacccaaatcttatgttgaaatttcatcaccaatgttagaggtagggcctagtgggaggtgtttgggtcatgggagcagttcctcatgaatagattaatgccctgtctcaggtaaggggctgtattagttctcatgaaagctggttgtttaaaaaagagcctggcaccttcacctgctcccttgccttctgtcatgtcacatgatctctgcacatgctgtttctcctttgccttctgctgtggttggaagcagcctgagcccttcaccagaagcaggtgctggctcagtgcttcttttacagcytgcagaaccrtaagtcaaataaacccctgttctttataaattatccagtctcaggtgttccaatatagcaagacaaatcgactaagacagtgatcttggcctattcctttcttttgttcttgtatccttatctggttttggtatcaatgtaatgctggccacgtagaatgcattaggaagaatcycttcctcttcacctttttgaaatagtttaagaattgcttttagcttttctatataaatttgatagaattctgcagttaatccgtcttgtcctggacctttccttgttgggggacttttaattactgctttaatctcactactcattatgggtctgcttaggttttctttcttcctacttcattcttggtaggttgtatgtgtccaaggtttatatatttcctctagattttccaatttgttggcatgtagttgtttataatagtctctaatgattctttgtatttctgtggtgctagtggtaatgtctcctattcgtgtatgctttttttatttgagtcttctatcttttttcttggttattctaactagtagtttgtgatttttatctttttcaaaaaccaagttgttattgttgtaatcctttttacatttttcttgtctctatctcatttagttccactctggtctttattatttctttccttctactaactttgggtttcctttgtcctttcttttctagttctttaaggtacattgttaggttgttaatttgaagtctttctacttttttgatgtaggtgtttattgctataaacttttctcttagcagtacttttgctgtatttcacgggttttaatatattacatttccatttttaattctctcaagaaattttttggttttcttcttagtttcttccttgacctaatggtcattcaggagcatgttgttaaatttccgtgtatttgtacagttcccaaagtttctcttgctatcatttctagttttattctgttgttgtctgaaaagatattaatatctgatatgattttgattttaacaaatttcttgagacttcttttatgtcctaatatatgatctattctagagagtgttccatgtgccgatgagaagaaagtgtattctgcagcttaataatatgttctgtagaagtctgttaattccatttggtcataagtgcaatttaaatccagtgtttctttattttctatctcatagatctatccagtgctgaaataggggcattgaagcccccaactgttgtatcagggtctatctctccctttcaatctataattttttwaaaaatatatctgggtgctctgctattgggtacacatatatttagaattgttacatccttttgctgaattgatacatgtttcattatatgatgatcttctttgtctctctctctcttttttaaagacagaatctcactcttttgcccaggctggagtgctgtggctcgatctcagttcacttaaacctctgcttcccaggttcaagcagttctcatgcctcagcccccctagtagctgggattacaggtgcgccaccaccccactcaactaatttttgtatttttagtagagatggggtttcaccatgttggccaggttggtctcgaactcttgacctcaagacttctgccctccttggcctcccaagtgctgggattacaggcgtgagctaccgtgcccagccttctttgtctctttttagattttttgacttgtaatctgttttatctgatgtaagtatagctactattgtccacttttggtttttatttgtatggaatgactttttctatcctttcactgtcatctttatgtgtttttataggtgaagtgtttttcttgtaggcatcatatagttgggccatttttttgttgttgctttgttttgttttgttttttgagacggagtttcactctcatcacccaggctgagtgcagtggtgtgctcttggctcactgcaagctccacctcctgggttcaagcaactctcctgcctcagcctcctgagtagctgggatcacaggtacccaccaccactccaggctaattttttgtatgtttagtagagatgggctttcactgtgttgggcaggctggtctcaaactcgtgacctcaggtgacccgcccgcctcggcctcccaaagtgctgagattacaggcatgagccaccacgcctggccagttgggycattttttaaaattcatttagccatttattatcttttatgggggaaattaatccatttacatttgaagttattattaatgagtaaagacttatttccatcattttattagttgtttctggttgtttcgcatatgctttgttccttctttcccttttgttgtttatcattgtggtttggtggttttctgtaatagtagcatttgagtccttcatttctcctttgtgtgtctgctctaccaytgagttttgcacttttgtgtgttttcgtgatggtacatattgtccttttccttccagatgtagaatttccttgagcatttctcataagacttgtctagtggtgatgaattccttctgtttgtgtctgggaaagacttaatttctcctttctttttgaaagatagctttgttggtagaatattctttcctagcatgttttttcattcagcactctatatcatcctattctctcttgcctgtaaggtttctgctgtgaaatctgctgtttgtctgatggggatagctttatatatgacatgacacttttctcttactgtttttagaattctgtttgtctttaacttttaacagtctgactctaatgttccttgaaaaagacatttttgagtygaatttatttgggattcttggagctttttgtatctggatgtctaagtctcttgcaagacttgagaagttttcagatattattttgttaaataggctttccatgtctttgatcatcacttcaccatctggaacaccccaaattccatttgtttgctttgtggtgtcccatatatcccataggcttactttattttttaataattttttaaaattttttaactgggttatttcaaatgatctcttttcaagttcagaattcttttttcctctccctgatctcatctttttttgaagccctcaattgtatttttatttcattcattgaattctccagatccaggatttttgtttagacatttttaaaaatatctttctctttgtttagtttctcattcagatcatgaattgtttttctgatatttcgtatcttttatttgtgttctatcatatctcattgagctttttacagtgcctctgatgtagcagttgcttcttccaattttatggattggcttttttagaaaaagactacttttttctacagatgtatttataatgttgctttggtaggtcaccttggctttgattctagctgggcacagcagtgtaatgtctcaatgatttcttcagctgtaatcagcatcagttgtgtctgtgatctcttcagtggctcgggcagcacttgttagtagaggttgcagtgaagcttttgtggggacagggacaccaagtgggctggtcttcgggcacagtggtggcaccagtggtttgggtatgccaaactttgggcctccagatagtctgcttatgtgctggcagtggtggcagtgggctgggagggcaggctggtccttgggctcctgggtggtgtgtggcatcattcatggcaatagtagtggcaagccacatctctggttcctagtcagcatatgcaggcaccagtggtggtggtggcagggtaagcaagccagtgctcaggcctccaggtgatgcatatgggtagatggccagcagtggtgatggcagccggctgagtgggcccatcctcagtcctctgggagttgtgtgtgagccctggtggtagcagacagggagggtcgttccccagtcccacagtcaaagtatgtgggcaccggcaggctgagcaggcccatcgtcagggccctggaaggtgctcatagccattaatagcagcatgtggggcagatcaatccccaggtctccagatgaagcatgcaggcactgtcagtggtagcatcaggtggggcagtcctgtcctcaggtccccaatagtgtgtgtgggtgcaggctgtggcggctgggacacattggtccccaggtccccatatagcatgcttgggtgccagcagaggtggtggggggtgtaactgacctatcctcaagccccagatggtatgcacaggcatcaaggacagggcagacctgttgacaggccctgcaatcatacacagttgccagtggcaacaggtatggtaggttgacccccaggctcccagttgatggtatatccacgcactggtgggaacagcagcaggaaggcagacctgtcctcaggccccctgatgtgcatgggcaccagctgtaacgggtaaggctgtttgatccccaggccctggatggtgtatatatatatttccaggcactatgaaagtaagaaaggagtaagtgtttatttcaaagtgtcaggatatcataatcttcacatatccatcaatttaattcatgctatctaaagcttaaaagagatgtgtgtgattatgtccatagtgaatccaaatcacttgatcaaacttagaagctrtttgtactaaagctcattgtatgtctcctaatgctatacctaatgttaaatgatgagttaatgggtgcagcacaccaacatggcacatgtatacatatgtaactaacctgcacgttgtgcgcttgtaccctaaaacttaaagtataaaaaaaarataaagctcattgtaaatatttttttaaaaatcagctaaattaaacatgataaagrcagctaccataaatttgattaagtaacttaccaaacatgttataataatcaggcagtcaatgaaaatgctctgtagtactggtattatccattgggtagctttaacccacagaagatcttttctgcaatttttttttgggttccgcttctctgtgtttatgatttatatattgatgtcctcactgtcgtgttcatggctctgagctttcactcatgatttccattttattaataggttttctctgtttttactcttcttttttagcttttaattaaattttaaaattcttatattctcaagttatgtttaaacctgattgaaacactttattgtgtcctagttatgtttcctgaaaatttttctttttatttatttattttattttattttattttgtttttttgagacggagtctcgccgtgttgctcaggctggagtgcagtgcgggatctcgcctcatgcaacccctgcctcctgggctcaagcgattctcctgcctcagcctccttagtggctgtgattacatgcgcgccccactacacccagctaattttttgtatttttagtagagacgggttttcaccacgttggccaggctggtctcaaattcctgatctcaggtgatccgcctgcctcggcctcccaaagtgctggcataagccaccatgcccagccctgaagaattttctttagattaaaaaaaaaattttttttcccctttggaagaactgactcttcctgacttttccccaacagtgatggaaggccggggccaccaacttttctctcctggtgggggcatgagctgtacaggagtcttttgccctcacacacaaactgtgcccatagatgccatcgcctgagaattgttctataatgataagcctgggctaagagggagcatcgttcactctaacagttcctcttcttgccttgtgggatgtttctttgtttttacatatgcctcttagcaaccggatgatgctgcactatttgccatcctccttctttgcctctccaacacagcatacatttctcaaaaaatagaggagagataaacaaataaataactttaatggtgtccttatgacacaaaaggtttgatgttatttaacttattttagatgcagtattaattggactccgaaatttttcagtcaatctatgtaacatcagcccttgatatccacagcttctgcatttttgggttcaatcatcggctgaaaatattcaaaaataaaaacaaaaaataacacaatatttaaaaacaaatttaaaaagtaatgcagtgtaacaactatatactcagcatttacattgtattaggtattctacatgatctggagatgatttagagtacacaggaggatgtgcttaggttatatgcaaatactacaccatgttatatcagggacttgagcatctgcagattttgctgtctgcaggggrtttctggaaccagtccctcctggatactgagggatgatcatatgtataaagcacacatgtctacgcccatcgatatatattttacataagtaggatggctggttgagtttttaattcttccattggttatcacttgtactggcatgttaaaagaaaaaactcagtgtaacatttattttccagttttattcatcttagttttccggtatatggtttataggtaaatttacaaattacattttattttcttcttttcctaatgaggaaataaagtaaatatatagaatgtgagaaagtattaaattgtgttaagcacttgcctttgcccagtttrtcttgagtggaatgtttatgatggcttgtgctgcctgcaataaagaagacacgaataaaaagaagctttaaattctacttgctaaagaaacaaggacttttgaacgaaaaaagtttagattccaagtctaaagtcatttaaaatgttttaaagctaggctgtttttttattgctcaatatttctttttgctcatagccaacaaaccagttatattatcattttgtgaagtattgctatcaaaaggtatgtttctcttgcactttccctgcctagactggacactgtgaagttgctgtggctgcatttctcaggtctggctgttccgctctcacttggtccagggagtgggggggattttccaaataaacagcacaatggattcaacagcagcagtaaatgttaggaggaatatgtaggtgacagaagctctcgtcgcacctgacttctcaatgaaaccagtgatgaacccttccagtacaaaaactaagtgaactacacctccagctgttgagccctcctagttctcaccccactccagctcttcccctctctcagttgtcccaattgtaactcaaaagatggaatatcaaagtcttaaaaaaaaaaaaaaaaggacactgcagactaaccaaagagcagggagagaacagagtgaattacttaattcccaagaatagtgatgttggggagggaagacctaaattggggmttagctcaagagggtttttagcttcacctaggaaagaattcaagaacaagctgacagtagaggaaaaccactttattgaagcagcagtgttatagctccggtggtgttacagctctgtgactgcttctgcagagcagggctaccctgcaggcagagagtagcagctcagggcagttctacagtcatgtttatacctacttgtaattacatgcagattaaggggcagtttatgcagagatttctaggaaaagagtagtaacttctgggtcattgggtcattgccatggaaagggctggtaactcctggatgttgccatggcaatggtaaactgacatgacacactggtggatgtatcttatggagagcttaggcaccggacataattgaggactagctaaaacagggacaggatcaaggaaggcctccagggttgaagatagatacactgaggccgaaagacatctagggmtttgaaaggcaaaatgagtggacaaagcagaggaagaagacagatcctgctgagctcaaaccacaagcaaggggccagagtgaaggggggaagtccagcccctcctcaaagggtctccatggcaggccaagggagaggtgggcaggtgaggtgggaggcagtgaggcaaggaggttagaaagtctacaaggccttgctcggccagtgtgcttggcctggaagataattaacccagacagtgaaatgattacatagctcgtctacattgtttgccattgttaattagaataagtgttttgcacatttagaaataaatgtaaaataatactgtcttctagagactccctagaaaatgttaggaatatagtaactcatctagggatggtgagtcataaggaattttcaaaattgtgacctgtctcctcagtttctcgtaaataattaccagctaacacatgttcgtttatatgtcctctcctggaggtcaaatcatggagtcgaacactcggtggtgggagattacaaaaggaaatattccatgttaacaaccagatattttaacatcttatttatctgagcacaaaagctggaaagcttggcctaaacatgcaactagcaaatrttttgggtgccgttatgttcttgaagctgacatattatgagagcatgtgaaacctttagcttctaaaggagagaaagaacagctagaataataaatgttcttttattgtcgggctaggctacaaaattgaaagggaagagatatgctcgatttataaactgagcagatgacatcgcataagtcactgcgattatgttgaggtgagacaagttacaatctccaaacgtttgttggaattgggagagaaatgcaggggaagctggtaccacaccagagccactagtccaaaacctaaggaaagaaaaaaacatggttgctgtgttgtgtgtaatcccgatccagwttcccctgagatggccattcctgcccaggaatgagtcagaggtcagggagggctgcttcatctggccagcagggtcctcctgctcactctcagggaggctgtgcagcgtggaactttgacaactgtcccatagttctaragcgtttggagtcagggacccttcatgaaatgctaacagcaagatcatatgcacaagtaaagaaatagcaacaaacatagtggaagcatttgctctgaaaaattccccagtgatagattatctaggggacaacgcctaaggtcaaagstttctccaagataataaagataataaaggaaaatccttgttttgcagtctgacagataatatggaaatcagtcttggaagtgcctatgggcactgctaaattaaagaatgaaaaamacagccagggattagggtggctcacacctgtagtcccagcactttgagaggcaggtggatcacctgaggtcaggagttcgagaccatcctggccaacatggcaaaaccccatctctactaaaaatacaaaaattaacccagcatggtagcacacgcctgtaatcccagctactcgggaggctgaggcaggagaattgcttgaacccacgggacggaggttgcggtgagccaaggtcacgcctctgcactccagtctgggcaacagaatgagactccatctcaaaataaataaataaataaaaattaataagtaactggggaaacatcaggcatagctggatccagggtacaagtgatctctttcttggagactgtctttctctcatcactttttccttctgagcaccggcttggttctcagacaggtatctcattgtggtcacatgtatgagcctgttttactctgaccgctgaggccagagctgcctgttcacccctgggctggggaggggaaaaggaggtacagccatctgagcttattggagcaagtaccttgagctgggaaagagaatattagttttcctagttttcacgcattttataagggtcagtaatgactgcaaaccttttattttattttttttttttttattatactctaagttttagggtacatgtgcacattgtgcaggttagttacatatgtatacatgtgccgtgctggtgcgctgcacccactaatgtgtcatctagcattaggtatatctcccaatgctatccctcccccctcccccgaccccaccacagtccccagagtgtgatattccccttcctgtgtccatgtgatctcattgttcaattcccacctatgagtgagaatatgcggtgtttggttttttgttcttgcgatagtttactgagaatgatggtttccaatttcatccatgtccctacaaaggatatgaactcatcattttttatggctgcatagtattccatggtgtatatgtgccacattttcttaatccagtctatcattgttggacatttgggttggttccaagtctttgctattgtgaatagtgccgcaataaacatacgtgtgcatgtgtctttatagcagcatgatttatactcatttgggtatatacccagtaatgggatggctgggtcaaatggtatttctagttctagatccctgaggaatcgccacactgacttccacaatggttgaactagtttacagtcccaccaacagtgtaaaagtgttcctatttctccgcatcctctccagcacctgttgtttcctgactttttaatgattgccattctaactggtgtgagatgatatctcatagtggttttgatttgcatttctctgatggccagtgatgatgagcatttcttcatgtgttttttggctgcataaatgtcttcttttgagaagtgtctgttcatgtccttcgcccactttttgatggggttgtttgtttttttcttgtaaatttgtttgagttcattatagattctggatattagccctttgtcagatgagtaggttgcgaaaattttctcccatgttgtaggttgcctgttcactctgatggtagtttcttttgctgtgcagaagctctttagtttaattagatcccatttgtcaattttgtcttttgttgccattgcttttggtgttttggacatgaagtccttgcccacgcctatgtcctgaatagtaatgcctaggttttcttctagggtttttatggttttaggtttaacgtttaaatctttaatccatcttgaattgatttttgtataaggtgtaaggaagggatccagtttcagctttctacatatggctagccagttttcccagcaccatttattaaayagggaatcctttccccattgyttgtttttctcaggtttgtcaaagatcagatagttgtagatatgcggcrttatttctgagggctctgttctgttccattgatctatatctctgttttggtaccagtaccatgctgttttggttactgtagccttgtagtatagtttgaagtcaggtagtgtgatgcctccagctttgttcttttggcttaggattgacttggcaatgygggctcttttttggttccatatgaactttaaagtagttttttccaattctgtgaagaaagtcattggtagcttgatggggatggcattgaatctgtaaattaccttgggcagtatggccattttcacgatattgattcttcctacccatgagcatggaatgttcttccatttgtttgtctcctcttttatttccttgagcagtgggcaaaccttttattttacttttcaggaatcacttttaacatcttctttaacaatctcccttttgctcttaaagttataaacatcaaattatggctgagtggcattacacctggaataaacttcaaggcacactgaagaacttacaatcaggcagagaaggggcggatgtgggttgttatattagccaacttttgttttaagttagacttcttgaagacatgtaccataaactgacagcctccttctcagcaaagttgtgacatggttttgctttgtgtggagtatattgattttctttctcctgataaactttgcacatcatctagaggctttattgacatcttgagagaaaacaaacttgtaattgaacatggtgatagactcattaactttttaggtctgatctgtttgactaggtgtaacttaattgtaaaactggcattgttaatttaacaaagtgtacatttattatatagtcctccagtttgcatagttactttgtatcagaactgataaattcagttactgggtttatgtratacccagtaagtcgaacacttcagtatgaaggctaagacacaataaagaagtcacaagataaacaggctttgccatggctattttaaaggctttttttatgtattaggtagagaatgttgtggttatgctttatctggcattttttggtttgtttttgtggagtttctgtttgtttttaaagacagggtcttgctatgttgcccttgctggtctcaaattcctgggctcaagcgatcctcctgcctcagcctcccaaatagctgggacaatgggtgtgttccaccctacccagctgacatgttttaacttaaagaaaattaaaactttattattaagattaataatgaaacctctgcatggataggaagacttaaaactagtagttgtgtcttagaaaagaatctgtatctcactaacgaggaactattctagcctggacagtttctgaggagagagtaactggggaatatctgttgctgttagctacaaacaggattttaggtttgtgagaggcatttagattgatttgaagtgacaggctgtctgtcttaacttggtaactgtgagaatctttctgatatagatgtaagatacttattacgagttcatctcataagcagtaaccacagccctgtatcctgttaatatcatcggaaaatttggatggatagtcttttgacgagtatagttgagtttaatctcaatatacaatgtatatttgtgtgagtatttctgtatcttcaatacatatttcacaacaatatctgaatgtgtatttttgtttttagtggaggctgattagaatgtgtcaccactaacaaagggtgacacttggagaattttgatctcacacagggtccacctcgtggyggtgcagcagtcatctgctggtggctttcagacccaagccaccttttccccctctctgctctgtaagttggggctgtttctggagatgggagggccaagagaaggcagaagccaggggcatttctccctctctctctaggggacatctctggcagtggcttcatcccattcattgtcagactcccaaccagatagcccagctgcagagctgtggtgactccaataccttctcccattgtcctctagccccagatggcagctgtgcaataatgacgctaatctcaagtggcttcctttctctgtttagttcttctgtgcttccactcctctataactaatctcattcaattccgtcagttgaactacctggtgtgggccctgttttcctaactataccctgagccatgcaaatagctatgcagttacgtgttaagtacaaacyctataccctttgcaaccttgttagtggaaagtgtgtgtccccattactttatcaagagaaggatagtttttttttcttttgggaaatattaactaagaaggatttggagacaagaatggaatttaactctttgtgaagatagatacaatatttcgtttggaaaacataattgttaaacaatatctataaacataaaatttaggatgttcaataaaagctattggaaggatcatgggtaactaagtcaggtcttactgctaatgattttttcagatttgaccataktaggactgtgataagcagggctttcaagccagttgtcatctacctttatagtaatttgaaatctatcaaattgtatttgggtttggctaattcgcttctgatcgtaaatgtgtttatacagttggattcttggtgtcaatctaattttcagattttgctgggctatttattccattcttcttgctctagttttcctctttgtgagtggcactgcttatgagtcatgggtgaagggacataagtgagcaggagtggcttccaggaataccacagtccagttgacatcttcctgctcttctcccctggtccccctttgatttgtatgggtctgatgtgatttggagggtcaggcttygacagtgaggaggagagggcaagtgagttatgatgaaagagaagaatggaaggaagggaycacagccttgtccagagaaatggtaaaagcatgagtagcctttctaagaacttgaggaatacaactttgttgggttttccatttaatactaatgaagtgraaaacggtccgggcgcagtggctcttgcctgttttcccagcactttgaaaggctgaggtgggtggatcacttgaggtcaggaactcgagaccagcctggccaacatggtaaaactycatctctactaaaaatacaaaaaattagccaggcatggtggcacacacctatgatcccagctattcaggaggctgagacatgagatttgcttgaaactgggaggcgtaggttgcagtaagccaagatcgtgccactgcattccagcctgggttacaggrggagaccgtgtctcaaaaaaataaataaagttgaaaacgcttatggcatttaacagtgtcacaatataaagccaagcacattttctaaagccttatttttttcaagtataaaatcatttaggctatcatttggaaaaamaaaaacaaaaaactggccatttgctgttatagattttagctctcttcgctaattaaggtttcccagaagtgactattggtatacaaatgatgtgagtaagcccctgggaattatagctcctggttaggtgggggaatctttctgtagctgatttatctgtgaactaccatttgtaagaggtggggtgggccgctctgagactcagtttacccrccgtaaaggattctgttccagccacactagaattgacagctgggcttcctgatgaagaggacactgcccggctgctcccccagaatactctgcttccctagtgaccgagaagcaacttccccggccaacccctgcacacgctagaactcaaacaatgccaccttgagcagccttgcctcaggcataaccactgtcgctcagcacagctggagatgtttcttggccacttggcttgggccctgctatgccccagtgacctcacagtggtgcagtggtgccagccttctgaccagccttcttggactccagctagaaagctttcctgtctttgacttttttaattttttaaactgagtaattaagagaaacaaaacagaattcagaggcagttaatcccaaagaatcatgccactgtctgtgagatgacacccatgtgtgaacaagccatctcagacacccaaggtggaattttcgaaaaaggcccttctcacttctattgtgtgttcctttattgtctgctggttttgaatacagattggaagtgtcagaaaagacttcaacaatccagcccactgattgtacaggagcagaaatgaccagatcggccgggcacagtggctcacacctgtaatcccagcactttgggaggccgaggccggtggatcacctgaggtctggagtttgacatcagctgattaacatggtgaaaccccatctctactaaaaatataaaaaattggttgggcatggtggcacatgcctgtaatcccagctattcgggaggctgaggcaggagaattacttgaacctgggaggcagaggttgcagtgagccaagatcgcaccattgcactacaacttgggcaaaaagagcaaaactcccatctcaaaaaaataaaataaaataaaataaaataaaatacaataaaataaaatacaataaaataactgcaaattagcctgcaagaaaaggtgttattattgagaagcaattctccatgggtctgtcrtttgtccgctcatctctgagggagacaccaacttgttctgacccatcttttcaaggaagttttagagcaaatgaccttgaaagtagagaagatagggccgggcgtggtggctcacacctgtacaatcccaacactttgggaggccaaggtgggcagatcacgaggtcaggagattgagaccatcctggctaacatggtgaaaccccgtctctactaaaaatacaaaaaagtagccgggcgtggtggcgggcgccttgtggtcccagctacttgggaggctgaggcaggagaatggcgtgaacccgggaggtggagcttgcaatgagccaagatcgtgccactgcgctccagcctgggcgacagaaaagactctgtcttaaaaaaaaaaaaaaaaaaaaaaamcaaaaaaacagaaagtagagaagataatgtttctctccagatcaaaaggcagatttgcttattatgcagtataataaagacaatgtttcccttcaggatgaaaagatgacttgcttagaactacttaaagaagatttgagtttcctaagttcagagttctcatttgtgatgcaaaaccactgcacctgtagaatctgacttagcctatctacttcaaccctsagagagacgtgtggaggggaactggtgtaatatgatgctcatgcttctttctccctgtgctctgagttctgcagtcctttgtctctgatccaggagtctcttgtcttctgtcagcttttatgatactgcagcaaactaacttgctaacttgcaagctgggtaaaatcccacattcttcacagttcttgccagttattctagtactacaacaaaaacattctttcataaaaattggtggagaaagcactgaaatttactgttgaggcatacatatttaatatagggttggcaatgtgagttttagttttatcaacactatatgtgttactagaatttttcaactatctgtaatttcttaaaccattatctataaacacctacccccaataaaaaggcttttatctggctgaattttatctggtgttagaacaatttgtgatttgttagctgaatgtccactgcagctttctgtaagctaagaaaaaacgtaagtgctttctatctatttatctgtatatgaaatactttttcaatagtcctgccaactcagctgttttggaggaattactttatgttttgaaagaggatttttttcatgtctgcaaaaaccagtcgtagctagctcagcgtatttcataagggtcagtcatgtccttcagacttttcgttttggtgttcagacattgttttaaatctctttctcaatacccttgagctggccattgaaggatttgtcacatttcaaaagattgagtaaaaggaatgggatcctatgttcaggaaaacaaaacataaccaaacaaaaacatcagccagcatgatttccatgctgctgtggggaaggtcctggactcatgggcaggactccacaggcatgcctgagcctgggcccatcacacacactggacatcctgtccactccagcaagactccacacacatgcctccatgggctgaggactgcaggtgtgaggaccggctgatattccactgccccagataggataggtttagttaactaaattataccacctgggattggtgagacttgtagtgaagaatagcctgggttccaaatccctggctttgggatactctcatcaaaatggcacactcagccaggcacagtggctcacacctgtaatcccagcactttgggaggccgaggcaggtggatcacttgaggtcaggagttcaagactagcctggccaacacggtgaaaccccatctctacaaaaatacaaaaattagcctggcatgatggcgggtgcctgtaatcccagctactcgggaagccaaggagggagaatcacttgaacctgggaggcggaggttgcagtgagccaagactgcactaatgcattccagcctaggcgatagagtgagactctgtctcaaaaaaaaagtaaaatggcacactccagatttttgagagtcacatattttacgtaagatgtagcattattttcagacacggtaagcgacctgccacagcagcggtcttgcgagagagtaactagagtttactcactttgcctctgacattggtggagctcaggtttcccaagtgtgggcccctgagcggtaggaacaacatcacctggcaagttgttagaaatgcgaatcttgatgccatcccagaaatcacaaaaatcccagggtgggttcagcgatctctggtttagcaagtccrtgccccctcccacccgagtgattctgatgcacactacagcttcagaccaagggctgttgctcatggtgtcacatgtcagaggaggatgaggttagtaaattataaacaggaaaagaagaaatcaaatgttgctgtcaaacrtataaggggataacatatagcatttattaaataaatgataaataacattgattaaatagcgttgattaatctattgtttttcacttaagaagtatatgtcaggctgggcatattacaggctcacacctgtaatcccagcactttgggaggccaaggcaggcagatcacgaggtcaggagatcaggaccatcctgactaaaatggtgaaaccccgtctctactaatacgaaaaattggccaggcgtggtggcgggcacctgtagtcccagctactcgggaggctgaggcaggagaatggcgtgagcccaggaggcagagtttgcagtgagctgagatcgcgccactgcactccagcctggaaggcagagactccgtctcaaaaaaaaaaaaaaaaaaaaaagaagtatatgtcatgcctatcctaatgtcagtcactgttagaatacaaatatgaataaagcattctacaaatgtctcatcatggcctgcagggaaaaatccaacttgccacatattttgtaaataaggttttgttaggacacagccacacccattcatttgcatactgcttatggctgtttttagctacaaggccaagttgagaagtgtgacaaagaccatataccctacaaaaccaaaagcacttaatgcgtaatatctggcactttacatcaaagtttgtcaataccagatcaagtgttttaagggaaaatccttcccacatttcaggtagttaaacgcaagtggaattaggagtatgtgtggtatgcaggggttattctgtcatccagtaaaatatatgtattttttttttcagtagcaaaaaatttagcttcacagatgttagtatcatggaaggcatgcagactgtgggacaagaagtaaagcaattgctggccaaacgccttggtgtgtgagtgaacagaaggagagtgagaacaaatacagaagttagaacagaaaaaagtgaagaaaaaacgtggttgagaagggagaatattatcaatcaaaagaacgtgacctatgtgaaaagctaaaatgagggagtatgtggcaggacctggctggggaaaggaactaagaagcagcaagatactggattggagcattccagttgcctggcacagagggtgggcggcagagtcttcgcaggaatgctggggtgttgatgccaggcagaaaaggggcagactccagatggggctgggagagccatgctctgctaaactctcggctggaatttagtggggtgatctcagctcattgcaacctcaagtgattctcctgcctcagccgggctcaagcgatttcctgcctcagcctctcgagtagctaggattacagtcatgtgccgccatgcccggctaatttttgtatttttagtagagatggggtttcgccacattggccaggctggtctcgaactcctgaccccaggtgatccgcccgcctcaacctcccaaagtgctgggattacaggcgcgagccaacgcgccgggcctctgctgcacttctgtgtctaccaggagtccatgtgtacttgtgtggctatttacagtagggctctctcaattcctgactccgctaaatgactaaccatgtagtgatactggagaaaaagcactggatttccctgcggggagcttgggttacttcttggcttcacctcttactgtttgacccgtgggcacctcatttcatggcttcacgtctccctttcctcattagtgagaggcttcctcccacctccacatcgtgtgattcttctagactcacttattatcatcgaggggcatggcttaaagaaggtcacagcgtatttctccagctccctcgcttaaagagcaaaagaatagcagagactcagggcccttctaaaacagaattgttgaccactttggcacaaggtcatccgttcctgggaaaggtttgatgctgatttatttccatctcacacctcgtaacagatttcttctcttgtccaaagagattgtttactgtggaaacatttagaggaaaaatgagcagccgggatccatgtgtgtgatcatatttatctttctttcaggaatttttctttaaatgtggagcacaccccacctctgacaaggaaacatcagtagctttgcacctgatcgcaacaaatagtcggaacatcacttgcattacgtgcacagacgtcaggtaaggatctaaaaatagtgtcacttccctccacggacgtgaggtaaggatctaaaaatagcatcactcccccctccttactttcccaatattgttctgccacacgagccttcctcagtgaactctctttcctggggagtgtctgctttattttgatgcgtctgcccaatttgggtatattttaatgtgaggaaacaatttaaaatgccagtgacttagtttaagtaggtaaatagggtcctaagatgggagatggcatatctaaaatagtgtatgtaatcttagttgatattaaaatataagctcacatatttgagtataaaatgtaaactcatccattaagttccaaaataaaattaaaatatggtgctaacatttaaaatgttaacattaggcatgtgccaccacacccagctaattttttgtatttgtagtagagacagggtttccccatgttggccaggctggtcttgaactcctgacctcaggtgatctgcccacctcagcctcccaaagtgctgggattacaggcgtgagccactgcacccggccaggaatggaaaaaaaatttatgaacaccacaacatgtagcccatacattttatttttaaaatgtcttttccatacatttcagttctccatatttgcctatatttatgctgaggcttcgcacacattcatgcactcaaaatgaaagcaagtagctagtttgggaccttgttatttctaatcccagtgaacacaagaaaagcaagcaaatgtggagatggcctgttagtaaaaaaagggaaaacgactcaatacgaattgcggtgtaggagccaaggacaaagtggaagaaactgagtctgtttgctctgcagagtaggcaattcagagtacaattccttactctacactttccgaatggacagagaaaagaaattagcttcgttacatgttctttgaagttggctaagaagctcaaattgcaatagtgagaacttagccctcatatcaggaagaactcttttttttttttttttttgagaaggagtttcgctcttgttgctcaggctggagtgcaatggcgggatctcggctcactgcaacctccgcctcccaggttcaagggattctcctgcctcagcctcccgagtagctgggattacaggcatgcgccaccacaccaggcttattttgtatttttagtagagacgggggtttcttcatgttggtcaggctggtctcgaactcctgacctcaggtgatccgcccgccttagccccrccaagtgctgggattacaggcgtgagctgccgcacccagcccagaaagaactttttaatgaaatgccaaaatgaattaatgaataaagtcaaagaatctattgtttcagacttttaagcaaaaatagtcatataccctaatcattttaagtgttgtctctctctggcttttggaactgtattagatggtcttttaaagttgctttaaactctgtgatttcgtgataagcaaatattcacactcctatcaggctatttctattctctaataaattaaaattaaaatgttgattaatagaagcccaaaaaccttaacagcatctgttgaacaaacctgtttccaagaaggaataaaaatgagacgtgattttctctttgctgcatgtttagtcactgctgtggcaggaagcaccacaacattgcctttaaaatatagcgcttcagcctctcttggcaaggtgaatgactgtgtatggctaacgctttcaacatgcaagaagaacagctaagatggggattctggtgtttcgggaaagggattgaaaagtgctaaaagcgagggcttgactgcgctgatagcagcaggtaatttaagtcactgttcagtttttcaaaggaaaaattcaaaatactcttctgtaagtcagaaaacagctcatcagccagtattttaaactttccattaaggttggtaaacatgacattaaaatatgtggtgatgatggtattatcttactaagagcgttgccctccccgtttcctgctgttatgctgtcactttcgtattaataactggcaacatctttcgaagagaatgagccacttacttcccagatacacagggtgataattgctggaaaaataatattgtcacattaattttgttcatatgattgcctttgggagaatttataaatagaagcgactatatccagatgcatcttaagggtgtgtgtatataaccaaccacttgattgaataaggtcccttctcgtgtaaggcagccaagtgccccatatgtaagaaagagagaagaactctttcttctgacttcgagggatccacgtgtaaggacattatgagcgcctgcacggacactccgtgcagtttggtgatcattgtggggtttttcctgataatgctttctttttaaatttagaaataattcacrataaactataaaaagcattagaagtggccagacacggtggctcacgcctgtaatcccaccactttgggaggccgaggcaggtggatcacctgaggtcagaagttcgagaccagcctggccaacatggtgaaaccctgtttctactaaaaatagaaaaattagccaggcgtagtggcrcatgcctgtagtcccagctactcgggaggctgaggcaaaagaatcactcgaatccgggaggtggaggttgcagtgagccaagattgtaccactgcgctccagccagggtgacaatagtgaaactccgtctcaagaaaaaaaaaaagtgttagaagttatttttaccctcatgcttagtaaaatttctggttaatttttttgcaatatcttgattatgcctatttgcagtgtgtgtgtgctgtataattatattgtgtgtgtatgtatatatatatatatatatatagtttcgtatcrtgctttttccatttagcaggacattatgataaattttctctgtgccaggcatgcacgtggcagctcatgcctgtaatcccagaactttgggaggccaggcaggcagattgcttgagctcaggagttcaagaccagcctgggcaacatggcaagaccctgtccctacaaaaaatataaaaattagccaggcatgatggcatgcacctgtagtcccagctacctgggaggctgaggcaggagaacggcttgagcctgggaggtcaaggctgcattgagctgtttgtgccactgcactccagcctgggtgacaaagtgagaccctgtctcaaaaaaataaaaaatgaaaatcataataaattttctctgccatgaaaacagttttttaaaaataggtacctaaaattccgttatgtggggatatgctgttgtaggactttctccttagttcagctaaaaacagagtccttgtcacacaaccatgaaaaattaggcccgcagactctttgaagggtgagaaaaatggaatttattgggcaaaaaggaaaagaaaaagggtaacagggactctcagcaaagcaagatgaatatagatgaaaatctataaggcaaaatgaatatggattaaaataatagatgaaaatcagagtatagtattaatttatctgtaaatatagtttctgtgaactccttatcatactggaaaataaaagtaaaatattaagcctccaactgactgaacagactccctcctggtcagggggaccgtggagacaccttggaagctgagttccagccatgatggggtgagaggtcagacaggcctgttatgccaacgccctcactaaccacctctaggtttcctttcctaagggctaaacagaaaccaggcaggttttcccacctcaccagctgaaatcccaggtactacccagatcaggagaggccaggctcctccccaccccaaacagcatgaacttcccaaggctccatccctttctcccagtgcacaggctggtcactttctccgggtacccccttgggtaccttggctgtctcagttctatttaaccatttccccacttttgagcatttactcacagttaaaaaaaaaaaaaaaaaacaaataagactgaaaaccatattattttacagacatcattgactgcatgccttggctctaagaatacggtcataacagtgattgcaggtccacggtaatggacatttttgaggttcttgatccatattgtcaccttcctttccagaaacactgctctagttctgatctggcttcccatgtttgagagggctccctcctgcctctctttcagcataatttttgtctttgcctatttgataaaggagattttttattattttgttatttatgaatwcaagaatttctcactggcttatttgcatttttattgtgagagaacaatgtgaaactttctccatatgaaagctatacaaaaagtctacaaaacagatctggtttcagcaattgctttctcattcactattcataatatcacggtgtcctttataaatatacagtttactgtcttttgaatttatgtttaaatatgttgctttggtctttattttaaaatattatattttcctggagataaatcaaattcataattacagacttaaaaataaaagggtgttttaaatctattttttattcttataattgttttacttatgtgtatatatatgtattaatcatacatcattaatcaaattagacataattaaccacataatagatgaaaatcggaggatagtattaatttatctgtaaatatagtttctgcgtactccttatactgagaaataaaaayaaaattgtaagcctccaactgactgaacagaatccctccttgtcaaggggaccgtggagacaccttggaagctgagttccagccatgatggggtgggaggtcagacagkcctgtcatgtccccaccctcactaaccacctctaggcttccttccctaagggctaaacagaaaccaggccttcgaaaagactctacactgaggctgggcatggtgagtcacrcctgtaatcccagcactttgggaggctgaggtgygcagatcacttgaggccaggagtttgagagcagccatggccaacatggggaaatcccatctctactaataatmcaaaaaaaaaaaaaaaaaaaaaattagccaggcatggtggcgcgcgcctgtaatcccagctactcgggaggctgaggcaggataatcgcttgaacctgggaggcggaagttgcactgaggcgtgatcacaccactgcactccagcctgggtgacagagtgaaactgtgtctcaaaagaaaaaaaaggccccacactgataatgtccatcactggcttatatcttcccaggtacagaataaaggcaagataagataaatcagtccttcaccctccctgagacagctgtttcctctattctgattttctttaaatgttcaccttatcttatgtaaaatgtaggtttactggscactatctaaaggctcacaagtatataatcatcacaagtatgtctcattgcctcccccttttaaggaaaatgcataaatgctaaatctcctgagaacctcttagggaaaaagcagccacaaaggtagctgtgacttgggtttttcccaggcatgctctcaagctggaataatagaccttgatgacrgagccttctgcctcagtcactcatttcggttgtcagtactaatgaaagtaagaattttatgtttttgtgctttacaaatatacttctatatagtaagagactgataactctttcatttacctttttaataataattcaagtgctctaatgccacaaagctaactttttgaccttaagagaataccacaatttctttggcctttggtttccgtgtaaaatccaggattttaagtaggtcatctccaaggctctgactggttctaaggactgcaggagggaggaataagacttcttcatagcttataaattgattgagacagttgcaaaaatacttgtatttagttctgtctgttgacaaatgcagaaatcaaagatgaagtctgcaatgatgctgcctaccaaatcacatatatgttgtaacatgtaggccgatgtataagagacatgtgtgactcatggccagattttaggtttacagtttaattcaggtacatgatttgtgtcctttgagtttacatttgacataaaatattttactctttcttaggcygggcgcagtggctcacgcctgtaatcccagcaccttgggaggctgaggtgggcagatcacgaggtcaggagttcgagaccagcctggccaacatagtgaaaccycatctctactaaaaatacaaaaattagctgggagtggtggtgtgcacctgtagtcccacctacttgggaggctgaggcaggagaatcgcttgaatccaggaggcagaggttgtggtgagccaagatcgtgccactgcactctagcctgggcaacaaagcgagactccrtctcaaaacaaacaaacaaacaaacaaaatattttactctttcttaagggaaaaagtgaactatctgggaaccagaatgtcctgaggttttttgtgaagctgcaggttcccttctggccatcaagccttgtgttctcctctccttaccaacagtagtgacttgctcttcacccttcagggttgtcagttgatagtttgaggtttatgaatataagcataacaagctgaacaaaaagcaagaactggattaagcacagtaagtctagcacttgaaggcaaaatagctgccttgtttagtctttccaatagaagttacaacagaaggttcaggacttttttgggtgcctaagtcatataaaaatggcacaggtaagccaaaggkataccggaattctttccctagccagcatgtgtgtcttggggctcaccctctgtcagtgtctcccaaacgaaattgatatttctgctccttcaatctccctttacagtgccagttttctaaattttttaaagggtaaaawttgaaaacatacaaaatagaaaaatccttatcaagatattgaggactaaactctgattttttttatcatacccaaatttctatctaaggagtctggggagtcatgccctacaattcgtatattctcatcagataggttttatttaaccctatttattgtgactactttccaaactgacttcgggataacattatgagacaaggaagaaaaacaaaatattttagcccaaaacatgtttctttgctgtatcttgaaatggccctacaaagctgtcctttgtgggggaaaatttgcatctgtttatagctagctagatatttttctatctagataacatagctagatatttttcttccaggccctcccaatcctaaagagattaactaaaaatctagcactttttaaagatctgaataggagacatttgtcctctattgtctctaagggtagccattataagacctcagaagaaccttggtctccacagtcttttgtcttaacctgaacattccctttctatccctcccaggtctttagacaaactcaaccaaatgtcaaccagggaagtgtttaaatttacctataggctggaagcccccagctttgagttgtcccacctttctcgaccaaactaatgtatttcttaaatgtgtttgattgatgtctcatgcctccttaacatgtataaaaccaagctgtgccccagccaccttgggtatgttctcaggacctcctgagggctgtgtcatggaccattgtcactcatatttggctcaaaataaatctctttaaatattttacagagtttgactcttttcatcgatagaaggcagctagtgaatctctgtatgttatctcacctttaatcattattccttagtttccaaagctgaagcagaccgaaaaatagcccgatttgcttagtcggaaattaaccttcgagacacatgtttgaaaacccaggtccctgttgggcattaaatttaaaaatctgttctaccatgttatttccctcaacccttccaataaagacttatgtttttgatgtcattgttgtttgatataaatggtttcataattgccttcaaatttgtcctaaaataaaattcattcggcttattgaagcaatgccacaatggattgcagacttaaaagatttacttgggcctggggattagcaaagatttatctcaaagtccatttgtactttctccaggtgttcctgggggagaatgacttaaagataatttgactggattttggtatgcwttcattcattcattgaacaaagagagatagggaatggagatcttagttacaattccctttgaatgcatttgttatgtcttaagcttcttttgtcaattcacatattaattctggctatagctggcattctgttgtgacttagaattactgtgtaagttctttgtcagtctgatttttgacattaccaatagctactttccatcaacttaagattttcttaaaatttagggatcagatgggatctgatagtttatccagtcatcagactctgaggagcatggtgagaaactcaggtatacgtacaaaaagttaaactggaatctttaacatagcctttcacagtaagtggttttctttctgtcatggaaattgttggaagatttttatgtgttgtagcaccagtgtttgtgcacacagagctatatatttctcccagtagacccaaatatgtttatattataataaacaagggtatgttctagagtcgaatggaaaatcttacaactttttaagatgaaagagaaaacttcaaagatatatcttctagcttgaagcaggctacttcacactgtgccccaggccccataggagtaaattctatctccttatgccaggagtgattcttttctgaaaagtgtgacacaccctcatctaatccagtcttgagggagagctgctataaacccttccagaaagaatctttgcataaagccttcaataacaggtgatcaccatgctccctttgagattcagatgcagtgcttaatgacctgtaattttttagctacattgatttaaaataattagggcttccatcttataaatgaagaaattgaatctatcacattaaaaaaattacatctgatcacaccacaaggaagtggttaaaccaatctacaaaccaaagtctacatggcttgcattgctattctttcattacaccttaccctccaacctgcatggtcctggctttctctgtacagcgaaaagcaaggctatctggtgaggccggaaggtggatttgcatgtgaaaaggagaatgtagcagtaaagtgagattcagagaaaagaaaaagttgaactcgctgttgtcctgtgtgtctgtctttaaaaaccagtaagagtagaaaaatacagagctgcctccaagtctgctgctctgcaaaattgcaggctgcttgcagggcaagacccaaattgactgacatgccagtgtgactggtcctccctrccgtggccagcacaagactttgcatcaaagaggtttaaataaatgctgacttaaaggaaaatctgtttcatgcagtgcaacaaacagaaagcaaactattttcacatgaaacaatctccttttaaaaatcccttctgaatttaatagactaattgagttaattatttaactcagataaaacaatgaattagtcagaaatcaatggagatttttaaggaggtgttagaaataaggggaaatgtccaattttgaagtccaagtcacaggatatagattatgctgccatattatctggggtcagttacttacgaaagcatagaagaaatattttatccccactggtactttgaaatgtgaaccattcagttttaatgtcagccagtgaccttcatttctcccgtggtgaacctgtgggcttcagatgtgagcagctgcgtcagcagagcttcctagagatgtcacaggtgmttgtgcatgaaattcttatgccttascttttcatttaactgtcaccgcaggtgcgcagcaacccccgctgggaagagcagggcaatattgcaaatcctggaccaattttgtatccgttagggtcaaccttgcgtgttgtaactgtctggatcttaagcacttcattttctgttggtgggtgttttttgtttgtttgtttgtttgtttttgttttgagacagagtttggaatttcgctcttgtcacccaggctggggtgcaatggctcaatcttggctcactgcaacttccgcctcctgggttcaagcgattctcctgcctcagcctcctgagtagctgggattaaaggcatatgccaccatgcccactaagtttatatttttagtagagacggggtttcgccatgttggccagtcttgtctcgaactcctgacctcaggtgatccaccggcctcagcctcccaaattgctgggattacaggtgtgagccaccatgcctggcctgttggtggatattaagaaagatggagcggccgggtgaggtggctcatgcctgtaatcccagcactttgggaggccgaagcaggtggatcacgaggtcaggagttcaagaccagcctgacaaacatggcaaacccccgtctctactaaaaatacaaaaattagccaggcatggtggtgtgcacctgtaatcccagctactcaggaggctgagttaggagaatcacttgaacctgggaggtggaggttgcagtgagccgagattgtgccactgccagcctggatgacagagcgagactccgtctcaaaaaaaaaaaaaaaaaaggtgctacattcctgaagcatctaagagacccttgctagaactttgttaacagttaagctttgtgtttaaggtccattttcatctgaaagaaatacccacagtgtttaaataacttttttttttaaagaaaactattgcattacttgtgcatttatttctaatggcaattttatccttataattagcaatttgytataaactaggtgaggggaagaagttacttttcattgcaaataatgtttgtgccagttcatatcttcagatagaaattttaaactgctgggacactttttagtgattagcactaatatgatctaccttgccctctataaacatcctttatgtagctctattttctcatgacatttagaattaagtatttgcaaagttgtcctttgtagctttcaaagcctgtagagctatttgtgacaaaataagcaatagtttcagacacccggagtgcaaattcatttatcgcagcaagggccgtggtgtgttcattctgttccttgtgaatttgacacattctgcatcacaggaaacatgacctcatgtgctgtatcttctgtgcaccggaagtggaatttcaagagtttctagatctcgatgtggattttcacaacactgagaggcactgggctacacagatataccagcattctattatatcagtatcacaggcaacgcagtctcatgcaggcatttgagatctttaatacctcttctaccatcaaagataaggtaaaaggagattagtctgttcattcaacagatatttactgagttcatccgtggctcaagaaactattccaggtgcttcaagctgagataaaacctygcgtttctgatcaagcctgatgcatttctgtcgatggcagggaaagccgtcgacggggacactctctagcaggtgaaggtgtgacggaaccgggctagttcaagcaaggcagaaggtgtgaacacctcttgttcattttcactgtatcgtggtagaacagggacccaaactttatttctttaggctaagttttccccaagattcttttataatacttggccaagacagaactttgaagaaatacatagaatcatttgctatgtgtttgagcagagcatgcaccagttttcccactcccttttcttttacacccaaccggctagatacgtacattacctgcctaaccccaagccatcccacgtagcttccgtttctgctgaagtacctcctccttgcatattaccctggaaatgaccagaccgtgaccacaaagtcaaacttgaacacctgttgctatcattgcaggtctccacattagattccttctctgagccrgaacaaaagtgactttgtggtgttccagactgcacaggactgttttcttgtgcgctcagtccagacacatgtgtacgtcaggataatgtgacatcagtatatattccacaaggctggagaaggtccaactattgctaacaagttgttcttaccatttgttagatattttgcatgtatgtttatcttaacattttgaatgttatttatacccattttacagtgccacagccactggggttcaggagaggtagcataggtaatagtgattagggttacacacaaatataacacatattcctgcattggtgtctatattcattagtgaaaattctgtgacaaagtgaattctccttccctttgttcctaaactgcaattggaaaagcaagctgtctaccatgtaggtgaggagttggtattgctgttcttaaatccacagactgactttcatttcttgttctaacaaagcaagacagattgactttctgtccccagcaagctgcagtcctacatcattgcagcactgacccttttgctaatagtaactaatcgtcactccacatcaccttcccagtttgcttaaaacccatctctttcaaatggcctcgtctggtgaaggctcttctgatttgcattattcttataaatatggaagtatacatagaccattaatccaagagttatttatagacatgtgtgactatgtaggtgatcttaaatcatcccctgaattcttaaattcttatcgcgtgatttatccccaacagctaaagaagtttctgcttctgccttccctttcattttcattctttactcactgctaagatttggatgtcttttgcgtttgtctccagccgtctttccaattcccaagatacrcatgaagcacagtggttcagagccctgcctttgaagccagactgtgtgtacagaacctggctctgccatcttttgcctctgtccttctagataataagagcatcttcttgttcttgcagttattgtaaggatgaagtgagtccatgcagtaagcacttggaaccatgttttttttccagtgtggtggcaccaaagcggggagccaagttagcacagccctccctttccatttcagcttcaaatggcaacatccaagttacagattctgaagccctggagtttaggatcatataccccaatcccccagggagcacattctactttgcagaaggtctgtaggtgtgcaggttgtaacacagaaagcagatgactccaggatggaggtcataagaacagctttccctcctgaacccaccaccgatttcattgtctgactgggggcagatcaatcactgtgactttaatttcctaaatttggttaattcctgaggtggtggtaggatcaaataagttaatttctgtgaacacactttgaaaattttagatctgtacacaaatctaaatcacttatgattattaataatcctgttctcgggaaatatatgtcataaatagttatttttagaaacgaggcatttattcatttgggagtatctaaccctgagtatcacctcagaggaaatattttgagttaggagggaccatgttgctacaagcaaatatattttaatattaatgggaggaatagtgtggacacgtaattgtataagaagtagttttggaagaaattgggcattggtgacagaaaagtatttgggaaagataagacttctctaaaaggattgctttggaaatgttagtagagtttaacctcttatatgtggctgctgcagaggctgtggcaggagactgttawgggcggacttctccagaggcagaaattgaggcagaagttggtgtgagtttatcttatccgtcggaaccgaggcctgcaaagggaaaaccgctagatccccagctcgctcagcctctcggtgcggctgccagggacaggtgccgatgctgacagcagaggccatccctggccacacgcctcacatctgagcagcaaatacttatttgaaacgggatctgggtggtacttctctctgtatcttctacagcccttgggcaacaggcaggagaataaccagtgaatcctgcgaaaagttgtttaggacagtattagaagagaaagtgtacagtgtgtattttttggacaagaaataacaaaaataacaatatttaacttattccagtgactgctgtaatgcaaagggaactgataccacttagtggaataatacatgttttgaaagcaaaaaacagtcagattcaactatgttaactatattataaactaaccactctcacattcttttcttttttctctctcatttttttttttttgagatggagtttcactcttgttgcccagttcagaggtcaatggcatgatctcagctcactgcaacctccacctcctgggtgcaagcaattcttctgcctcagcctcccaagtagctgggattacagatacccaccaccacgcccagctaattttttgtatttttagtagagatggggttttgccatgttggccaggctggtctgaaactcctgacctcaggtgatccacctgtcttggcctcccaaattgctgagattacaggtgtgagccactgcacctggcccactctcacattcttacataaaattcaggtatcatattacaatgaaaacaactgcaaagaaaaaacagagttttaattattattattattttttacaaataccataatattgatttgatgtagaaattactttaaatttctctcattatatctgatataaatgattcccttaaaaatagcaacaacataaaacattcaaatagtcaaaatgtatcttaaagaaaagttagggaataaacttcaaaatttagtttcctactgaatcttcatatggtttcccaggcataagaagagaggaacaatttagcgtgtcttttaagaaatacaattattgcgctaaaaatttaaccacagtacaaataaacaacgtcactgataaattacccaagtattataataagtttttaaaataaatgcaagcgtctttatctctttgtgcattttaaccatatagagacatgacatccaatattagcatcctaagcttaatgcaattcagtaagcttctgggatgtggaattgcattttgttgtcaactagactttcttaacttgaatctgtttttatgcccctttttaaagggtattacatttatttaatgattatttctaagattaatctsaaatgatttctgtgattagcactcattgactaggttttaaagtactcctctacaagagagatggttaaattgatccgcgtagttaatgaaagccttgacctgcacgggaggacttcaggagactcctcaggacctgccccctgagcgcaagccctctgctttctttgctggtggtctggagtggtgtctagcgatactgtcagaaacatggcatggtggaacagaaagcaaacaaaatcaagagaagacatgggctgggcgcggtgactcacgcctgtaatcccagcattttgggaggccgaggcgggtggatcacaaggtcaggagattgagaccatcttggccaacatggtgaaacctcgtctctactaaaaatacagaaattagctgagcgtggtggcgcacacttgtaatcccagctactagggaggctgaggcaggaggatcgcttgaacgcaggaggtggaggttgcagttagccaacattgtgccactgcacttcagcctgatgacagagtgagactctggctcaaaaaaamaaacaaacaaacaaacaaaaaaaaaacaacaagaacaacaaaaaaataaaaacagacatggatttgcatctgcagttgattgcttgccatataaacttgaactagtcatttacccttaccctcagctacctctctgtcatatgatgttgatggtacctacttaaaaggagtatcaaggttgtggtgatagttcagaaacaacattcacgtgacagtgcttaggaaactgtcaaatgtcattcagatgttattatcaatgaacagtttcccctggaattgctgctccctctcagatcctctcctactgcaagactttacacgtatgacagtaaggaaggtgccatctcactccattctgtattgggcagctggctgcagacttgagtgatgatggctggtcttccagcgggtgtctgaagactcggaggttcccatgaccacagagtccagtacacctgcacacgtgtacaggatgcacaaagaaaatgaccaggaatgccggtgacaacactaagttgaaattttccaagaaagtggcctttcaaatcactaatagctacagtaattatattatatataactctattacagaatttayatagaacagtatcctaggaaaatgctaaaatgcacgaaatargatgactccatcacacacattggtttttacataggtgtcactgttcaactctaatctggttttctggaattatatatataattgcatatatatgtatatgtttttgcaactcctagtccatatggagagagattttaattcaggaaattaaaraataaatttcagaacatttattgttgtatcccttactaaattatagatggatggaactatccttttatcttgaaaatttggcttaattgagagagtttatttttccataaatacagtrgaatgctttcctgagagagcactgtactctctcacttgcttcttgtccatttgtgctattttatgccatactgattttgcactgagactggcagaaggcacagacttttctctcctcccccagtttctcaccatatctgattttcttgttttccagtcttcatttccatttgtttctgarcatagattgatttgcccttgaatggctcagtggtgctcaaggacacccgctgagttagcctttggtgaacattttccatggaacaggctggaatcaagagcacaggccctggagaaagaatgttgtgttcaaaacccagttctacctctagttgtcttgtttcctgggcaagttccccagtctctcaacttcttcaaaaggttgtgaaaattacaagagataaaacttgaacagtgctgatcacatatggacagtaaatattagccaagattttggccctgacttgctaactgaaagggggatattgtaggtaagtctttacttgaaccaacaggtcttgacttatctgtactttgttctccaaacttaccacagccatggttctatgaagcatratgaaagagtatataatctttactgtgactggcacgcatgctttcacatcccagatatcatctgtccaaggaaattttatttatttatttttattttttgagatagagtttagctctttttgcccaggctggagtgcaatggtgtgatcttggctcactgcaacctccacctctccagttcaagcgattctcctgcctcagcctcccaagtagctgggattacaggcattcgccaccatgcctggctaattttgtatttttagtagagacagggtttcaccatattcatcaggctggtctcaaactcctgacctcaggtgatccgcccacctcggtctcccaaagtgcagggatcacaggcgtgagccactgtgcccggcctccaaggaaattttaatacaaacccttctttggcgagttgaattgaaattttttttcctatgaaaacaataatgtttttaaggccaattatgtaatttttatgaatataattatgataatgtaaaatttagtaaatattctctgtaactctgttttcttttttgataatatgacatgaggcaagaatctagatataataatacccttaaatagctgtaagttagtggctttcatccggggtrgttttttcccaatggggacctttggcaatgtctggagacattttatttgtcaccaatgaagggtggtgctcctggcatccggtgtgttgatgccagggctgctgttgagcatcttacaaagcacgagtcagccccacagcaaagggttatcttgcccaactttcratgatgctgaggtcaggaaagcctgctctaggtggaagaagaggtggggctgacccaggaatgattttgtgagacaggacgatgacttcctcygagactgcttaaaccatgtacattccaaactctcctgttcctctccattgtttcatggtctgaagagaaatacatttagttccaaatttaagattgtgcatgtgaactcctggcctttcacattgagccatggggctggctcttttccattggattttgataaaggaaggaagaaaaactggctgagccaayactggaaaacatgcttcatggtaaacaggcagtgattaggaggcctgcactgtgaaggagaggctgagtctggttgtacagagataaagcaattctgaaagtcattttccagaaccaacaaactgtaatttagttctgtattttaaataaattccaaaaacctcgatcaggtttaataggtgtcaccctttgactgtataatgttagctggtttttcttgccttacagtggaaatgaatacttaatttcaggaagaatggaaacaagtttgcagttccttaataaaacaattacaagagtcatctaattttattctgaaaaatcctccattatgtgtcaatatgatttcagaaatattgcagaatttttaatgctatttggtaattttaagttgagagaattattcccacagaaagcaaggcgaatggagtggaaaaaaggtcaggccaaagagaaccttactaaaagcatctggctgtacttcgaattctgtctcactgtggcggcatcagtgatgtggcatacagagcttctgtggtattagaacattcttggctaaacctcagtcttgccaggattataatgagtttmsagtctttagtggaactgatgaagaagatactgctcagcrctgcagcacattcacagaagccatatgcctctaagtgcttcgcttcgatgtattatagaagctacgtttcagctacacggctgagattcctatcaaccaagtcgcatctgctggaagccttacccaactgtgaaaaatctcttcctgcccaaacttagtgcgtgctaactgtgtttacatgcagggcctccttaaatgctcagaataacattgggaggtagatactattagtgtcccagtcctcacgtaagtcaccaagacttatgtgggaagaggcttggaatgtaattcaatgtcacatagtcaataagttacagtagggtctcaagcccaggttttgtactaaagtgtgtattcctaggtgcgccccattctgcctcagtaccactrattataagtaggaaagggcttattcatggatctgaaattcagggtgcgtcgtgctagctcacacctgtcttgtaactctgatgcccagtcttcctgctgatgtgttcggaatgtacatgtgtgtgtagaatgctgtagtgatgagaccctgtcacacatgctgccctctgacttgtgtgtgtcacttgtttctacctatcctatctgggcacctctttgcagcagtacctgcagggctggcatccggcaggtgttcagggacgtggttgtgctgctagctgttgggccatttgctggctagctgctcccctgacactgagtgtgatttcccggtaaacctggctgtttgtatttatccttctgtgaattacttcttttgacctgccatccccccaccctaaatttcctattggatatttgtcttaaaaaataaataaataaatttgggccaggcacagtggctcacgcctgtaatcccaacattttgggaggccgaggcaggtggatcacccaggtcaggagttcraaatcagcctggccatcatggtgaaaccccgtctttattaaaattaaaaaattagctgggcatggtggcacacacctgtggtcctagctacttggcaggccgaggcaggaaaatcacttgaacccgggaggtggaggttgcagtgagctgagatcacaccactgcactccagcgtgggcaacagagcaagactccatctaaataaataaataaataaattcaggagatttcttcagatgtcaggaatgctagcacttttccatatgtttactctgtttagagtgtctttccatatcaattattacatttgtgtgtagtcaatgatcagtggattttggtttctctgctcacgtgggcatgtcttggcccctcttgggctattaacttgattgactcacgtcgtcatcctacttttaccctttcattgttttatacatgtgattctttgatcctcctgattacctcaattgaggaatgctaaaaagatccaacttttattattatttattatgttgattattctaataccatttagcaaatcatctaatacctcactaattggaaaggttttataagctgagatcacacataaatatctgtctctcttgggttctcccctccaggcttttacttctgttccattgctcattctgtgccaggcacatagttttactactgtaattttatttatgttatgtatgtatttattttttgagatggagtctcactgtcacccagtcttgagtataatgatgcaatctcagctcactgcagcctctgcctcctgggtgcaggtgatcctcctgcctcagcctcccaactggctgaaaccacagatgtgcgccaccatccccagctaattttttgtatttttggtagagatggggttttgccatgttggccaggctggtctcgaactcctgagctcaaatgatctgcccaccttggcttcccaaagtgctgggattasaggcatgagccacggcgcctggccgactattgtaattttaaataaagtttgaaatatgtttgataaagcctctcttcactgaccatctttttcacaacattttttggctactctgtgatcattcatctttcatgacaaattaagttaattttgtcatgttctgaaaaggacaagcagaacagagggtggcaccctcaatgccccagctcctttcygagggttcaggtaggcattgcctttctgagattaaattgaacgccattttcaatatggcatcaattttaacttagcacaatcaaattttcaacattcttgtcaactgaaggatattgttttaatgttttttaaaaatcctgggattatgggcttgtgtttgtgtttggaagccattggagaggkgccaacatttacatttccttcttcctttctttttttttttttaagatggagtcttgctctgttgcccaggctggcagtggctcgatcttggctcactgtaatctccgccttctgggttcaagcaattctcctgcctcagcctcccgagcagctgggattacaggggcccgtcaccatgcctagctaaggtaactttttgtatttttagtagaggcggggttttaccacattggccaggctggtctccaactcctgacctcaaatgatctgcccgcctcggcctcccgaagtgctgggataacaggcgtgagccactgtgcccagcctaacatttatatttctccttccagataggaacacaaccaaactaaaccagagaggagtggagtgatctttctttttaaggttttgagcttgtctattccacattacaagcttgctgctcagatctgaccttgattttcctccaaaccagtgacagtgtctgtactttgggacaccctcctgggcaacctgctggagactcttctttcaaagactaatttcctgaatctctggctaaagagagaagaaggttaatagttcagggagcttgtttacaggccattagaaacaattagcacattgctgagattaaaagcacttctccagaatgttggatggcctagaaaggaaacaggacttttagaaacatctatttttagcatctaattaaggcagacttggagttccccagcctgtcttgccatactgtttcgtattttaattatcaagaaatcttaaatttccttcaagctaaattctgcctacagcaacttaaagtaatagtaacgtaaaaaycctactcatgaattcttatgaacaaatattgaaattgccccaaaactttttttagactgattacttaacacccgtacctttcctctttgacatgtaaaaaaaaattataatttattgatgattttctttctttctaaaaagacacgttttgctctagggacatggctcaatgcccctggaatagggcagccattccgattcttgtttcagtgtcttcactctgctgcccttccttctcctgaaactccctcttctagcccttcgcctgaggcttttacaactctcgaagacgcagtacaattttcacgtgttctgtgatgccttctgaaccttcttttatattgaaaccccattgcattttgtgtaaatatttaaatgtttccctcatacctgataaaccagtctgtaggtcccattcatctttcacagtccctacaacgccatacccttagcaagttcacaggccaggaagaatttgctaaattgaattttatcagtgtcccctactgtattttggttttgtaaccatttgttttctttctctttgctattgcaaagagagaaccactttttttgagactgagtctcactctgccgcccaggctggagtgcagtggcgcaatctcggcttcacttaaacatctgcctcccaggttcaagtgagtctcctgcctcagcctcccaagtagctgggatacaggtgcttaccaccacgcctggctaatttttgtattktttgtagagacaggatttcgtcttattggccaggctggtcttgaactcctgacctcaggagatctgcccacctcggcctcccaaagtgctgggattacaggcataagccaccacacccggccaaagatagaaccaatttaacatatggttgggtccattcatgttttctgtgttgtctgctgccatttcacggggatgtccatcagtcaccattccactaatattttgtaaaagcaaaagatagttgcacttcttaaaaccttaatcagagcctgccactgttggcttcttcttacttcacactgcattccagacactggtctttctccagttcattgagcaaaacagcacaggaccttggcacatgctgttttagttacctgtaactgtttcccaatctcccaccttccttttactttgccccatgaggagatgctttgcaaagagtttagctgttagggatagctggtaccaatatctgtaagccactgaccaccagttaaattgagctgacctggacagccaggggcatgcccgctgttctccccagtgccgtgtgctgccctccaaaagctgtggaatcaggaggacagaggcagcaggctgtcttgtggtatcagcagtaggttaccatgcagaggaggtggttagtcatccctggaagaggaatcccatgtgctgaatcacagagagtgctctgtcttggcccatatggggtaggaagtaagctgtagttatatctcagggaagtaaaagtagacaaagaatttgggggatccacttgcagagggcctcctgtgtccttcaaggagttataactctatcacttagtcatcagggagtcattggagtgtttgtttgtttgtttgtttttaagacagagtcttgctctgttgcccaggctggagtgcagtggcgcraactcggctcaccgcaacctccacctcctgggttcaagggattctcctgccacagcctcccgagtagctgggactacaggcgcctgccacaatgcccggctaatttttgtgtttttagtagagatggggtttcaccatgttggccaggytggtctcgaactctgacctcaggtgatccacccgcctcggcctcccaaagtgctgggattactggcgtgagccacyactcccagcctggagtttttaagtcaggagaacagagtgaccagtttatgctttaggaagatacttctggtggctctgggcagggaacaggacttcatagcgttgtgtggatcatgtcctgcatggaactaccccgctgaagtccaccccaggctctgttcatccagcagcctggagcccacgtgttgatcaggcttccctgcagccctgcagtccacttctcactggtccacttccctccagcctctctgcctccccgtagaaatcagagagctctgcttttgtggaaattctggggcaagttcccaaaaagcttcctgcgactttttatactacatgagaacatgtacggataatggcaggcccatttggtaaatgcacactgactgccagaaggatctgtgttgaaatgccagcttcttgaaagccttactcagatgtgcccttactgacacggctctgtgtctgggtcccctcttgccctccaaacacatgggccttattcccattcctaagcaagttccaaatctttctgtatctcaaggccttcgcatgtctcatggccagagaaattgtctgcattttttcatgcagctgactcctgtccaggtytcaggtctctgtttatctgattttccacagagaacagttccttgtcctgattcttgcagcctgtgacaactctcacctccttctttactcttctttcatgtgtcataatgcaatgtgctagtctacctttatttaggagactgtaggatgaaagtttgttgcctgcctcagtagacttgaactatgttcactgtattcacatctgtatccccagcacttaacaaaagtgagtggcaggaagcaggtaggtattcagtaactatctgctgaataaatgagcaaatgagtccagcaggaagacctaaaatagttggtgagggctgttatagaaattgcatctcaaccgggcgcggtggctcatgcctgtaatcccagcactttgggaggctgaggtgggaggatcacctgaggtcaggagttcaagaccagcctggccaacatggtgaaatcccctctctactaaaaaatacagaaattagtcaggcatgatggcaygtgcctgtaatcccagctacttgggaggctgaggcaggagaagcgcttgaacctgggaggtggaggttgcagtgagccaagatcacaccattgcactccagcctgggcaacagagcaagactctgtctcaaraaaaagaagaagaagaagaaaagaaagaaattgcatctcaagatacataataagaaaatgcaaaatagatattctcagcctgaaatatgctttcagaggatggcataacagaaggtgcctctggtttggtttcaaactctaatccataaaaaaggtgtacaaggtacatattaggtaatgtcaagtatgtgagagtaagtcaaatatttgttaaagtatattttaaatctatgaaggcagctcatttaaaaaataattctacattaaatcatcttttgatgtgaaaaataccgttttaaaacaacaattatgctacaactctgtttcactgaaaggaactttctttcttgcgaatcaactacagagctctgtttaacacatgaatacaagatgtagttccatgacaggtatcactgtgggactcgggccaggcaggtgtgaaggagggaggtgagtggtctggggaagccgctgcctcctgtagtcacaggcagatacatgaaagtaggaacaattgctgtaaaagatgacagaacacagcctcattgtgaaccatttggaatcaataaagtctgcagatcaagtcagaagaatgaccatttttaagaaaaggcttcaagtatatttcaaatctgattcatgaatcagaacaggcccccaaattaaacaccacagttttgaacttctgctacttttttctttttttctattaagtgaataaaagttcacttttccctcctttaagccaataaaagagataattattctaaattgttctgaatctttctacatctttttatctatggctgtaaaaatatctataaaggtatgtacatgcatatatatatagcttatatattttacatataacacgtataaacatttatacatacatctacacataaacagatgtataagcacttgcagacatcaacatatgtactcaaatttatacatatgtatgcctgtctataaatataagtgcatagatacatagaatattactcttagaaaaatgagatctacagaagtgttcagcaatttgggtatttccccatcttttgcaacgcgctttttacatttaataaaacatcatggacagccttttaaccaaggacccctatggacatacttgatttatcacaacggctgcagagtatacattccattgtactgtaatttatttagctttgctctattagtagacatkgagatcgcttactttttttccttctccaaatgttgggattaacagcagtgtacatgtatctttacagccttgccagtatttctaaagaacagatttccaggagtagattttccaagccataaaaataactgaattctaagatcactctgaacagactagtatgttttttggtggatctcagaaggaaaggaaggcattcactgtgaggacaccccttcagcagattcagaataagtcattttctgaatgttttatcagtgtcaccatcaatactctgaaatgcatgcatttgaggattctatggattcaagacagggttagcgctgtctcttttgtattgagagagagagagagagagagagagagagagagagwgtgtgtgtgtgtgtgtgtgtgtgtgtgtgatgtgcatgcaatttggtaaagaaccgtatttattttcatctttatttctcctaaagattctaagccaagttatcactttgcctaagagctcttctagggaaataaattaaaaacacatccagaggcataataaataagaaacttcatcttttccagctatttcaggcttccaaagtacgctatttattctaaaaaactgtcctttattgaaatactaagcatattctgctgtctctgagayagacaaaattcctacttgtagttttaggaaaaaattttctactcattctacggtttctactcatttagttaaaaaatatttattaagcatttactaaataaattctaaatactgtaagggataagtataataccaaaaactaggtgtttaccctaaggaagttctcatcaccctaaggaatttatagtaggaataatatatagaaatataaaaaatatttcttcgtccttggcaggacagtgggagatataaaaatagtaaaagaaggctcatccatttcgggagctttaaaatctagggtgtgacacatattgtgagtacaaacatatttctctgctactgcaaaagagggaaactgtcatgtctagcttcaagatggatctgtgagctgaactgaatctcgaagtgcaggtgggattttgaaaggtagggggtagagagaacattatcagtgatggtgaagaatgagcaaagatccagaaacaggcaacaaaccacagtttggtttagctgcaacttggtgtacctgggagagaaatttgagataaaaagaaagataggttactgttaagtcctagaaggctttgaatgcaacataacgagcttatttggcatatagtgggaatggttgaaagcttgggagaaggcagaatgataattttcccaactggggctttaggaagattaatccacttggtgtcattcaaagagacagatatatggaaggaagaaaaccggatagaagaccactgtactcattyaaagaaaacattctgataccacattcattaaatctaggaagcatctttgcttactaaagccatgtgatttacaaatgagcgggccgtattacctggctttgatggtaacccaattttttttctcaccttgccaggacaaacaaaagattratgtctgcatgygagcaatagggggcccattatttctgatgcttattttgaaaaacttccaatccggcctcccataactaaggctttctctccatttcagcgtctcatccagcttttttttwaaaaaagttatattcagtaggctttaaagtcaatcttgatattttccactgttatggtttaaaaccctaaatagattacactgacaatactgacaaatttaatcttcctcatatataacttgaggataaaaggtcaaaaaggaaacatgtttctctcctctcctacagataaaaatgcaaatagctagtttcctttgaagtttgtaaatacagcatgtattctgtgttcttgtatagcattaartaggccactgtgatacagtaaaagttaactcttcaaagtctctgcctggctgagaaaaagggctgttttcttctaacatagatttcatgactatgataaaatcaattctgtgacagtgtgttctttgctttataaggagtacaattcctaaagcaactattttggacagattctttcaccttttatttagataataaaataaaagtctcagggatcgccttcttagcagacactgtgcttggcccccagaaagtgatccagacagtctgcaggctcagagactcatcatctaggggaaaggacaataccaggttctgggacttagcacagaagtgggtgggaaggacagagaagggatttggagcccaatgctgaggaaccttcaatggccccaagaaggaggcagaacagaaaaaaaaatggtgatggggcaacaaggcaataagcagcttctatgtattcagcatggggtctgtgccgggccttgcagggaatgtggccctgtttaagacctggagttgaaagagcactacagggtatcctggaaaccctcctccaamcctttgtcaagctatcacattccttaagmcccccattgcagagtttcagggacagtatcttgaaattatatcaaaaaacagattatgggcaatacagaacatggtgagagaaggtgagataaagtccaatgataggacttctattttccctgcagccagattcctcaggctgattcctcaggctggtccctcaggctgattcctcaggctgatccctcaggctgcttcctcaggctsmtycctcaggctgcttcctcaggctscttcctcaggctgcttcctcaggctgcttcctcaaggctgatccctcaggctgcttcctcaggctgcttcctcaaggctgatccctcaggctgcrtcctcaggccaatccctcaggctgcttcctcaggctgcttcctcaggctgatccctcaggctgatccttcaggctgattcctcaggctgcttcctcaaggctgatccctcagggtgtttccttaggctgatccctcaggctgcttcctcaggttgatccctcagggtatttcctcaggctgatccctcaggctgatccctcagggtatttcctcaggctgatgcctcacctgattcctcaaggctgatccctcagggtatttcctcaggctgatccctcaggctgcttccttagaggctgctgggaaaatgcaaatcatatcatttgactttatttcaggatttccacattcacttaccaaaaacttctttaaagcataaaataatcatttgtgaaaatagcattaaactgttatattccttcaaaatatacatactatccacatattacatttcatgtctaaaagatacttactcgtgcatttataaaaaatgaattagataaagttaaaataaatgacaaataatatmattgttctcttctaacccagtgcttggcacagagtgtattgatagcatttgatgaatgacatgaaatagaattttgtggtttgttaattttttttgtcttatttgacagaattattttcagcttcgcgtcaacttcataaagaaggcaagatgttgggaggagaattgtaatatgtctataataggctgatggacagtggatttaatggaaaatcttcaagttcactattgaggttaataagcctaaaatatcttaaaactaaattaagacactttctgccttaagaaggcatctttaaaaaagtttgatatcattttagctgactctagaagtaagtagcagttcttttgcaaaaagtgccatttgcaacccagataagaataaagatttctttcttcactgcatgtgtctttagaagaaaaccatcttccctaatcatcrtctttgcaaatgtctattttaaattttttgcctcaaaatatctcctgttggatactccagctattttctctttttgcctactcttaaaggggtatatgctgtattttttattacagatctctgatataatttttttctgtcaaatgttagattgtggttccaaccttaacgtttccaaataaatgatatgaacagtcttctcccatttactctgttgatgtaaaggtgttcatatttcttggtcaaatctcttgagttttttcatttcaggtaggtataatgggagcaatttgcaattccaatgtcatgcactgtatttgaattggaacaaaaggaagtatccaacaacaaaatcttgctgagtggaattattttattttatttatttatttttttgagatggagtctcgctctgtcgcccaagctggaatacaatggcgcgatctcagttcactgcaacctccgcctcctgggttcaagcgattctcctgcctcaacctcccgagtagctggaattacaggcatccaccaccacgcccagctaatttttgtatttttagtaaagacagggtttcaccatgttggccaggctgatctcaaactcctgatctcaggcgatccacctgcctcggcctcccaaagtgctgggattgagagtgagccaccgcgcccagcctgagtggagtaattttaaatgcctttagttccaatgagttgttttggtgagtaaaatgcccagcctttccccagaggcccctgtggttgtaccactgaagtaaaatgttctgcaattttaatgactgccagtgtgctttagtaaatttggtagctcgagggccatatttcaggttgtctgtaatttataggaatgtaaatctttgttttcttctctgttcatgcaagaacccacttatgcttttgggagatattatttttataagcaaaaagttttaactgaaaacttggaccaaaattaaaacacccacctcctgcttcattaataacgtatttctattttaccctaaaattgtacactcacccttttttcacatgatctttcctctatgatccatctctttattatggtctccagcaatatttataaccaggtattgaaacaggaagtttccttgtcctcctcccagggcatgtcatgggggcgtggctcacttctttagtgcccggctgctctaggggagcatacagacagggctgttggagccccacagcagtgtctaggggtgaatgtttacagctcctgaaaccccagtgggcatgtgttacagggtgctcttttagtttagccatctgtagacagcttgtgttagctcaattagacccctgccttatcacaaagacagaggactttctctatcccagggttctggcctttgtgtaccagaagaatcggatcacaagtggccttggagaatgagagtgaggttttattgagtagctctcagcagctgggggagccagaagagagatagttttcacctggagtcgggctgctcagcagcctgggatctcctccaactgcctcagccacactccacatcgttctgccagtcagtggccaacatgctggtggctgttggtgtgttcctgtagacatccagcccccggtgtgttcctctgctgatgtgctcctctcaacgtccagccgcctgtgtctgcctgctaggctctcrgggtttttataggcacaggatggggatgtggaaggccagggtggtcttgggaaatgccaacattggggcaggaaaatgaaaataattgtccacacctaggtccctgggcacaggcccaagagtggagccctaggcagggaccatgccctcctctacccagcacttcccttccccaccttccatattggttaaagcgaccatgccattcccttcccagcacttccatatcagtatggcctctttcaattctgtcctgtcagtaataatattctgtgtccaaagcagttagtactgatgaatttcatggtgtgtgcggggagaacctaatgcattaggagaccacaaacaccaagtgaggtttgctattagttccagcnctaagaggctgtggtcagcatcacagagactggaaatgggtggtcctgcattgtagattgtgcgcctgcagggagcctgaatgtaccttcttcccttgccacatgccacatagacattctgatttctgaacagtcactttccggctcttctttttcaggatctgaaataatcattaacttatggtcatgaactaagttggattattctcttatcagtgtgtctggaacaaaggagtatagactggctagggatctgaggaatgaaaaatacatatgttatcaagaacctttatgtcctctggttctaaaactctcaaccaatgctcagtgttttttaaataaatgcaaattttctctctggtattttgccccatttttattttgaaaattttcaacttcaagagaagttgagagacatcaacattatatcaacattgagcagccatggaggcaccaccttgctggcaccagccattaacaggtggtctcaatggctctgtcctctttcttttcctttgtgctcatacacaaagacacactttcttttttctttttcttttcttttcttttttttttgctatattttttgaacatgatttgcaaattttgtgatactagacacctcaatacttcagcaagcatggcctaagaataactccattggccaggtgtggtggctcacgcctataatcccagcactttgggatgccaaggtgggtggatcacctgaagtcaggagtttgagaccagcctgaccaacatggagaaaccccgtctctactaaaaatgcaaaattagccgggcatggtggcacatgacttaatctcagctacttgggagatggtggcagagaattgtttgaacccgggagacagaggttgcggtgagccgagatggcgccatcgcactccagcctgggcaacaagagcgaaactctgtctcaaaaaaaaaaagagaataactccattatttagtaccaattttacccctaagaaaactgtttattaattttttaaaataaaaaaattacttagtaattttatctaaaatataaaccatgttaaaatttcccatttcttttgaaattgtttttaacatctgcctttttttcttttatttttttctgagatgaggttttgctcctgtcacccaggctggagtgcaatgacacgatctcatctcgttgcaacctccgcctcctgagttcaaatgattctcctgcctcagcctcccgagtagctgggattacaggaacccaccaccacacccgactaatttttgtatttttggtagagatggggtttcaccatattggccaggctggtcttgaactcccgaccttaagtgagctgcctgcctcggcctcccaaagtgctgggattacaagtgtgagccaccatgcccgacgacggtatttttttttttttttttttttttttgagacagagtctctctctgtcacccaggcctggagtgcagtggaacgatctcagctcactgcaacctccaccgcccaggctcaagtgattctcctgcctcagtctccatagtagctgagattatgggcatgcaccaccacatccggccattttttgtacttttagtagagacagggtttcaccatgttggccatgctggtctggaattactggcctcaggtgatcctccygcctcagcctcccaaaatgctgggattacaggcattagccactgtgcctggcctcattattttttctatccagcttctgagcagtcctggattgaagttggttgatattcttagtttttccttttcaaaatcaagaacaatcccctaatattgatttctttaaattgttaaaagtataattttttaaaacaaagtcatgactctcaggcaaatataaatgaacacatcaaagattttatttaaattttgaggaaactagtcagatgttaaaaaccagttcaaaggaattgcaaagggaagtcatctctaggcaatcacaaatgctgaaacgtatctgacaataaatgcaaagtggtttttgttgaggaggaaagaatcactcacatttctaaaacatagacaaaatctatttgtgtctctacagacacaaataatttgcattaattttaaagttatacagtggctcaaacactgtaagtggcacatacccataaatcagatgacaggattggcatttcataacacacccactcatcttgtttctttcgtttcaacgtccttcaaaatttcttcttactttctatcccaatttatgattataataatctcaaaatttaataatcacaaaaaatattggactcatttgtttgggcctaattagttatatggtggtggtaggactgttaatttactatataggcctccttgactttacttcttccatctagaaccatacaatgtaactactaaaaccacaaatgtttttataaggaatttcaaattgtgttttaaaattgctcttatttattattctgtgactataaaactaagctcaaggctgtctttactaggttatacctgtataacatgtaaatttgggtaaactctcttgaagtcctgaaaatgtattaatgcttctaatgtgccaggattttacctgtcttcccatctgtatcgctggagcctggtaagccagtttccctgagagtgttctgtggacccatgcaaaatcaacagttgttccttaagagcagaatgtcagatctgatgaaataagaaccattctcaaatgtgatgctttatattgacctagattgcccaatttattttatattgacctaggttgcccaatttattttatattgacctaggttgtccaattatttttctggtaaaaagtaggacagatttttactgatttctgtgcagactattacattgccatgaaaagtaatgaaatttaggaagaatgtatgaaatctggagtgtcagtaaaaatcagggatcatttagaaatgtttcgtttgattgtagaaaagtggagtctactagattcttgtacatgatagaaagtttaagaagaaagacaaaaggctttgtcatatatctagaaaatggaatattacaacaacatcatgcaaacaaacaaacaaaacagagttttcctcatcagctcattcagtcctaaataattaattcttctcctgctggatcttagattaataatctgatttcactaaaaagagttctagaaatcgtaacatagtccactgatatatctgaaagttgtctaagcattctcagctcagaaacccatgcccaggagataactgtttgaaatgtcagtagttcagagcgcttttccaaaaatctctgaaactgtcttttgttgaagacacaagctgtggtctgtaccttaaagcaaagccttagaaaagcatcagagtgaaacaagtgactatagatgataaagacttaaaagctgttgttaaattactgctgcgaccaatactttcagtttggagaataaaattttctgttgtatatgagttgatatcagtgtttctcctgatagtaagaacatgtaagcatacttcaaaatgtttgtggaaaaaaaatggaattaaaagatgaaaaatgtaactttatttctcaacataatctctgtcaagatccagacacttttgtaagtgatgatagcagccgtttagtccatccccaaggaactgaggctgctggcatttaaccacatcagtacattcttttttacagtattgactgaagataaatggggaccctttacacactttttaaatttaggacagctgggtgtggtggctcatgcctgtaatcccagcactttgggaggccaaggcatgcagattacttgaggtcaggagttcatgaccaacctggccagcatggtgaaaccctgtctctactaaaaatacaaaaattagctgggcatgatggtgagcgcccataatcccagctacttgggaggctgaggcaggataatcagttgcacccgggaggtggaggtttcagtgagccaagatcacgctactgcacttcagcctgggtgacagagcaagactctgtctcaaaaaaaaaaaaaaatatgaaacaaaaataagtcagaaggagccaaattaggattgtaaagtggatgcctaataatttctcattgaaacttgcatatttgcccttcctcaatgagaagagttatcagagctttctcgtggtgcaggaggagtctctggtggagctttcctgggcatgtttctgctaaagctttggctttctcaaaacactctcataataagcagacgttttctttatttggccctccataaagtcaacaggcaaaaatgccttgagcctcccaaaaactgttaccrgccgggcatggtgactcacgcctgtaatcccagcactttgggaggcaaaggcaggtggatcacgaggtcaggagatggagaccatcctggctaacacaatgaaaccctgtctctactaaaaatacaaaaaagtagccaggtgttgtggcatgcgcctgtagtccccagctgcttgggagactgaggcagaagaatcgcttgaacccaggaggtggtggtgcaatgagccgagatcacaccactgcactccagcctgggtgacagagcgagactctgtctcaaaaaaaaaaaaaaaaaatgttgccatgacctttgttcttcatcagtttgcctttgcctgacgaccacttccaccttttggtagccattgctttggttgtgctttgtcttcaggattgtactggtaaagctgtgtttcatctcctgttataattcttcaaagaaatacttcaggatgttgatctcatttgtttaaaatttccattgaaagctccacttttgtcactaatctaggcacaagagttttgttacccctcaagaggaaagcttgctcaactttaatttttcactcagaattgtgtaaattacaccaactgagaagtctatggcattggctattgtttgtgctgttagtcattgttcctcttcagttagggtacaaacaggatgaatttttcacctgtgaatcgatgtggatggtctattgctgcaggcttcctcttcaacatcatctcatcccttctaaacaggagttatcaatttgtaaactgctcatttctttggggcattgtcgttataaaattttcaagaaacatcagtgatttcactattttttcacctaagtttcactgtaagttgcttggattttagcagaattcatgttgctctgatagggactcttttcatactcacgtcttatccttcttcttcttcttctttttttttttttttttggaaacaaggtcttgctctgttgcccaagctgcagtgcagtagcatgatctcagctcactgcagcctcaacttccccggcttaagcaatcctcccacctcagcctccctagtagctgggattacaggtacataccaccacacctgggtaattttttgtatttttagtagagatggagtttcaccatgttgccaaggctgatctcaaactcctgggctgaagcaattcaccctccttggcctccaaagtgttgggattacaggtgtgagcaaccaaccacacctgaccatcttatcctctttagtgcctcaaactggatcctactcagacacattgtaacaaattagtatgagtttattttggcacaaaaattggaatccatgcgtagtttttctataatatgcattttctgtgaacttttgaagtttcctcatatggtgggcagaaagggcaccagagactttccataaagcatacaatttctgaaatgtttatagtaataagattttgcaaacttaacctagaggaggctagtgtttcttcagatctgaaaattcttcctgtgcaactcttaaaataacacattagacagacctaattatttctagcatctatttataagttgaaagaacaagctttggtgattttccagggccatttgggagatctcaaagttagttttagggagaaaaaaacatcctgaaacttctattttttatctaaatttggggttcaatgttgggaagttaaaattaataattgtcagaggagattgttttactagattaatacaggatsgtgaataagtgaggggaaaaaacctgtctctcaargtaacaacatatatttaaaatacaagcataaaacatagaggataaagacaattgtaaagaatcttagctcttccttaagtgaggcaacattttttgcccttaaataatcaagggcataataaagtcatctaaaatcacagaaaactattctgatgagacacagaatctctgctctgtaggcagattagacagaaggcagaggaatttgctttcactggacattttttcatattgtgggtcaaggcctaatcagtaaaccaatgaagcaaacccattgaagttaagtaatttttgctaaaattttgatgttgatgtatctttgtagtttctttttagatatatgtaggcatttgtattaatccattctcacactgctataaaaatactacctaagactgggtaattcataaaagaaagaggtttaattgactcacagttccacatgtctggggatgcctcaagaaaatgacaatcatgatggaaggcaaaagggaggcaggcatcttcttcacaaagcgacaggagagagaartgctgagggaaaggggaagagcctcttataaaaccatcagatctcytgaaaactggctcattatcatgagaacttcatggcgaagcgccccygtgattcaattacctcttcctggtctctctcgttacctggggattatggggattacagggattacaattcaaggtgagatttgggcagggatacaaagcctaaccatatcagcattataaaccaacacaagtccaattcactctccaagtggtgtacttcatttgcactgtaggacagacagacgctttaggacaaagtgtggtccaaagacttctggggttccctgaaatgttttcaggggaactgtgagcttcatttacattgtaggacagacagaaactttaggacaaagtgtggtctgaagacttctggggttccctgaaatgtctgcaggggaactgtgagcttcatttacattgtaggacagacagacactttaggacaaagtgtggtctgaagacttctggggttccctgaaatgtctgcaggggaactgtgagcttcatttacattgtaggacagacagacactttaggacaaagtgtggtctgaagacttctggggttccctgaaatgtttgcaggggaactgtgacaccaaagttattttcataacaatactaagctacggagtttttcagaggctatatgaccagaagagattaaatggagaagcagacttgaaaacccatcagttgtctattaagccaaacattcaggatatttttgtaaaaatgttcaaggttgtcatttttctcatacaaattttctttaagaaaatgttatttacattattatctaatggagtcaacattgttatttcccaatacattaataaatatatattttattttctcagttttgtttttgtttttgttttgaaacggagtctcgctctgtcacccaggctggagtgcagtggctgatctcagcttattgctgcctctgcctcccaggttcaagcaattctcctgcctcagccttccaagtagctgggattacagatgtgcatcaccacacctagctaacttttttatttttagtagagatgggctttcaccatgttagccaggctggtctcgaactcctgacatcaggtgatccgcctgcctccgcctcccaaagtgacgggattacaggcgtgagccatcacacccggctggttttagtgatttaaaacatcaaatattgatacttataacccacattataaactacagaaacgaaacatctttagattcctgagtaatttttaagaatctactggatggagagaaaagatgttgagaactgctgctttattcaaaaaccagtctttgttcttgaaaaaaaaaagcataaatatgtttttctttttctctcactctttctgctagtatagttgtaaccatctatataactataattgctatttcagcaagatacttgacagataattgagattgtgtgttgtacataagcattctagctgactagcagaagtcagagacacataaaacataatktttttatagctacacacatccttttttcgctttgcaaagtggcaaaaatgaaaatggtcattaacataagctaaagatttggcttccctcgagcatgtaaaaataaaaataaaagtatacaaacttaaaattatgcttagtagttaatgtttcagtattctttttatcttactttgaaattttctgagtatcaaatgattttcaattaatttaatattacttcaaggttttaacttgcctaaagatcttggaaagcatttttaaggtgatattctggaaaacataattatagttgatataaaaatataaatattcaatgaacaaaaatttatattttttatgatcttaaacattatgtgggaggaagcatatttgaactgtttcggaaacataacccaacataaaacaatatgtatgtttgctttttaattaacacgatacatcagagaaaagacaactgtgtttttttcacattgccaagattaatcttaattatgttaactgagatttttttaaatatttctgaattttttataataaaaatattttaatctaacatatttaaaggattagaagtttattttctgtgaactttagcattaaaaaacatttttaggctttttaaagtagtcacatatggttgatgattttcactaaagcattcacttaagttcctgctaaactccatgatagcattgccttcgatggatgaattgttttcttctcctctacaatctcctaatcggtaagaaattaaatcattttattctcttgaaatcacagttttgtgctaaattctcctccaacattttatcataatatattttgataaccatagttaaaatctttctgctttccataggggaaagtacaaataatccataagtagtcttcatcatcaatacttataatctattattaaatattttgtgtgcttttaaaactcagagaaaccctttgctttctttcagaatggtgtttgttctcatgccattattaaaataggtgcccctgtctttctcaggacaatttttgttggtcagtgcctcagcccattttgtgtcactataacagaataccgcagactgggtaattgataaagaaatctactttttacaattttggaggctgggaagttcaatatcaagggatagatatagatgcaaattcaccttccagtaccttcttggaacttcacacaatgcctctgggggtgctgggtgccatgtctactggactggaggctggagtgcagtggtgtgatctctgctcactgcaacctctacctcccaggttcaagcaattctcttgcctcagcctcccaagtagctgggactacagacacataccaccatgcccagctaatttttttgtatttttagtagagacagggtttcgccatgttgactaggctggcctcaaactcctaacctcaaatgatccacccacctcggcctcccaaagtgctgggattacaggcgtgagccaccacgcccagccgccgtgtctactttgacctcccacatccatgagttcattcattcgttcattcaaaaacaacctattatatatattttttcagctgctataaccaattaccacaaatgtagtggctaaaaataacacatgtatattatcttcaagttttgtaggtcagaagtcctaaaaatcaaggtgttggcagagttacgttccttctggaagctctcagggagagtccatttccttgtgctttccaggttctggaggtgctgccattcctgggcccatggcccctttcatcctcatggccaacagtagccggtggactctttcttgtgtcactctgacactgactatcctgccttccccttctaccttttaaggatcctgtgattatattgctactacctaagtgattcaggatcctcatcatatctgaagatcagctgattattatctacaactttgatttccccttgccatgtaaagtaacatattcctatttgcagggtttttgaatttggacatagacatcattgggagccattattctgcctaccacaatgattcagtgtcaggattattcagcaatacatatgagtttctacaatgggcaagaacatttagtattacaacgaggtactcagccatgtaggtgaagagtgaaatgctatattctactgagaactgttgcatttaagtagattactaaattgtgtaaacctgtgatccatgatgacttgtttcgtccccagacaatgtttgaagaacaatcttctcatttttgtctgcacatcatacatcactcctaatgtattgctcccagtgctttctggacactatttattattgtatctattatatacaagatgaaatcacaatttgtttcatttcataaaatattaacttataaatttttttaggttagaagataatgtagcaatcattcatccatctggcctgatttcactcacatctatggataaataaacagacaccaagatgtcaggttgtgaactccttagttcacctagttcttccttgagctgggactggaacccaggcygtctgaaccccagtatggctcattgttttatttctgtccaagagagaatgctggcttcaggtaaattcagtggcattgccaacaggtaaattcagtggcattgccaacaattttccattttactgaaaatgcagtctgtgcaaggcaaagggaacaccttccttgtttattcaattatgaaaacaaggaatcccattatttcctttgccttatgcattcatgggttgcagacattattcttgggcttcataattttaggaagtgttttgagccttttaaaaaaattgacgtgagaccaggcatggtggctcatgcctatgtcacagcactttgggagggtgaggcaggtagatcatttgtggtcagttcgagaccagcctggccaacatggcaaaaccccgtttctactaaaaaattagccaggtgtggtggcgtgtgcctgtaaacccagctacttgggaggctgaggcaagagaatcacttgaacctggtaagcagaggttgcagtaagctgagatcatgccactgcactccagcctgggcaacagagtaagactccgtctcaaaaaaaaaaaaaaaaaaaaaaaagaggtgaaattcacataaaactaaacattttagaattaacaatccagtagcattaagtacctttcccatgctgtgcaagcaccacttctatctagtttcaaaatattttcatcaccccaaaataatactccatacacattaagcagttagtccatttccctgtcttcccagcctctggcaatcactaagctactttctatctctcagtctctggcaatcactaagctattttccatctctatagttgtgtctattctggacatttcatataaaaggaatcgtattatataatacttgtgattttgtgtttttttcatttagcataatgtttataaggttcatccaggttgtcatatatagaaatcctttattactttttatggccaaataatattccatttatatatatgccacattttgtttatccattcacctgttgattggcatttggagtacctccaccttctgggtatcgtgaatactgctgctgtgaatatatctatacaagtgtgggtttgagtcctcgtttgtacttttttggggtatatacatgggagtggacttaatggattatttggtaattgtgtgtttaactttttgaggtgcttgagcctattccaattagatccaagacaagtttttaagaaatgctctcrtgagtccccatgttaactccaaaggcttaggggcagaaagatgctttgaaaaatcaacagatttcagccctgccacttgggacttatgtgaccttgatcaagtttcttaactacactctgaccctcagtttattcctaggtgaaagttaaaataaaaacacctacctcactaggtcagctgttgtaattccaggaaataatgtgtaagatactatactatggcgtctggcaaatagtatcttgttatatgttatatattctgatgattgttatattttctatcttatctcacctcccaccctagtccatacggaaccacttaacttcttgtagggctgaaatatatattcacttatttatgactaaatcctgtggaataaaaccaaggactttatgaagctaagaaatattaaatctcctgcctcttctaatctayacagtgagtcataaagggaatttacctgatcgagtatgatttgtctttcaaagctgtgctttatttcctcctacaaatctgtatttttaaccatcataaattatttttccctatcttcccaaatattaataataagtgtcattatccattcaggctgccataacaaaatatcacaattaaatggcttataaacaacagatatttatttctgacagttttgaaggctggaagtccaagatcagggtgccagcaaggtcaggctctgstgagagctctcttctgggttgcagaccactttctccttatgtccttacatagcagaaggcaactttcataaagacactaatcccaatcatgaaggttstatcctcatgacctaatcaccttccaaaggccccgtctcccaggggtaccatcatagtaggtgtatttcctaatatgaatttggggaaggaacaaatatttggtctacaacagtaagcaaacataaatgttatccttgttcactcttttccttaacaatgatatacagattgttctaatattttttatgcttcttcagtaactttatctaaagttcttcactctaaaataatttcattgagacatttactatggtactgtttatttttgtaaagtwttttttttttttaaacagagtttcactttgttgcccaggctggagtgcagtggcagggtcttggctcactgcaacttccgcctcccaagttcaagcaaagtaattttttagtaaccacttaaaaaattctaactactctcatttccattaaagatgaaattattgtttagattgatttcctaaaatatgtttcttttaaatttcagtcgtaaaaatgtcttttctgttttaaaactaataacatttcccttagccattttctaattcaaatataattaaagtggactctattatcatctttgctttttgttaacatgacttttgattttcttctattctagttataagtgtaagttattttaccctgtaagttaatgtagtgtttgtattcctctttaccccttatttattcttcagcattttttcagcttaaaaatatggaggcctaattttcctgtatgtaagacgtagtgatgtattcacggttttgattaagctccttcgtagttcttcagacactttgcaatcctcttcaaaatatatgagtaaaagcatgtacatgcaagtgggtttggagaatacacaaattcacttataaaaagattactaaggaaggaaaatactggttaacaaactatcattggcaaactagaaaacaactcccatgtgtatgtgtatttttttttcattttagtgtatagtatcttctcccacacacacgaagtatctaaaactgtaattttctgcccaccagtcattctagaacaggtatcctttagaattaaatgttctcatttatctgagccttgtttatcaaaatgtaacttattgtcttttaaaaaggagaagcaaaatttagagggattttctctaaaggctgaatttatttgcctctgctagaagattcccagggtttgccactacttgcccttgttgtaccacttcagagctcatttgaatgtcttatagagaaagacagttatatctctcgtaggcttgttggacttagattcagtttcaaagaactctcctatgttttcattttaaaatatgctctttcacctgtttcttagactgcaactagagtgcaaccagacctaaaactcactagattatatattcctcaatttgcaaattgctgcaacagggataagacraacatgaaggtagccttggtagaggtcaccaggccccaggaatgtgttgaaagggtcgatgtattaagaactcaactgctgcagccctctgaacacacatttcccttatgcattcattctgaaatatttattcagtacttcatctttacaaagtgctccagggctgaagagacagtgtgcgccaagccagataagttccctgttttcttggagggtaagtcaagtgagggagatgacctcagtctaataaccacaacagacagatgaaactgaatctgcgactcccgctacaaagraatcatcactcagctacaggaatatataatagggaaattcgcccaggtcttgacctgcgtatttaggtatataagtatgagtctcttttaggactaccgaatagatcatagcatgtctccctcaccgactgcctttctacaggtcaagaacgaagtggcagttccttgtcattmtaagtgttcaccactcccatttacttagaggtagactctccgtaactttcaaacagaacagttcgttttgaaaagttcctaaaatagattacagaacttacttcagcttctactgcaccgtttactagctgagtggtttagagaaagctatttgacctctctcagctccaatgttcttaattttaaattgggaataataaatacaaaccttaaatgagtctcgtggggaggagacgagacatataaagagttcagcacagtgtctggcatgtggtaagtgcctagtaaagcatagtagctgcccttattttcttcatcatcaactagcaaagaaggaggatgtcttccatgttgtttgtttgtttgttttatccccattgaatctcctaaacatcattcatattgtgattggatttaaatcttggcagggacacttgacatctgggaataagttcaattgtatctttaatgcacttagttacaactccatgtaactgaaagttacactaatgaagtataaaatggatcttcctttagatatcagtttgtatataaataggagtttctaaagacatttttttttcttttgagatggagtctcactctatcgcccagcgtggagtgcagtggcacgatctcagctcgctgcaacctccacctcccgggctcaagcgattctcttacctcagcctcctgagtagctgggatcacaggcgcccgccaccacacccggctaatcttttgtatttttagtagagacgggatttcaccctgttagccaggatggtctccatctcctgacctcatgatccgcctgcctctgcctcccaaagtgctgggattacacacctgaaccaccgcacctgacctctaaagacatttttaaacaacatttctataaagtcaaagatgcaattctatcatattgaaaaagtgtaattttatattagcccatcataaattgttttatatttggattttgtggtatttaaatttgtatgcataatctttatataaggaaaaatttgggaaaattttcattcataagcctgtaaagcattttcactttagtcattcattagaattttaatatgtttccttcctctggattcaccaaaaaacaacaacaacaatatttttttcccagcaagtcttaacatttgacctcaacagtgatgccaggtgaattctgggcatgttcccagcctccccacgggcagcygtggttcttgtttgtggagggactctctccsctagtttactcacagggtacttccacagtttacattttcactgaaatagattatctcatcttcctgcctgttaactgtgtttgaaaagcaaatcgaatgttgaatttaatgctgtggagatggtgagaaactgctcagaacaattaattccctcattttttttaacagcttaaaaactagcttgcttgaagtttcacatggcatgcaaacactttccctgggcagtggggaatgggtgttgagcccctgaagaatgagtcaccttttctgctcttaacctatctggacttcccctgaaaaatcaattgtcagccgagtttgggaaaattatttcggccattagactctgaaattcattctgaattctgaattactgaaattcatttatagattcagtgagtagttattaaaatcttgctgtgtgtcaggcactatgctgaatactagcctttcaaaattgaccaagtcagacttagtcactgtggaaaagacattaaacgcaaactaggaggaaacaaatagaaaatacttccagtaaattatagtaggtcattttaatgcagggtacctaagcacacagtctgggccattggattcatatttgaggatcagtgaggccttcctggagtgtgtgaggttaaagatgaggcccgagaagtgattggtgatgatggtagtgtgataggggcagtaagtagattttgaatgcttactttttcctaggtattctttagctcttgacctaaaatatctgactttaaccccacaataaatcccaggagacagtttctttttctaatcccatttcacagacgaggaatctgagccccagagaggttaagtaacttccccattgtcccataactacgaagcgccagagcctggattcaagtccagacacagaaacaatagtgaactcagctgaggaaagagaatgggaaaaatgcttgaaaggcaggggctgtgtgtacaaagcaatggaggatagcaaggaatggccgtttctttcctaggcaaagtacaaagagtaccaggcagacagggaaagaggaagccaggtgggccacgttctgaagggtctcgcaagttccattcagaatctgcaccagctgaacttcgtgattgtactgcagttacctaacagtgtcctcctccttaggaggcactaaacaattagggggtaaaggatcgtgatgtttgcaaattactctctaagaactcagacgctacatagcaacaataacaatacagttatacatatagtaataactatgttatattcattatatgtaagtagagacagaaagaggaaatctcacaaaattgataacaagtggttaacctaggtgaagaacagttttttgtacaattttaataactttttatgagtttgcaatattttgcaaataaaaagaagaggaggaggaatctactttattttatttatttatttattgaggcagggtgtgatcagagctcactgcagcctccacctcccgggttcaagcaatttttccacctcagcctccctggtagctgggactacaggcgtgtgccaccatgcccagttaatttttgtatttttagtagagacagggtttcactgtgttggccaggctggtctcaaactcctgacctcaggtgatctgccccacttagcctcccaaagtgctgggattataggcatgagccccggcactggcccccaactgcagaatctactttatatgtgtgatggggattcactcagtggaggattgtatgctatggagtgacctgaggaaatgtacacttgaaggtgtgggaaacaagctgctgagatcaggaacagggaggccacatgggaggatcctccagccatgctgcaagatgcctgccagcctggagggagctgtgacctggtgtccataggtggcagcamcaggacataacgtcagcatagtgagtcatggttttgtttaaactgcaattgtgaaatatgatcacagcataagaacatgcattttttatgagttaattgagtctaatttttaattagttaattgagtttgctataaaatccaagatgtatgaaaattaaaaacaaaactccaacttctccaaaaccttctctttattttttaggcttatgctggcttctttattcttagactcctgtaatcattgcctgtatttccagaattcagatctcattacaggttacatggtatccaaacatgagtaatgcatactttggaactttttaatggcaacttaatgctgacctatgttagttactccatttcatgtaggaattacctcatgtacttatattatatccccacaaataatttatgaaattctggttcagcacctaggtaattaagcaaatttacttatatgtatgtgcacgtgtacaaatataagtatatatacacacacatatgtatttcccccttcccttaacagatttctaatatgagagaaaaaagtaaactaatatttgtttgcatgcaatgtgagaaatgatagacatccattttgcataccagggcaaaacaatggaacctctgaatcagactgtaagtaaggtggctgaaagtggggacacactgaggggtcaggaaaatatttttcaaaaccataagacttaataggaattttaaaagacaagcaggaaatagctagaacaaggaagagaagtgaggccttctgtagaagttgacactctgccaatttcatcttctgcatttgacaacagggggtttattggagtctcttttgtttgaatcctgagtggcaacaaaatggtaataatgtattacttgccttattgtatgtaacttaattttctgggctttttaaacatgaattggaattagatgcaggattccctgttgtttttgagaaattcagtcaatgtttctcagatttaaccaattgaggctgacatctgccttgtagcatcccagagaatccactttctctggtaattgaaatgttgttctacaagagaggttgaaaagttccttctatctgctttcacttcagttgtcagcctatcctgtgctacttgtgttcccactaagatttaggagtggctcagaggatgacgttctaccaaatttcaacacagtgactggctggcaagttagtgaacttcaccatcctatagctacaggctacactgatgatgattttcctttacgggtgaagcaggaggtcatttgagtgcagtaaggtgttgtataatgacaatgacacttcagtccatgacagacacaggatggtggtcccatamaattatagtggagctgaaaaattcctatcgcctagtgacactgtagctgttgcaatgtagtagctcaaggcattattcatgtttgtggtggtgctggtgtaaacaaaactgtgctgccagtcatataaaagtatagcacatatgaagtacagtacataatacttgataatggtcatgaataattatgttactggtttatgtatattgtatactttttattgctattttagagtatactcctacttataaataagttaacggtaaagcagtctcaggcaggatcttcaggaggatttccagaagaaggcattgttataggaaatgacaggtccatgcatgtcattgcccctgaagaccttccagtgggacaatatatgggggtggaagatggtgatatggatgatcctgaccctgttaggctaatgtgtgtgtcagtgtcttagttttcaacaaaaagtttaaaaagttttacaaatttagaaacagaaaaaaagcatatagaatacagatataaaggaagaaaatatatttatatggctgtacaatgtgtttgtggtttaagctaagtgttattacaagtgtcagagttttaaaaattaagaagtgtataaagtcagaaagttacagtaagccaaggtcagtttattattgaggaactttgttgtayacatttagtgtaacctagatgtacagtgttcataacgtctacagtggtatacaataatgtcctaggccttcacattcactcactcactgamtcaggagagcaacttggagtactgtaagctccattcacagtaagtgtcctattcaggggtacgtttctttttttttttttttagacagtctcactctgttgccaggctggagtgcagtggcgctatcttggctcactgcaacctccgcctcctgggttcaagcgattctcctgcctcagcctccggagtagctgggattacaggcacacaccaccacacccagctaatttttgtatttttagtagagacgagacggggtttcaccatgttggccaggatggtctcagtctcttgacttcgtgatccacttcggcctcccaaagtgctgggattaccggcatgagccactgcgcccggcccaggggtaccatgttttttatcttttatactgtattttcactgtaccttttccatgttcacatgtgtttagatagacattgtgcatctacttaccattgttttatggtttccttttttattttttctggtagagtcttgctctgtggcccaggctggagtgcagtggcacaatcttggctcactgcaacctccacctcctaggttcaagcacgtctcatgcctcagcctcccaagtaggtgggattacaggtgtgcacaaccacacccagctaatttttgtaccttgagtagagacagggtttcaccatgttggccaggctagtctcaaactcctgaccttaagtgatccgcctgccttagcaccccaaagtgctgggattayaggcgtgaaccagcacgcccagccggtgttatggtttccaacagtattcagtccagtaacatgctgtacaggtttttaacccagcagcaaaaggctctaccatccagtctaggtttgtagcaggtgataccatctaggtttgtgtaagtatgctctgtgatgtccacacaaagacctatttctcagaatgtatccatgtggttaagcractcatgacagtaattaaaaacgtatgcttactatctgtcctaaggaggataggaatgtgatttttcaactttacctgtgtccctgtcatcacttacaaagctgttgaaatgccatctgacacagttctttaatcacatgtagtagacccctgtacagtctccccagcacttttcactgtgagcatttgctctgtggcatgtcttaatacatattactgatggagtactgaggctccagctgcccctttaaattgtgaacctatttgtatttccagcacttgctaagacttcactggtttgggaagatgacagttcataatggtaagwtcctataacaggaacaactgaaacctttaaccatctagagcaagctatgttcttactgaattccaataactttattggggtataatttacacatcatgcaaatcctccaggtatatgtccagttcgatcatttctaatacacatttataattgggcaaccagttatcacaatccagtttcagaaaaataaaccctaaaaagtttttcgatgcatatttgagccatcctcactcccaccttcagccctaggcaaacactgatcaactgtctgcttatagagttttgtctttttttctagaaatgttagataaatggaatcaaatgctatgtaatcttttgtcagtcttatttccctcagcgtaattttgagatttttctcaaagttattgtacgtgaaactcttcttgatgagcaaaactccattgcaaggatacgataccttttgtttatccattcaccagtagatggacatttgcgttgttattgtgagttacactgtgaacatggcgtaaaactcttcgtgtggatctgcactttcatttctcctcagttggatacctaggagaggaattgctggctctaacagtcgtgtgcttaacagtttcagaaattgctcgaatgttttcaagtggctgcaatattttgcattcccaccagcaaaaggtggtggtggggagcgggggtgttggtttctagtttctctacttcctcaccgacactagattttgtcaacttgttcattatagacgttctctaattactagtcatattaaacatcttatccatgtgcttattaacccagtcgtatatctcgttaagtgaaatgtctattcaaagcttttgcctaattacatggcattgtgttagtcatgccgtgcactggcttgttttcccgtgcatagaagttttgttttccttccttagaagaaaaagaactcaccccactgagttcgttaagcattttgtgggtacaaagataatgcaccatgattatataacctgagaggtgtttgtataccatgcagtattttgcatagaaaatgaaattctaaatccgacttctgaaatcaaaaccctggtgtcctcccatttggctcaatctctgtttcattgtatatatttgtcgatgactcatggtttgaaaatcacagaccataagcctcataagaggtagagctgaatctctcttgcagcttttccatgagtaactatttagtgttaattatgattaagacaataactctttaacaaagcataagtaagtcagattaatcagccagctttcacgcacactcttcctgggttctagagggctttcgtcagcaaattgaagcaatgacgatgttctgcgtggtactgttgtttccatggtaaatatgtgaattgattacccatgagcccaggtcacaatgtactgttgttgtgctttattccttattatgttagaaatcccgcacagcaggggactggtatctactcccgggtcaccttgggacttctaatatgaaaattgaaatgaattctttgttgttgtaaattgcaaacagaaaaacagtcgcctgtttccacacttataaatatgtatgtcctccccaccaatgaaattatggtgaaggatagatcaaagtgaattagcacctgtcaaggaaatatgataggtcattctgccctataattttattcccctttcttccragggtgacatgatcagcgaagcctgcatctcgctctcmttcacccattgtggttaacagcagttcaaacgtggaaatgaatcacctgctatattacttctgtgcagcaggaggcaaattgaaaaactaaatttttacaagcaaaatgagtatggctgtatttggactctgaatattgcttagtatttgtgtctagtattatgctgttgtgtgcctaaatgttgtaaacatttgttgtctgtraatctcttaggatttcataagaagcttccaaagccagaggtctaaagatctattcacttggccatataattctcctggctgtgttaaccttaagaattgtattgtcatcatatcctaatccatcatgtaaaaccttattactaccacaaatattaatgccaaaattgcttttaaaatgttacagatttttttttaaagagagaatccaaaatatatggcagaaatttgaaataaaaatgaaaaaatcggccgggtgcagtggctcatgcctgtaatcccaacactttgggatgacgaggtaggtggatcacctgaggtcaggagtttgagaccagcctggccaatatggcaaaaccctgtctctactaaaaatacaaaaattagccaggcatggtggcacacacctgtagtcccagctactcgggaggctgaggcaggagaattacttgagccctggagctgcaggttgcagtaagccgagatcgtgtcattgcactccagcctgagcagcagagtgagactctatctcaaaaaaagaaaaagaaaaattaggctggatgcggtggctcacgcctgtaatcccagcactttgggaggcggaggcagacggatcacgaggtcaggagatcaagaccatcctgcctaacacggtgaaaccctctctctactaaaaatacaaaacatttagccgggcatggtggcgggcgcctgtagtcccagctactcgggaggctggggcaggaggagaatggcgtgaacccgggaggcggagcttgcagtgaaccgaggtcgcgccactgcattccagcctgggtgacagagcgcgactccgcctcaaaaaaaagaaaaagaaaaagaaaaattaaaattaaagactaacgtcgtctatgtttatactatctgtgtaatttgcaatgcagagtaaggaacggaaccgggtagaagaagaggaaagccataaaatttaaaattaaattgaaggattttttaaaaacaagaagagcaaatatcagggaaaagagaataaatagtaagtaaagggccaattttagcttaaagaggaaatgccaaaagagcccagaccattgcagtagcctcataacagctttcccagacttcatcctaaatcctgattctgttcacatctccactaatgacatcttctaaaattcaaatgtaatcatatcaatcactcatgagaatatttttctacttaatatttttacttacttgtttgcttttcatttggcctatgatattcacctactgataatacacattgtatacttatggaatgatactgtaattagaaaaattttttattgtctttgtccaattatgggtggtattcctatttcataaacagtcccatcttcttaagtttctcatgagattttctctcaatcacttatgtttccataatcctcccaatgtatcttatgtcttcataaggccagaaataccaaagtggaaattacttttcttcttaacaatttcttgtcctttataaccaaatattagtgttctcaatatctgttgtgctatttggtggacaagtgtttgagctggatgttcctttctttttcttttttcttattaattagggataatgcttttttttcagtaaattcatagctattttctttatcatttgatatagtcgagaataaatttatcaatggttgtttagtcataactgtagcctcgcagccatgatcatccttccaatttgcactgtggattcttgcttatacattgttcagtttgatggggaccctctcttgtgtgcatgctttctctcttgctctctgtcaatggtaaatattcatgtttctgaaccgcaatgctatgtctatttgggaattttccagttacttattcacatattccagaatgttttccaaatgagaatgctaagttaaactgtcatacctatcatacacgtttgcatgtgcaatggcctgcttagatccacaaactgattggcatgcctgtttgacacacagcatgatgtaggtaatgaaaatgttctggttctacaacatattcagggtcttccatgtcactcacgcatagcagagatcaattacagttctcacatttacagggttgacacaaaagagatgaacaatcctaccaccttgatataaaggcttgaaattttttgataagaaaattaaaactctattttggatttcaagcctttaaaaatgtatcaaagtaagtgtcttgatgtgagggttaagagtgaatatgattctctttgtacatagaataataagaatagggtgttctttcacaaacacctttcaggttcatgaaaattaatcgataaacttgaaaagaacatcttattttattttatttttaaacagagtctcactctgtcacccaggctggagtgcagggcacaacctcggctcactgcaacctccacctcctgggttcaaataattctggtgcctcagcctcccaagtagctgggactacaggcatacaccaccacgcccagctaattttttgtatttttagtagagacggggtttcaccatgttggccaggctggtcttgaactcctgacctcaggtgatccacctgtctcagcctcccaaagtgctgagattacaggcatgagccaccgcacccaacgcaaaaaagaacattttaaaacaacatgattttcagtgatatctgcctacttttctcccatstaaattcagagcctgggctgtctaggaatgcctagagttccttaagcacttcttagaaactttgcttccccatagacacatttattgctggtgagaccagggaaacatccctctcctgcttgttaatggagcctgtggctgctgatggtcatgagtatcgcttgccagttcaggggatgtgcttttctttttctccaaacactcctgattcctctccaacccagaaaggagggacagtgtttgcatggtaccaaccaacacgctatatccatgtatgaggccaaagtgtagattaagatcaacagacctcctaggttttgtgctttgggttatggcagagctcttgacacaaaggactatgaagcatttcacaatttttttttctttttaataaaagttacatgtttcacgttaaaaaaaacagtgcagatgggtgtagtataaaaagtaagtcttctttattccctattcataccaagttggccattctaatactccctatcctcagagataatcaccatgaatagctcccaatgtgtacttagaaatataatatagaagtatgcatgcctacaagtgtgtaatatacatgtgcctatatctttttcataaaaggtcacaaatagaatcctacagtaaattctactttacagcttattctttttttcactttaccaatatctagacatcctcagagatcagtatatataatactaccttattctgataaaaagctttacagtgttacgttgtatagctgtgttgcaaattattgaatgaggttgttaagggtagacatgtagaattttccaacatttaagatattacaaatgatgcttcatgagcatctttgttctagccttagtctgctttggctgccttaacaaaataccatagaccgagtggcttgaacaatagaaatttatttttcacaattctggagggtatgaagtccaagtcgaaggctccagccgattggaaacctggtgagggctctcttcgtggtttattgacagctgccttcttgctgtccttacatgacagagagtgagctctggtttctcctcttctcataaggacacaaatcccataagggttctctgctttcatgacttcatatagatctaattacctcccagacgctccacctacaaataccatgacattggaggtaatggtttcaacatatgaatttgggggagacacaagcattcagtccataacagttcatgtatcgctgtatccttgagtatatcatgtttataagatatattgttagaaattatattgctgggtcaatgaataaatagacatagtaggttttttgtaaacaatgattgctctcaacaagtggttcatgagcctcacatcacctccattctggttattgctttttattttattttatttcacttaatttaattttattcattgttaaacttttaaatatcttccaatccaataggcaagtaaaagaatattactcagtttttcaataagattgagtgagcttgaacatatttcaaatgatttttgaccacttatgtttttgttctttgcagtaagttttgagtcctattgtattgagttgacttttttcttatttacacataagctcttttttcatatttaagacgttagtctcttggcatatgtattgcttagtcttttcccagtttgctgattttcttttgagtttgactattgggtgttccagctatctattgccacattatacattatcccatgtcttttttttttttttttttttcctgagatggagttttgctcgtgttgcccaggctggagtgcagtggtgtgatctcagctcactgcagcctccgcctctgggcaattctcctgcctcagcctccctgggaggattacaggtgcctgctaccatgccaggctaattttttgtatttttagtagagatggggtttcaccatgttggccaggctggtctcaaagtcctgacttcaggtgatccacccrcctcgtccacccaaactgctgggattataggcatgagccaccgcrcccggcctatcccatgtctttaaaacaaaataacatattactttttaaaattctgagggttatgaatttggaaagggccccatgaggacagtgtggtgctcttcctgtatgagttctgctggagatgtggtgtctcagagacctcatctgcttaggtgtctggagctcagctaggaggtgaggatggctggcagccaactggaatggcttgactggggctgtagtcctggggcctcagttcttgggtcagctgggttctgtgctcttctccatgtagcctccagggctctctatctccacgtggcccctccataccacctctccacgtgctgtgttcttcttgcagctgtacttcttagttcaggggtgtccaggagtgcaaatgcaggacctaccagcactcctgaggccaagttctgaagcgtccgtcacattctcttggtgaaggccagtcacaggcccagctcagattcacgagggtgggggggtacaggggcatgccttttgccaagaatggtttactggtgaccaccagtagagcagactacaagaagattatttctgcttttgttacgttgccatagaaatagtttaaacattttattggtagtcagaggtttgcacctactactttatggcttctggttttaacgtccgctcaaggaagatatcaccagtgcaatcttagaaaatttttcatcatccaactttttttttttttttttaggacagattctcctctgtcgtccaggctggagtgcagtggtgtgatctccactcactgcaactgctgcctcctgggttcaagcaattctcctgcctcagcctcccaagtagttgggattacaggtgcccgccatcacacccgggtaatttttgtatttttagtagagacggtgtttcaccatgttgaccaggctggtcacgaactcctgacctcaggtgatctgtccgcctcggcctcccaaagtgctgggattacaggcatgagctaycatgcctggcccatcgtttcttatacttttgatgctttctttgatttttcgcacttgaatttttattttattgggatttactttgtttttaaggaatacaatggagatctaaattaaactttgtaattttttattaacctgttccagtactgtattacggaatgacccattgcttcccactggtttgaagtgccatttttatgatatactacatttctatactgacgggtatttatttccatactctctgtttgcttttctccttccattttcctccagtgacaataacaccaagatatgttgaatagcagatttttttgcaatgtttttaggtacatggaaaacagagacattatccagggttgggggacataaaatggacacaaggtggctttccgaagagttgaaatatctggcgagttgcaggagttctgatagaaatggcctagaaaacaaccccggaagtcatcacttttttttctacagaatgtgggaagggggtttaagctttgttgaaaacagtaaaagtgtgacctcatgaggctgaatgactaaattcatctgtattatatttggtgggctsaactgtaagtcattccaccagcctgtcacaaaggggagcgactgtgacaattgtgccagctgtgtgtatatgagtgaccagagtgaccacttcctctttggcactgggcagcctccataggatgggagagggacagtgggcatgtcttggcttcttctctagagtttccctccaaaaatgagacaaatgaaaataccattctccttagtaaaagaaagtccattttctatttaaatatgggtataccttggagaaaatgcagtttcagttacagaccaccctcacgaagcaaacatcacagtaaagcaagtccacagttattttggtgtcccagtgcttctaaaactaactatgttgtagtctattaagtgttattaccattatttctttaagaaagtacatacttcaatttaaaaatactttattgctaaaacatgctaacaatcatctgagccttcagcaagtcataatctttttgctggtagagggttttgccttgatgttgatggctgctgtctgatcaggcagggtgttgactgccaaattgtttgggcagctgtggaaacttgttaaaataagacaacaatgaaatgtgccacatcaattgagtcttcctttcatgtgtgaaagaagagttctctataccatgatgctgtttgatagcattctatctatggtagaacttccttcaaaattggagtcattcctctcaaaccctgtcaaagccactgctttatcaactaactacaagtaatattcagattctttcagccgggcgcagtggctcatgcctgtaatcccagcactttgggaggctgagctgggtgggtcacctgaggttgggagtttgagaccagcctggccaacacagtgaaaccccgtctctactaaaaatacaaaaattagccgggtgtggtagcaggtgcctgtaatcccagctactcgagaggctgaggcaggagaatcgcttgaacccaggaggtggaggttgtggtgagtcgagattgtgccactgcactccaccctgggcaatagagggaaactctgtatcaaaaaacaaacaaacaaacaaaaaatcctctgttgtcattccaacaatgttcacggcatcttccctagaagtagacgccatctcaagaaacaactttctttgttcatccataagaagtaaactgttcaagatttatcatgagattgccacaattcagtcacatcttcaggccccacttctaattctagttccagttacttcctccactgaagacttgaacccctcaaaatcacccatgagggctagcgtcagcatcttccaaattccccttcatgttgctattttatctcctcccatgaatcatgaatgttgttttccttcccccaccggcatgttttccatgaaggttcttaatgacatctagactattttactatttcactatkgcactattgccaagagaatagtgacacccataaccacaacgttaggtcatgaaagcattgactccatttagtcatccattcattcacttatcaagcagttatagtatgtacatgctcttatagactatttgtggaaatctcttctttgggcctcaagagcacctctgaccagggtaaaacctgcttttagggaggaaagtattgagacactgtccagcggaagcaagagagcacatgtcccgaaagcctaagatagaggggctggaggctgcgtcagtgccacctgkcagtcatcatcttttcatacatgtccggttccttctatgagttcctcdggccctattactctacatccattttcttcccaccattaatatatgtgaagaaagtatgcaagcgctctctctcgttttccagtgtaaacgactggagattctttttttttaatcaaaagaaatgatttttattgttacacaaaacatttcttatcagggcacacatacatctagagagcagctgcattttcagaacaaatagatgaaatacctttggtgaactgagagttggggaaaacaagtcaccttctttaaattttggtaatgtgtttactgaatttaaacagaaatcaaaatcaggacagagtaagaaaaaacatttctgcggaaacaaaatgccttctcatgagcagagcctattgtgatgctcattaacaacgtgagattcttttaagctttctctatgaatcatttgtgtgagcatcctgcggatttagttctccatgtattttataaagaaagaacaggaagtaccaacaaacaggagagcctcgtgcattgactcactggctcacgttgctgcctgagagtgacacagcgccccttacattacaggcctctcttcaatttattttatttttttaatcattttgtattatttctctgtgttatagaacacaggacacagtggctgtagctacatttggacgtcaaaacacattttagactctttgtattgatttagagtttattacagtgagttacagtttatatttttccatgttcttgtttgccaattaaatgtctattgatacaagggataaataaaaagaaaaatagttcgagatgcatttttaaataattaatagattaagggttgtacctttaattttgttattgctaaattttgtctgtccaaattatrgaactggtgtttttttttttcattgaaaagaacttcactgattttgtgataattacataccaatctggattttaaattaaactattcgtttttttttcttgtaatcacttcaggcagaaaaagaataagtaaagtgtggaataaaatgttttttacctctgtcaaaatgatttaagaccattttactctacctgtgtcatcaaacagaattcattaaatatccagaatacagtcgatatgtcaaattccaggaggttcagaaaatttagaagatattcctcccctcaaagtaactggcaatctggcaggagaggagaaggaacatacagttgaatttgctgtgagagacctgggcttgtataaacaagatgccctgtttccatccggaagattctttcagactaggacctctctaggtatcgtccatgtacyggaaatctgcyccactgactctcacgtgctccccaggtcattgayggttccgagctaaattgattgaatactgctgttcacatttatttcacaaatgtcaagttttgagtttcactttcctggaaaattccttatgttctttgttgttgttgttgttgttgtcgttgttgttagtttgagatggagtcttgctttgtcacccaggctggagtgcagtggcttgatcttgactcacggcaacctttgcctcttgggttcaagccattctcttgcctcagcctcctgagtagctgggattacaggcacccgcccccacacccggctaatttttgtgtatttagtagagacagggtttcaccatgttggccaggctggttttgaactcctgacytcaggtgatccacccgccttggcctcccaaagtgctgggaygataggcataagcccctgcgcctcgccggaaattctttatgttctaataattgcagccttcttaagtttgcacctttgctgagagcgctgtttggtcctttcgatctcagcaaatacagtccgaactctacagaccatcctggctcacgtcttacgtcactttcatgccattgtttacacttctcctgctattttcctctcttacgtccccagtgcacattcacaaaaataaatcaatgacacaaagttttatttcaagcagtaggggaaagatgaaaacttgaacataaataagacaagttagaataacttggcaaatgtgagctgttagcaaaattcagtgctaatatagaatatgtgtatatatgtgtaaaaatgaagagatttgcaagtgtggttatgttgcggaaataatttttaaggtgtaataggagttgagatgctgwttgcctcaacaataactagtttgtgcatcccattcttttcgagctttttttttccaaatagtctcaaaacccttgacgattttgccttatttttattcaaagaacagtgaagtttcttgtaaaccagtgaaattcrtctagaaccagcatgaaataatgttctccaaaatgaaatacagaagtgtatcctttatccataagggcagagaaaagaacaaagccataggaatagtactgaaaatttcacatctcagaggaatatctggtgtgatggttaacaytgagtgtcaacttgattggactgaaggatgcaaagtatcattcctggtgtgtctgtgagggtgttcccaaaggagataaacatttgagtcagtggactgggagaggcagacccaccctcaatctgggtgggcaccatctaatcagctgccagtgtagccagaataaaagcaggcagaagagcgtggatggactagactggctgagtcttccrgccttcatctttctcccgtgctggaaactttctggcatcgaacatcagactccaagttcttcagcttcggggcttttggaccttaaaccacagactgaaggctagactgtcacttccctacttttgaggttttgtgactaggactggcttccttgctccttatcttgtgatcttgtgagtcaatactactaaataaactcatatatacatatatatatatatatgtatgttctattagatttgtccctcttgagaaccctgactaatacacttgggtataactcaccctgatccctagaaggttgtaaaaatactcacaaaattaatagcaaaagaagctactggaaatcatctaaccaagagaaagctagatggagtcccagagtcgagtggcttctccttggccagagaggtcccttaagctacagcaatgagaagccatgtcctgtrccaggcacagagcttgctgtcagccctctgatgctgatggtggaagctgggcaaatgtcagcaaggttctgagaagaagtttctttcaacatggattcctgtacctattccagttcttatcaaatgtgtaaacgagttaagacacattcagacatggagcatccagaaattgttatcttccatgcaacttttcaaaaaatataccatgatattattatatgatatggactgcagtaaaggacaaggaaactcaacaatgtggaagacacatgcaattcagaatgaatgaaaagaattcccaggctgagcatactggcccatacctgtagtcccaacattttgggaggccccaggtgagaggactgctgaaagactagagttacagaccagtctgggcaacatagtgagaccctgtctctcttttaaaattaaattaaattttaaaaagaattcccaaaggaggaaaaaaatacctgaaaatgtccttttttttttttttttttttagatgcagtggtgtgatcttggcttactgcaacctccacctctcgggttcaagtgattctcctgcctcagcctcccaagtagctgggattacagccgtttccaccatgccaggctaattttcatatttttggtagagacagggtttcaccatgttggccaggctggtcttgaatgcctaacctcaagtgatccgcccacctcggcctctccaagtgctgagattacaggtgtgagccaccacacccggccgaaaatgtactttaaaaaaatatatatataaataaaacccaagataaaggaaggcaggggattcagtaagaaaattccagaaagacagcttggaagcggatctgaaaaggaaggagtcaacttagagcagtcagttaacgagacactgaatgagctgggagagctgagcactcccgtggggaatccctgtgttgcttctgtcaacaagaagaaggaaaggcagctttgacactcaggaaaagcaaaagtctacaccagaaacctgtccatagacatacagcaaaaagatttttcaaagttagtgtaaggaataattattcgtttgatctgaatttcagaaaattcctcctgggktgacccaggtttaggaacacaagaatgagactgtaccttcaggctccagccagcaaacgtagttagttagtgtcacgagtgtgtctatttcacttccagcatccactcagaggcaaggcatgtaatcatggttgttaacagaataaaacgtaaatgtaacaaatcttgaaaatgtaacaataatggtatagttgaaaaaaagctgggaagtggagggagacgaggtgaaaataccgcccaggctcctgtttctttattttacgtggtggatattcaaggtggggaccaaacttcgcagatggagatgtagctaagcattaaacaaaatttaagtccgtgtaagagttaaaaattagaatgtcaatcagaaattgggaggggaagaatgcagcagcagagccatccacaccttgacctccacggctgcagtcctatcctgactccccccacatcagacctcccattcccttgccttttgtcctctgcatctcaaggtctgtctctgcagctcggcctctgcacaaccccatcttgctggccacacgctcttcttgacccacacccccatccccagtccctgtttcccaagaggatacagagatggtgttggctgaatctgcgacttggcacatcccaagttcaggctttcacagaggcccaccccctgcggtcttacctcacagggaatgtgtttttaaaaacaaatttgaggtcgggtgcagtggcttacgcctgtaatctcagtactttgggaggccgaggcaggcagatcatgaggtcaggagatcgagaccgtcctggctgacacagtgaaaccccgtctctactaaaaatacaaaaaattagctgggcgtggtggcaggcgcctgtggtcccagctactcgggaggctgaggcaggagaatggcatgaacccaggaggtggaggttgcagtgagctgagatcgtgccactgcactccagcctgggcaacagagccagactctgtctcaaaaaaaaaaaaaaaaaaaaamaaccccacaaattcgaaaacaagccaacacaccttgccccctcaaaaaaggtctggctatttttttccccccaaactgtgggcgtgctggctcagcatcctcaggacccagctgttgcttaattttaacttattattttttaattaatccaaataaaaagttgttgggctccaagacaacctgggcacaaaggttctgaagggcagtttcctagcagccccaggctcactgtgggaagggaccatgttgtcatttcctcatcattccatggggtgtgtctgcctgggccaaccctgtgtgaagaggccagtgctggggacagtctgcactctgcttccctcctgtttctcctgcccaccccagctccctgtttgtatctgaattgtggatcctgcagacgaaactgcagccatagttatttgactatatcttaactgaggacttgcattgcaaagccaggccagcactgcgcatacatacaataaaagggaccattaaaaaaaaaaaaagaaaaagaaaaaaagaaagttctctgtgttcccaggctcctccctgcacactttctttatctctttcctcatacttaagtgggtatatctgtttcattctgaggcaaaatattcatcagcccttttgaccacaaatccaaagcactgtgttttgtaggttttgttaggaataaaataygagctcatgtcctctgtctttccctgtatttctgactctaaattggttggcaacccaacaaataatatttgatgttcattcaccctaaaaacaacaattttcctcccatcagaggctgcatggaggtagatggcggctgtcagctcagaaacgaaggtcccaccctcttttctttgccttcgcgaagtttgacttctgtctccttggtcaagacatattcatctttttgactcagaactagctttcatccaacarttggtgaaagtttagcaagcagatctccgaggtaaacaaaagagcccactttgcagttgctgccaatttctgtggtgtaaatacacccatctgggccagcttcaagctaccagtgtctcctcactgagtacagacttgggaaggaaagacacagttggctctagagccagtgcagccgcctccagcacaacgctgcttccgtcctgtctcctttggaaagactcctctaaatccctctcactagatctagacactgggtgctgggcaacttcggacatctgcctttaaagacaatagcgatgaacagttcccctgaaggtgaggatcagatgactcactgccttacttgttaagtagagaaccagccagaaaccagtattccagcacagtgcaccgtcttgcccatcttgcagcacacaactttctgagagcaggggtttatacaggcagcatgaggtgtttccctaacgctgtgccttagtgcttttgtcctatgtaagaaatacatagatgagccgggcaaggtggctcacgcctgtaatcccagcactttgggaggccgaggtgggcagatcacttgaggacaggagtttgagaccagcctggccaacatggcgaaactcagtctctactcaaattacaaaaattaggcgtggtsgcaggctcctgtaatcccagctacttgggaggctaaggcaggagattcacttgaacccaagaggcggagggttgcagtgagctgagatggtaccactgcactccagcctggggaacagagcaagactctgtcgcaaaaaaaaaaaaataaataaataaataaatagatagatagatagatagatagacggatgtctattacatttacacacacacaccagtgactctaaaccactctctgcctaaaaatataattattttgagtgaataagcaaaaccatatgaaatatttagaccgtcttaacccatttaggttagacttcttattgaatcacaacacacagtttgaaaagactacacagcagtcttctctcgtgatttaatcaaaagtccagttcagaagccagtctcttctgagcctctgcagcctggtgacgttttgacatcttgcaagtgggatgaagcagaccatgctcacagagggtgcgaggacggggccggccaggggagtgccctgacgcattgctggaaagaggcagcataagcccagccagggtctttagggaaatgttaacttagaaacccctgttctcctatttttctcaagtcaaaggaagagtctgctattgataacattgcagtgaaatggaggtagaggaatttgcctttcgtttgggaagaaagtaccattcggaagcaaagccccgtgtgtcagcatcacacgctctgattcatcacttaatgtgcaggccaggttaggctgctggctccatgactcggcatcccactctctccaggggaacttgcacctcgcagcccaagctgaagcactcgcagctgcagcagcagggtcagaggaccctttctgagaatctccagttacctcctggacaaaatcaccgtccttttgccatcatacctctctctgttcaaatgcataaatcactgagtctttcctgcagccacgatgaatttacaaaatgtaacaatcaaaacctgttcttgttaatatttgttttaaggcaaatatctacatttttatgtcctyctccctgtttaaatcagacccgctccattgtttgtaatctgttgtctgaatgccgttgtttctgtatgccagaccaaaaattccacattagaacacttatgggcagagtggagtggaatatttgaaatttagaccatttcagaaaatctgaggtgtgttgtcttggcagctttgtaatatctcatgatgtgagtatttggacatgaggaaaatgagacgaatttactcactccaggcacaggggtgaaggagactggcctgcccatcctctgccctactttttctctcccccaggcaggactgatttatcctgcagtttaactacatactggagacatgcttttcctcgcactcagtacactacrtctcttccttgggccatcgatccaaactgcttttttacttttcttattaaatttattgattattggctggacgcggtggctcacacctgtaatcccagcactttgggaggccaaggccggtggatcacctgaggtcaggaggatcacctgagtcaggggtttgagaccagcctggctaacatggcaaaaccccatctctactaaaaatacaaaaaaattagccgggcgtcctggcatgtgcctgtagtgccagctactcaggaggctgagacaggaaagttgcttgaacctgggagttagaggttgcagtgagccaagctcataccactgcactacagcctgggtgacagagcgagactccatctaaaaaatatatatatatatatacaatttaacatatgtgttatatataatatatattatgtattgtatattatatattatatatgtaattatatataatatacaatacataatatatattacatattattttattatatatttatattttatatataattatgtatgttgtatatatttatatttaatacataaatatatgttatacataatgtattatatattatatgatatattactataatatataatatattatatataacatatataatatatgttatatataatatataatatatagtatattatagtatatactacagtatattaatatataatatattaatatataatatattacataatatataacwtataaaatatgtatattataatatatataaaagatatgttgtatatataatatatattataatatataatttatattatatattacatagtaaattatgtataatttatatatatataaaaatatatattatttttctctaattttctctaatttgatcccacactcagtggcagcagcatccaggctcatgtgttattggcgtcacccaaagcyccatgtcttgtttcctgatgctgctgctgctgcttctcagtggactccctctcacttccatttcaacacgttcacatctcacctgcacggtgcatagtccaatttacatgctatcagttccagaaagaccttctcgataatttcagctttaaatttattctgcttcctctgaattcactaaaattttccgattatctatatttttattttattttattttattttattatttttgagtcagartctcactctgtcacctaggctggagtgaagtggcatgatctcagctcactgcaacctctgcctcccaggtccaagcaaatctccctgcctcagcctcccgagtagctgggattacagacgcccagctaatttttgtatttctagtagagacagggtttgatcatgttggccaggctggtcttgaactttaacctcaagtgatctgcccacctcggcctcccaaagtgctgggattacaggcaagagccgcctggcccggcccggttgtccatattttaaaatatatgacttccctgctgtactcaatcccacaatacacacatagtacaacgtatgggaatacgccttgaagacctatttgtagatgactggagaaaaataattggttagaaaaaaggacagtgtatgtttggtaagtagttgttgattctgacccattcgaagataagcaggtgatatcatcgataagctgaagagaagagccaggcagtgggaaatatctttgtttataaaggtaggatgtgctaccgtagcaaatggaaaaatatgagtgagaaaataaacattcccctcaaccccacttcccagtgatgaacacccttcacctgtggctggatatcttttatctgagcctttggtaaatatttgataaaattgcaaaatattacctacatattatttttggtttttcccaagacttccctcagagtgatgtcagcaacagttttaataaggggggaaaggctttgtcctctgtcagaataaacctcataataacctttgtaaaaaattgatttgtataacattttgtaattctcatcggaacatactgaaagatgtwtccgtctggccttatttttggacaatgggaaatatatttatgcaaatatctccctgaagtttctcatttcagcctcatctgtgaaatgtgtgcctggctggccagggcctccccactccacagtcactgtctgggccacgctgacatagctgcggggtggaggatgctgactctggccggtccttgaaggcagccaagggctgctgtgcagccagctgccaacctcaagtaagcgatgctttgggcagaggagcccttggattccctgcccttttgcccttgacttcaaccgatgatttgccattgagctgtgataggctgctttatgctgagttataagcgttccgggccttttagacattattccccatcacttttctagattcttcactgcaaattacgaagaagccacaagcgtacatttgcaataggaattagaccactacctcagttctcttaaaattaaagctgttgcagcctagggagggggaatcaccaaaattatcatctgattaaaccatgttttaactattgctaagaaactcagacattttatgaaacttgccacctatcactctggaagttctgtctacccagatagcttcgcccagtaccaaaatgacattccactgtcagcaaagatgcccgcaactttagctttgaaaacatccatttagtaatcatctgcatgacccacttcagccacagcgttttcccataaacgatggctgtgaggagcacaaattgtatgtgcctccgtttcctcagctgcacgatgaagataattatatccatttggagaactgttgtgaagtgtacataaaaattacgtagatgaaaggatattgtgaacagtgtaaagcaatayacagatgtaatgcgtaaatattattgctcgtgggaccttcgtgattccctagaacctgtagctcatttcccttctaccttatatgcatcaggactcctcatgaaactttaagtaaaatacttccgtaattcaaagggttcactgtgccaaattgatctgattgctgattgaaattcatttgtaatatcttagttttacagattcgttttaactggaaaattggcaaatacaaggcagcttaaagtatcaattacaagtatcaattatagtgattttgctytactatggaaaatttgctacaagttctgttatagtcatccttcttaaaactcaataatcagagatttgttcttgatttaattgaagatgtagcagatgagaaaaaccttttctatgcaactgggagacttttttttttttttttttttttgagacggagtctcgctctgtcacccaggctggagtgcagtggcgcgatctcagctcactgcaagctccgcctcccaggttcacgccattctcctgcctcagcctcccgagtagctgggactacaggcgcccgccactacgcccggctaactttttgtattttcagtagagacggrgtttcaccttggtctcgatctcctgacctcgtgatccacccgcctctgcctcccaaagtgctgggattacaggcgtgagccatcgcgcccggccgcaactgggagacattttatatgccatgaacaacataaattatcacagagggtagaagcacacaattctaagccaaaatgtactatagaagcaaaattatttttaaacaattgctgtatagagtacccacatctgttatttatcatttgaaattgtattgctttggtaagcagtctaatcaatcaaaccactatgttccctaatcccaatgaagcattcttctcttacagaaggaaaatgggcctaaaaaagagataatactttagcagctattttttggattagaccttttggagtcttgaaagggagcctcaacacatacataaataaggtgaycgcatatctgaaaaagaagagaagttgaatgagagggatgataggagagaagaagcatgaaacaccagctgctctcatagcatgtgatgtagctgcattcttcactgctaaattaaaaaacagattcaggcttctgggcttgaggaggctgcagttaggaatgaatgccacgtgttcacttgagctcgaacaaagaagaggatatgagtattgaacactgttggctcagctatcggctgtttagctgctatctaggccaagggatagagacagtgatagtgtccaacatgtagaagagaaagttagaagatactaggaatactcagaaaactatatcatcggtcattgattgagttactggaatcatttcttcctgtcctccaattctatcatgcccaagagattacaccacaatgtgctgtacgtgactgtgcgtgctgaacacgcctttctacaacaatgacgggttttcttctgtcctctgaatattatattatctaggaatagaacatgaccagaaaatagatccagtggaatttttttttcattgttccaaatttaatttcagcatcaggaattgagatatagaaaaaggaaatgaacctggaaccacaggcaagagtataatattggaaaaggcccccaacagtgacaacaccatcttgtaaacacttacgaagcttggtcctgtgaaaataagcatacatcacctcccctgctcccccagctcctcccgtcgccattagttcttacatgccgtgttttccttatctattgccttatcattgtgtgggttatgggtttgggcagggctaggtcaggggatgtttctactctatatggcgttgactgaggttgcttggtggtgctcagctggtggaggggctcacatgtcaggcatcttggtaggtgtggctggaagaatggattccactatggttgttgatgggagatagacacatggcctctgctaaatgggcagtgtcagagctcagggcacccagagagagtgatctaaaagacagggaatggaagctgcccatttttaggcatgagccccaaaactgacagagcagcacttccactgtcttctattcagcagagtagtcacagagtctgcccaggttcaaggggagaccccaccttacaataggaggagggcaaaagaattcatggccaccttcaattcttccatagtcctttctacacataaatgtagtgtctcataagcatacctgacagctatattttctctcacataatttattcatcacccgtcacacctgccctgcttcacctgcactttagtctctcctccaacactgctgaggggattttcccttcttactgataacaaggtggtctctagccccttagctttacttgttcacttcccaccagctcagctgattctgtgcccctcagtcctttccagctcccttcgtctgggtaattcctatttttccttcactgctcagcttctctaagaattcttccctccaaccctgccccttacccccactgtgccctcatccattcattcatgtgtccattcaattgtttgttcaacagatatttactgaggcactcataggcaccccagctaactacgggtgaaaaagagcataacggcaggwggggtgggcgtgctcctgaatctcagaagcctcactggggggcataacagcaggaggggtgggcgtgctcctgaatctcagaagcctcactggggtgcataacggcaggtggggtgggcgtgctcctgaatctcagaagcctcactggggggcataacggcaggwggggtgggcgtactcctgaatctcagaagcctcactggggtttggctccccagggggacccaggcagtgttgtgttttagattcctggccacctgcacaccttgtcagcaccttcagggtgcaagcaagtccagccacggttagcaggctctagttctgtgagccctccatggaaggggtatttattttcttatgccaatcgttcrggtctcctcttgccgactctagtgtcagaggggaaaagagagaaatttcctggctcagtgaagctggagcaaagctttaccagggtgtttagtagctagggttggaattcaattttgagttttcctgctgtggcagttaaatgtgaagctttacattaccatttctctttcattcttctcagctatattttaacttgaaagttttttcactggtcatgaaagcaaccaaatgtaaggaaagtcaatacaaagttttaaaaatagcaacaaataagcggtctataaaatattgttataacagagtgaggtcagatcttcagaaataacatctattcccacctcagattttggaggtgcttcaaattttccatcttaagcattggtggaataagcacataattagactttagaacaggaccaaatcatatcctcattaaataaatacagttataaatgatggaccacatttgtccaacatgcatatcattttaatgtttgtaagtaataattctgccaatatggcaagccagatatcaacaatgtgtctagaagcgcatacaaaagagatcactaggatctgtgaccacctggaagggcatgtgaaaacgttcccatagagaaaggctaatttcacttaggacacaaacacgggaagaatttcaaagataagtatatcgcaaggagcatattccagacatggagaaatgcatgagtaacgcacgatttgaaaacaggaagtatttaagatacattaaggtccaagcaaagcactaaatgggaaatgaggcttggaaaggcaggtgctgtggtgaggattgattggaatcccatcctgatgagtttggttgtagtttagaagggaatggaaaactgctgaaaagtttggaaaaagtaggaatgtttttacagctatgattgaggaaggttaatatgtcagtcatttatagtctgaactggggtgaagagagatgttataagaataccatagtggtctaggaaggaaataatgagactcgcatgaaatcagtgaccacagtagaaaaggaaaggaattcatgggaaagtcattgaaggcagtggccacagaaagattgtcagtagttcatggtggggttggtaggtcgaaggggttggcaggtgggtagtggagctaatgaagagagagtagtgtcagaaaagtctccaatggtgagaactttccatctgaggacacaggagaaggtcacaccatttaatgcaaacagaactcactatttatagcacrtagaacttagctggggataggaataggatcgataatgaatgtggctttttacttcatatgtttgttcattcaaaaataattttgtgttcttctttgtgacaaatcgtgtgccaaaatgtttggcagtggagagatgacttacccagatccgtcgaggagaacacagataggtttaaggagaaaggcatgaagcatcttgagcaagtctcagaatccacagagtaacagaataagaaagacacagctcctttaaaactctgaatcattatttcttgctcactttgtggctgggactggatgggatcattgttatcatcttatatttgttgagttattatttgccaggcaccaagcagtgtgtgtaaagaacctattatttagttttcagagacactttctgaggtggatactactgactggtccatattttacatgtagaaactgaggctcagaaaagatgaagaacttgcccaaggtcgctcctctagtctgtctctgttcctgcaacagtaacrtagtgataacatagtgaaggcacagacagtgtttaaggtttgagcccagtgtctatttaaactatattattgttgtttctaacattaggcatctataggatactttgtttcctgatgagaacaaagctaactcaacttcatggcgtgtgaacagataaccagccctcctcaattctgtgctttaactggctaagctaattactgatatgttagtattctatggtacccctctactttcaatcactcagtaaaatcctgatggctgggattatctatacctttgccttgaaagagcataccaaaagccgcttttgatttaactataaaaggggaatgtataaatatgtcttttttaagcacctttaaaacaaaatattgatgggctgggtgcggtggctcacgcctgtaatcccagcactttgggagactgagacaggtggatcacgaggtcaggagttcaagatcagcctggccaagatggtgaaaccccatctctactaaaaatacaaaaattagccgggcgtggtggcaggtgcctgttatcccagctactcgggaggccaaggcaggagaattggttaaacctgggtggcagaggttgcagtgaggcaagattgcaccactgcactccagcctgggtgatagagtgagactccgtctcataaaacaactaaatattggtttctgccaccaggtacattctctaaaaccttaaactctgaccaatttcacaaaatgaccattaatttttaacttaaaatttttaattttttttattgtttagagataggatattgctctgtcaccaaggctggagtgcagtggcacagtcatagctcactgcatcctctaactcatgcgctcaggagatcctcctgcctcagcctcttgagtagatcctcccacctcagcctctttggtttctgaaaacaaacttgctgtagtttctgaagaattattcaagcctgtaagacctcaaagcctcatgtttagggacccagcaaaatgcccctagttcttacctgtgatacccaattttcagtcatacaccgaacaaaaggaattggaggaagtaaacacaccaccatgcccaactaatcttatttatttttttttttggttgaggtggagtctagctgtgttacccaggctgatttcaaacacctggcctcaagcgatcctcttgctttggtctctctaagtgctgggataccaggtgtgaaccactgtggctggtccaaagattttttgtagaggcagggttttaccacattgcctagactgacctctaacttctggggttcaagagatcctcccacctcaacctcccaaagcactgggattataggcatgagcccctgtacccagcccattattttaagaatattcaaatataagcacttagggaagatgagaatttataagaagagtgaggattgtttgcctgattgcaaacttcaaaaaatttgcttcttgaaaggttatagttaagaggtcacccagagagtccatcaggatgcaaaggaaatgtattgggaatttcgtaaaccatccacttccaagaaaacttcacaggaatatttgtgagatgtctaggtaaggactaaacaagggcatcactctaacaagcgtgcaacagcatgatctctgaaggtcgaacagggctcttaacctacatatttgcttttcttgagacagcagctcctctatcccaagagctataattagatctaactgctttctccataggtggctcagacactctacatcttttacctctgaaaaacctagatgatgtcagaatgaagatgtatttgtcttaccccctgtagatatgcatgcacttcacaaatcccctgtagtctggccacaatttggagtccttcaaaggttgggaggaatgtttagggtgtagagatgttagacaaagggctggtacttggaagacactctaaaaacaaacttgctgtagtttctgaagaattattcaagcctgtaagacctcgaagcctcatgtttagggacccaggagaagaccctaatacttacctttgatacccaattttcagtcacacaccgaacaatacgaaattgaaggaagtaaacagaaactagcagaactcactggcatctcagcttcaacctctcattacaaaaagtgctttttagattaaaaagaaaagtcacttttatggtaagattgttttgaacagcacaagctgtgcctagtgtttcctyggggcgcccatgaacttggctgtgatcctatcagccaaaaaactagcagagccyccaggggaaggggaggcgctgtggcccccctggggtccgcctccggaacaccctctccccgtgcttttaaacacggccaagttctgacttggagcagccataaaactctcctggtagcattttaaaggcttttaaaagaatgccccctcataatgtgttctattacagcggtgattgttattgttgttatttcccgctttgtagcaagagtgaaatctccctcggggtatcttgagaatggattgagaaactctgacgatagatcacagtagcccacttcattttctgctgtaaaggcaagttccgcctggcatctagtgtactggttggcaaggtcctcctctgaagaagtgattgttctaagaccccggaggcagagcgcgggaaatggaacagagtttgctgtgaaataacactatggaaaataaattctatttaaaaactaatgtgatcctttcccaattgtcttgtagattcattgactggaatgtagaattctgttccccaaatgaatcaacagtgccttgaatagagaaagacagacttttcccagggtaaatccctgacagagtgttatgttcacggcacagacagacatctgtcttcccaactctgttaggaccacattagatctgagacagcatccaccttttctccagcattcccccarggcttaaatccggccgcatggctcctcttcgtcttcagcccatgagtcccaaactcagtgagcttttctgaacgcatagcatagattaaatgactacatccttttgctctcrtctccgttgtggaaccccagagtctgaaatcttgggaagctctgtgtcatttactgagtgtgatgcgatgccaagaccagggctgcygtacactgaatattgtgtaagatggattaaggcctctttcatcctgaaggaaaaaagggaagtttgccagctacaaggaggttggcaaagagaacagggactctttcagaaataaatctgattttgaaaaatagcatctcaggaagaaagccttttaaaaagctaggaagtaagataacattctcagaatactgtaaaataagaactgattttcataggatttgaatgaataaatcatctcattgctttagtcacacaagggagacggcagaataatagaagttgggagctggagagctgatacgagacctgttctgaccccatgagtctaagtgagaggcctcagaccccagctgctcctcgaatgcgtgtactttcaaatatatactgattactaaatgtatggggcttcttttggtttctattcttactacattttattttaagcttcttagcaataaataataataagtgctttgaaaacattaaaaaaattacagataattggaagctgtcattttcattagccctatattctctgaagagttctgcagtttctttaacaaaactctcaagagggaagtttacatttattgaatgcattctctcaaccaacactattttttaaaacttttaaattgtcttacagttgtgttgacttctttccttttgatgtacacttgaatgttaacacctgtagaaattactgtggctaccggcataaccaggattcaaaactcttccctcactgcaaatccctgcagctgtggctgtgtcgtcatctcccagcaccacctgacctggcctccatccctccagtctgtctgtctgagaatgctggatgaatggaaccatgcagtaggtaacctttaaggcgctccctttattcagggcaaygcctttgagatgctgtgcgcccgttgttcatccctctctgttgctcagtggtgactgttgtgtggctggcaccacagtgtatttgagcatttactcaataagggacatctgggctctcgtttttggcagttgygattggagctgctgtgtacattcatatacagtgtttgtgtgatcatcggtctccatttctctctgttttcaaaattgagttgttttgtccattcttcattcttaaaacttttcttcggtgaccctcagataccccacatctctgcgtctctgacttcgtggttactttgttgggttcttcgtctttttaccttggaatatatcttttttatttccgtagttctcttatttcttttaattttattttcttgccgatcatatatccaagtacagtttttatggaaataaacttgaagtttaggttcttatgtttaaattacatttaaattagtaaggatgtaaatttttgtctgcccaaagtcagcttcttgaggcaggcacagaatagggtaatgaactttattttcccatgtttgggagagactttgtcagtaagtactctaaaaaagaaatccagcaatgggattgaggaagcatgaagtctaagctgggcaaggagggagctaaggacaggagggagtaatgaataatgaaaagttaggagggttaatggattgaaggttctagtagagttgaaaaattattcaagtggggttactaaagggattgagctgagggtatgaagtgatgatcaaaggatgctggaggattatgaagattatgggcagttattgataatgacaggcctacaccagtggttctcaactgtcacaatgtgtgaaaatcaaccggaaaaaatgtaaatatagttccccatgccccactcctagaaaggctaattcagttggttttggatgcaagagcaactcccagagattgaaaactactggtacatggtgcaaccccaggagaggtgggcaaagttgagaggatggcaagaccgtatggtgtgaggagaaaaagattgaggccagtttggatgaatgaatgtgttgtgagaacattgaggttgtaccgcattacaacagaagtgttggaaagtaagaaaatgacctcgatgctagctaggagggctgcagaagctgttaacatgaatgggtagaaggtaagcgctgacattcagctgtcatatgctgatattggagggagttaatgagcaaaaataatacccccaaatggaaggacacattgtctactgcctactggaacatgatattaatgttcaaatcacatctgataattaggcaaatggtcaaatttttcttgaaatttaataaatttctccattgatgtcaagcarttttagaaggtggkccattattgcatttttaaaccatatgttcaaaactaagacattttatttgaaagatttttaaacagaatatgcacttctatttccaagctccttaaagggtgaggatatacattttcataacwgacacaattattttttaaaacaaattcataaaacagtggaaatattctaaacatctgtcttcaaagtgtttgctccagagttcaacttccttttwtaaaaaagatatttctatatctggtaaaaatcgcatcgaccttaatgggacaaaataactgtttttgttacttttctaaaatatctgctagattgcatttctaccggcagtcatttgatatcaaagctctacacaagtccaagtagcacttttatgcaaatttttaaaaacttctttcaagacacattgctatctgctggaaaatgttttcagagtaaagatatttgtattaatacattaggaataatataagtggtgacccctaacattgttgaatgcatctcttatacaatcatacatgacgaccttgaaaagtttcactaacttgctgaaaggaaaaatgagtaactctttcacagtactttcaacgtttatactgtgaattaaggagtgaaattctgtggtacaaataggatttatagtccctccctattttattccaactagcagaggaaagcctactgcattgttgaaggtttgtttttatcaaattaactacatcagtaacacttgtagcactttttacttctggctttaatttctttgctcagcatcttttttgtaagtcatacattgagtgaatactcttccagtactacctctgtaaccattcagcttgagtctttttctcaaatcaagatagttactccatcagtgctacagtaatccaacacaaccatcaaataatagtttttaatgcaagaaactatgttgagaccacatctcttacagtacaacttaatgctttatgaaaaataagtttttcaggtacttcattattgggagagaatatataaaataccatcagctgacacgtgtgtcaaacctggaatgtatttgttctaacatttgcttctttgcttcatcagtaataatttctacacatctttcttcagaagtttttgacaagcaaacatatcccaatttattgccacagtattttctttgtatgatttcagtcattttgttgcaatacggagaaaatttccctaaagtatatagcttttcttctttcacgattaagaaactaaataaatgaaacaagaaaawctcaaaagagacttctagaattttattattaaatattcattttattttattttattttattattttatttattttatkttattttatgttattttatgttattttattttatttttgagaacaagtttcgctcttgttgcccaggctagagtgcagtggcgcgatctcggctcaccgcaacctccacctcccgggttcaagtgattctcctgcctcagccttcctgagtagctgggattataggcacgtgccaccatgcctggctaattttgtattgttagtagagacggggtttctctgtgttggtcaggctggtctcaaactcctgacctcagatgatccgcccgcctcggcctcctatagtgctgggattacaggygtgagccactgcacccagcctattaaatattcttgatgattttaaagcaccaaggccaacatcacaaactttggagaagtttgttttcatgttttcaatgcttagattttaattatggtttcaagaaattattaatgaaaaacctcaaagaattctatcagattgagatttatcagtaaatctgtatttcgtcraattcatgcatgttctatttgtgtatcacatcatttatcattttaagttaaaaatttaattcttattttttacataatgtgatatgtgaatagaatatacatgaattagagcatagctgtcttattttcttgctgttcagttgtgcttatattattagtatcattttattttcgcagcttctttgcaggaaatactttaaagcacttgtttggagaagattcatttgttaaacctagagcatttcactcagttttgcaaatgcaaaccattattttatatccccacatttggaraggaaacaggttagcattgatggaggtaccattgccacctccttgtgtgatgaaaactcctttcttccctcctcaaacttgggacatagagtctgaatgatggagccagtgtccacctgcacagtgaatatcagtaattcttaacttcagtttatattttcaaaatttttaaaaattatatgaacagttatcctcattttttcttatgatatcccaatgacttaattcagagaatgttgttctacaggagggckcagacattcyttttttttttttttgagacagagtctcgctctgtcacccaggctggagtgcagtggtgcaatcttggcccactgcaagctccgcctcccgggttcacgccattctcctgcctcagcctcccgagcagctgggactacaggggcccgccaccacgcctggctaatttttttgtatttttagtagagacggggtttcactgtgttagccaggatggtctckatctcctgacctcgtgatctgcccgcctyggcctcccaaagtgctgggattacaggctgagccaccgcacccggcccagacattcttattgttgaatagacagctaaaatgacaaatgaaacctccyttatctgctctgtgaacccagatagaagccagtcactgtggtttaaactagcacttcccatacgctsatgttcactcagatgccctgggcagtgaagaagcagattgaatgccttgggcatcttgaagaagcaggttcagattcagtaggtccggggtgaagcctgagaatatgcatttctttttttttttttttttagtttttcttctttctttcaaatcagctttctcatggttaaatgcatttataataagcttctagttaatgaagatgcagtaggtctagaactacrttcatgaatagcaaaagtttagaccaggggtctataaactacagatagcattttttttttttttgtaaataaagttttattggaacacagtcagcccattcatttatgtgtctagtgctattctttgctgcaatggtagagttgggtggttgtgacagagacctcatgacctgcaaaatttaaatatattcattatttgattctcatataaaatgtttgctgaccctttgtgtagacaataaatgtacatttcatatatagatctacacatggataacccgtctagactcattgactactacagattcagaagaggtacaagaactaatttcattgaatcaaattatgagctaaatcatgagtactctctgctaagtggatttactatttcaacaaaattagaaatgacagaaagcagaatttaaaaataaattacttgataaaagaatcaccattcgtatcgtaatctcacagttaaaatagagccctacatcaaaagttgcatatccatcattttaaggttacataaagtgaggtgaaggcctgaagcacttgagtcgaattatattaaatacataagagttggatttaatatctttctctagctaaatatgtcatagtagaatcttaaaatgaaactaagctgcaaaatgaaattcagctcatagcartggtctgctgtgtattgtcataggccttgaaacttcattttcattctatataaactgatagacctacttaaatggttgaattagttgacacgacacatcttcacaaaaatttactgcattagaaacatgctaatgtacataaaaacatgagctgtttctttcatcagtgtgttttcatgaaactctaaaatacattagtgatatataggggcactgtgtccacgtggtaaataaaccctagaaggctgtacaaccagaaataaccaaccaagtaagttagttagtttcatgttagttgacagttagtttcatgttatgtttaatgttatattttaccgcccaccccacttcattttcaagagtaacaaaaagaaaatcacataaattttcaagagtaacaaaaagaaaatcattttaggctgggcgcagtggctcatgcctgtaatcccagcaccttgggaggccaagatgggcggatcacttgaggtcaggagtttgagaccagcctggccgacatagtgaaaccccgtctctaccaaaaatacaaaaattggctgggcgtggtggcgcgcggctgtaatcccagctacttgggaggctgaggcaggaaaattgcttgaatccaaggggtggaagtttcagcagcgagctgagttctcaccactgcgctctggcctgggcgacagagtgagactctgtcttaataaaaaaaataaaaataaaaataaattaataaaaaatcattttatgatttgctgcatgctgtgtctgtgttttctagttactactcacaggtagatataggtaaccagtctgcagtgttgtgtttcagatgtttctgccctcccctcccctccccaccttcccttcccttcccttccctttgtcagagtcttgctctgtcacccaggctggagtgcagtggcgctatctcagctcactgcaacctcagcctcctgggctcaagcctctgcctcctgagtagctgggattacagacaccaccttgcctggctaatttttgtatttttagtagagatggggtatcaccatgttggccaggctagtctcaaactcctgacctcaagtgatgtgcccaccttggcctcccaaagtgctaggatgacaggcatgagccaccatgcctggcctcagatgtttcctttctaaaacatgattaaaccaaagtttaggaaatttattttattcaattctattctctaacaaaaatgttattatctctcttacctctatttctgcctttctttatctttatctatatgtaaaggtaagttttaaagaaaaaatacctacctggagtttttttggtttttttttgttgttgttgttgttttttgttttctttgagtcagagtctcactttgtcgcccaggctggagtgctgtggcatgatcttggctcactgcaacctccacctcccggattcaagcgattatcatgcctcagcctcctgagtagctaggattacaagcacccgccaccacacccagctaatttttgtattttttagtagagatggggttttaccatgttggccaggctggtctcgaactcctgacctcaagtgatccacccacctcggcctcccaaagtgctgggattacaagcgtgagccaccgcgcccagccgtggagttgtatcttaattcaaccttcttcatccatcttcacatcattttgctttgatatggaaatgagaggaaacagttaaaacatatttgactccagtgactgtactctctcccacagtaagtgaaacttgagaagcctgagtttgatctttatgcagtttaactcccaaactcagagcccccaaaactgggataattgatgagaagctgactagaatggtcagaggatgagctcattgtgggagtgctgctttcctgcaggaaggcccggagrgaagctgccgcctgggctggggaggcggctcactgcctgccgcagcctcccctccctggagggccgcaccacctgcctgattcttgcaccgcacgcccccgccccgcccccatgccgttgctgtgatcaaagtgtttactgctttgacatcagaaacgatgccctttcacctgtgggaaaatgacaacataataaaatagaataaaaagtacaaacaaaaaggaagtcaggaataacaggtgatgctgttatttacataattcaaggtgagctgttgagctgaagttccaaagcacaggaatggacatgttttgtttggattttgtattgtgtttaattttatatttgctgtttctattctagaattgaggtgattaccaaggctctatatagctattctgaataatctgctagctatccgggtggttcatcatttgcccaccaacagttttaaattttaaaactcaggtggggggatgggcagtggtggcagtttcagtttcccactctgccacggtgcctgtcctagctggccactgcattccctatcagcatcagaaaagagaaaggcctagaagatgctccagaacctctggacactagtgggtttgccatcgggagcaaaggagccacgacttctgtgttgtccgttttcagttgccctttctgagtccaatgtttttgtaaagcgggacaatcatgcttagtcctttccacccaccccagtgtcaggaggctctaatgagttgctgtaggtgtatagtctgtgaaatgtaaccttattgttgaattccagttttcttagagacgattaagtatcatttccattgctctgagttgctgaccatcagacccatggggattgtacgtatttgcaacgctcttcccatttgtcctggccccttaccgartgcaggagggaatgcatatttgcagtgggattcatggaatctggtcgtgtgtgaggaggactgtggtggtcgcagccctaaaccactcagccccactcaggaaacacactgcactcaccggacaggtccatattcttgcattagcctctcatttttccgacgcttgtastttacacataattcccactctgtgtaccacctctcccgcaaagaaaaagggtggcagggcggaacttyctactcccctggcaaacccggattggattccaacttccacatctgttttcagcagttccctggctgctgatgcgtctccacacagggggcattaggatgacatgtgtccctccaacatctgttttccagggaaacttgtttcaaggtcttcgaattctgtgggaaccctgagtatggggtagagggctgaagatgtgcagaggcattggtgaggccctcctttctaccctttgtaggttctacaagtgcagtttaaaggtttcatttttacatgaaaatatgtctttaactatgaaagcttagaaactgaaaaaagcaaaccccacataactagttttctggaggtactgtttgagttaactaatcaggtgttggggaaacaatctcccacgtccttataaccctgaacgtgctggcggaatctaaaggggttcttgggtgctttttcagaacaagggccgctgctctttccggctgtcttggaagcacagattaagtttcttgccttttcccgggtcaccaccgactcttcaatggaaatgaaaagcaggggaaggggaggtagtgcccaggaagtgcgttcttctcatgatgcactgggcttgaggaatataagtgggcctccttgtaggaaaagctggcttcccatggccggtggagaccaagccaggagcagccaaacctcccaccccacctcgtgggccggtgctcctccccaggcagggtggctgtgaccgcactgtctttccggggacatgtataaggtaatgccctcatatcccacttgcggagaagaataccctaatactgtgggggaaaaataacgatgcagagatgtagatagctgaggttatataaattacccatatacttacatttcctaaaatgaagataaatatgatcrtatctctcagtgccatagagctttacatttacgctctaaatatgcatgttcaaaatataattatgtgaggatgaccagaaatagaaatttttattatatatcttagcacatgttatcgaacatggaacacatgcaccatacacatatgccatgtggcataaggaatttttgttttgtgaatgatttttgctctgaaaatataaaatattgaaattcattgtctattatcattttaataagatattttagaaatagcagtatctacatataccattgccatgaatgtgtttttctaaaattaaacatgaaaagagcataaatatgatacatctgaatccccaagttactgtttatatttcacatagtatcagactccaagcttctttgctgaggaaccatatattttgacagaatttcctttattctgtgcattttcatctacttctaatgtgcatatgcctaaagtgtagaaaatagaagaaaatggcatgctgttgctaagtggatgtcctacagagctgaaacaaaaaagaaaagctttaaaatacactgtaattatgtaaaatggtgtgattttactttgattatctaaaataaaaattagaaggttgaaaatgaaaaagactctataacgataagtttcagtgtgttttcagagtatcaagtttctaacattaaaaaagtccataatgctcttttataaaccctttgacactactcccttcaatttcatagaaatatcataatgggctgggcatggtggctcacacatgtaatcccagcactttgggagtctgaggtgggcagatcatgaggtcaggagatcgagaccatcctggttaacacggtgaaacctcgtctctactcaaaatacaaaaagttagctggtgtggtggctcacgcctatagtcccagctactcgggagactgaggcaggagaattgcttgaacctggaaggcggaggttgcagtgagccaagattgcaccactgtactccacccagcctgggcaacagagcaagactccatctcaaaaaaaaaaaaaaaaaaaaggcagaaatgtcataatgaccatacagaatgtccctgtcctggccacttcccatacacttggtaatcatttgctgatttacctagagggtaaaagtgtgagctcaatattcttagtccttcaacccatatttgactctggtgcaatgagaacattgcatgtgatgttctcatagcttcctagctcagttaattagcagtgcttcctaacttaacggagaatcgcttggggagctgtgaaaatatagaatctggagagaaatgctaatgatataaggtttggagcagagggtaggaatcggcactttaaattcctgcctaggctgaaaaagataagacatgaaatggtggtaaggatgaggagccactggaactctcaaagactgactgtagaagtgtaaattgatacaacaaatttgtgcttgcatctaccaaagccgaacatctgtctgcctaggacctttcaattccattcacaactatatacctattagaaatgcatccatatcttcaccaaagaggtgcaagaatgtttgtaggagcaccaaagaatggaaatctcacaaatatgttcatcagtagtaagatggacaaatatagtatagtcatgctttgggattctctacaaggctggctttggggtctgccacctttgagttgcagagggccctgcactaaaaggaccctgggcttggtttaatgtgctgctgtcactatcttggaattcttgatttttcaacaatggccttgcattttcatttcgtaatggcccctgcaaattagtagctgatcctactataaagtaaatctcactcagtgttgcatgagaaaattcaaacacaaaataattcgtactgtgcgatttcaaaaggaagaaaaaataaatccttagtgttgaaaatcaggacagtggtcggctctgggatgaaaggggatggtgattgggaggggccactaagaaaggtttctggggcgcttaaagcattttatttcttgattcagttcctggttatatgagtgagtttccattttgaaattttattaacaggaaacatggtttacaaatgtttctgtatatacattatacttcaatagaagattacattttaaaaatttatttctttctacttttgacatcgagccgactggagcaactcatcggttgtaatcagcaaatacgtttcattttgatttggagcatttactctttccccattccgagccactagcttcatagctccctccagccgactgtgtagagaatccatggctctttgacacaagaaactggccagcagagaggaagaggctgacccacccttcaagagaacacctccaagtgtcggccatgggatggcttagctgttatcacatcccttttgcataaaatgagcccacccactccctcattgagcgccatactgcatatatgggagtgtgtcactgtctacacgggggaatttaggggaccttacaaggcctgtccaccccacatgccatcctagcaactgccagggggcttcacattctctcttcggtcactcttaactaaagctctttttaaaatgcaaatatgggccgggcgtggtggctcccgcctgtaatcccagcactttgggaggctgaggcgggcagatcatgaggtcagtagatcaagaccatcctggctaacacggtgtaaccctgtctctactaaaaatacaaaagaaaaaaaaaattagccaggcttggtggcgggcacctgtagtctcagttactcaagaggccgaggcaggagaacagcgtgaacccaggaggctgagcttgcagtgagctgagatcgcgccactgcactccagcctgggtgacacaacgaggctctgtctcaaaaaaaaaaaaaaaaatgcaaatatgtttccatatttgcattatcagcctttagtcttgcttaaaatagtcatgatgtaggccatgaaatggcaaaatttggagaggtgtttccctggaggggccatggagggcagtggtgagagctctgggatggtcrggaacatgagcccttcacaggagcctgaggctgtcctcacctagcagggtccagacaggaggaatggggccgccgtggctggagtgggggacaccagtgggatttgggctgcttcacagtttcctcctctatgactaccactgtgcacacctgcatcagaaatgaaggttcaggcaactacgtggcttgaaaaagagtctctgtgcaagagggaaggtcgggactacatataggattcaggcattgaatcatttgcgtccattgtgatggtcaatatatcctttatcaaaaggacctgatgctcagaataggtctctagattgcaaatgagcagttctagtcaagaagtatgaatacttctgaaaaatggcaaatcaaatatttcaataagaattaaattttaatagacttgacattttgaattgaatatgaaagatttcaatggtttccagtgggtattttttaagaaggagggagggatctttatcagtgtttgaggagatcaattagtctataaaacttaaaatattctacagatactggcttctaaacatccaactgtgataggagaatagaaaaaataatagtagaaaataaaagaatattttcaaaatcacatacatgttgaaaataataggatcttaatgtagggatatattaatcttggatgacactacacactttttcataagaaaagtgaaaataaagccgggcatggtggctcacgcctgtaatcctaacactttgaaatgcgaaggagaaaggatcacttgagctcaggagtttgagaccagcctgggcaacatagtgaggctttgtctctacaaaacatttaaaaaattagctgggtgtgacggcatgcgcctgtagtcacaactacttgggtggctggggtgaagggattgcttaagcccagaaggtcgaggcttcagtgagctgtcattgtgccactgtacttccgtctggacaacatagcaagactctgtgtcaaaaacagaaaagtaacgatgagtaaaaaattattggcatccaraaaacaaaaaatggaaagacaataatctcaaaatcaaggatgatgggagatattcrgtaatatagtttaagtacccagaagaagcagtgtaataatcaatatggcttaaaagaaagcaaaaatgttaaaacatttatatttgtttggtaactaatgagacaggaaaagcaatgacataagatatgtgtctttcagcacaaaaatattaaaccatttatatttggtagctaatgaacaggaaaagcaatggctgaagatatgtaggtttcagcacatcctctgatactcctgccttctgagagtctttcactacctgggaatgtaagtctcaggtcctacagtgttgagtgaaggtcaaagtcatgggttacataacrgcacccatggaacatctggtaacatcctgcatggccccagtacttatgagtgggatgccagtgrggggaggatcataggacatgagttcgaggtcaagatcctgtgtctcactttactaattatgtcaccacgggcacatttcctcagagcagttaggtgaatgctgacagtcatttccatgccattgtggccttggggtcccacgtgaaatactaaaagttcctcctgtgtcaaaacggacagagcctcttctaaatgttagtctctcatcagatccccattcaacaagagggagatttgtgaggactgccatgatacctcttattgccatagccgcagtgttgagcagagctcctagcccattttccatagtttcagcagttgacaggtgctgatgagaatatattcataaacaggccaggcacagtggctcacgcctgtaatcccagcactttgggaggccgaggcaggcagataacgtggggtcaggagttgtgaccagcctgcccaacatgatgaaaccccgtctctacaaaaaatacaaaaattagccaggtgtgatggctcgcacatgtaatcccagctactgggaggctgaggcatgagaataacttgaacccrggaggaggaggttgcagtcagcagagatcaagccactccactctagcctgggaaacagagtgagactctgtctcagaaaaaaatgtatacatatatacacacacacatatattttatattatatatgtattgtatatttttatatatattatatataatatatactttatatataatatatatactttatatataatatatcatatatactttatatataatgtatatactttatatataatatataatttattatattatatactttatatataatatataatatattatatataaagtatataatataataaattatatattatatataaagtacctataatatattatattatattttatattttatattttataatatatattatatattatatattatatattttatattttacattttatatatattttatatattttatatattatacattttatatattatacattttatatatcttatacattttatttattatacattttatatattatatattttatatatattatatattttatatatagtacattttatatattgtacattttatatattatatattttatatatattgtacattttatatattatatattttattatacattttatatgtaatatatatttatatattacacatattatatgtaatatatattttacatacaatatatattttacataatatatattttatatataatatatattttacataatatatattttacatataatatatattttacatataatatattttacatataatatatattttacatataatatattttacatataatatatattttatatataatattttacatataatatatattttatatataatattttacatataatatatattttatatataatattttacatataatatatattttatatataatattttacatgtaatatatattttatatataatattttacatgtaatatataatatataatatatattatatattttacatataatatatattatatattatatattatatataatatatattatattttacatataatatatattatatattatatataatatatattatatattatatataatatatattatattttacatataatatatattatatattatattttacatataatatatattatatattatattttacatataatatatattatatattatattttacatataatatatattttatatatattttacatataatatatattttatatattatattttacatatatattttatatattatattttacatataatatatatttcttttatatatattatatattttatatatttatatattttatatatagtatataatttttatttatatataaacaaaaaacaggtcttttaaaagtcttaaatatattgtttagatatataaaataatcgcaagcctctaggaaattttgaaagcttagaggaaagtgactatggccaagttaatagtaggggaaatagggcaaagatttcaagggaaacaggaattttttttgacgagagtcaaatgcttatcacagtggcctgccttctacaatcaaacgcctcaactggcagacttgttttgttgttgttgttgttttaattttgtagtttgggatataaaatagttcttttctttctaggaaggggatttccatttttttctggctgtcagtgtgactcgtgtctgatgcgcggtggatgctaccggcgattttcctttccattcctcggaatttctcgagtccgatacgcattgtatttagttcccgtcaggaaaagctgggtgtcggggtggtttttcgtgcctcctcttctgtctcgtgactgtgtatatttcatgcttgcatagtttccaaacacgccacagtataacttatgccccaggatatctaacttcagagtaagcatgttccaaacatggagcgagaaggagtgtctggggtaggagagaccgtttctacagggaaggaccgggagaggcaggccygggaaaggctccagagatggagtccctgagactgacgcgtgcttcgaaggaagagacacacactgactgcaactggggtgtgagtggaggtttgggggactcagcacagattcattgagaacgtgcctttatttcattctgcattttcagccgatttatttcatcgatcccctgttccaagctcccagctccctcccttattatcagccagttttctgcttgacaaccagccacacactagctcgcatctaggttttttggaaaaaaaaaaaaaaaaagtcattactgtatgtcttacagccatcagttcacaattggacccaaaattggaataacttctggttaaccctcaggagaataactctatttgtgacactgggagagatgaaaaatgaagacaggtctccttctcctctgggattttgaaatataatataagagcctgggctctccaggaagcagagcctgaggcagagggctcaggtgctcttactccgttacagtcctagtcccaggacagaggcgggagggccggggagtgaagcagggaaactaggacactttatggagctggctgctgctaagcccagcagatggctttaatatgagggaccatggattaagcattgtgggtatcagtaaatgccctctgtgtgaccaggaaagcccagaacaggaggcaaagcgccagggttgatcagggcccacatggagttgaggacaggagcgcctgatgctggctatgaggtatgtctgatatgagggcattaattaagacaaatttatgaacagattggatacttgatgcaatggagaagatttgagaaagataaagcaatacaagtgtcctacataatccctagaggtattaaatgctgccctgtttaaatatataaatgcattctcagggtgattttagtcaagttattcaatggcttatggctcatcttctcaccttttcgaatctgtgcaggagacatctcctgaccttattctgaaaaataggacccccactcagctgctgcgtcctcccactgacgttctctgtccccaatcctgctgtgtagttcctcatgcacttacccttccatagcatcttatcgcacttgtttgtctatttattctctctcccactagaatgtaagctaaatagggctgaaatgcgtctgctgtgagccctgcaagaacacctggcaaaagtcgctgctcagtgaagagtcactgaaatatttgaatatgtaatgattcagatacctattttataggtttctgtgaaaattaaatgagaggattattaaagtgccccactgaggtttggcacacagmagacggtcagtgaatgctrgagccgttcacgtcctcgtgcctgtggtgtgtcccatatgcaaatatacacgggagttttatagcacagatatgttaagtattctgaacacagactacaccagctgagaaatacatgcttaaaacccatgtttgatttcctatccatatccatggaagggaaaaatagccacacatcttaaacttcatatgatagccaccaaataccttcacatgtacaacttatgttttaaaaagtgtgtacagggagctttgtgctgtccaactgcaaggaagagggctctggctggtccagttccctctgctgcaaagcgatccctgagaatatcctatcattctttgtagagtctaggattgtaaaatataacactttttattatactttttaaagtagagtgcaacatcctcatttggaataatgtctaaaaactgcaccctgagttctaagtgtgtgcatggctttagggtggctgaggcaatagtaacacaagtttctctctgaagggcctttccaggtagaccccaaattaatacaaagtagggctctttcttcatgttccttaaatgactgcaccaaaagtaccatatggtttttctctatcacagacttttgggggccatgtctctggaagagataccatcatacgtctaatgatgtaaaataagaaacattctgtgatggtgtattttccaaaaaagaaatgattaaaacagctcccaggaaaactcatagcttactgaaaactctagaaataatctctatacgtttaaattgctacaaagtatctatcttattttccctcttattcttattttctctctcttattttctctctctctctcctcatcctcctcctcytctctcctctccccttctctgtcttctgcatctatcttctgactctgaagagtagatgattaccctatctctaatttcatcccccaagaaaatctctcttcagtatttttccccatgtctcatttaggcaaaagaactattccatgattcccagcctaactccccagagttctctagttacctctaaaaacattcttcataacaaggagacctacctatcaccaatgtccattgcaagaattaaagaagaggaggtccatgaaaacagttggcactgtcgctggcacataatatatggtcagtaattaatccttatcagttaataattaatcatttctctcgtattgcctttccttcacaggccagcaggatttttaaatagctctactgatatatttactcagtgattaatataaaatattgatagccttctgatcatgaaacattaaaaattttttttagtagagaagtaaataagtcgtgttaaatgtactctgactcatgccaacaaaaggaaacagtggcatacataattctaaaaagaagaacatgagataattatgtaaggtgtgtttgatttgagaatgtgggagacagcaagattcagctagctttgttctgtgtggcctgaattagaccaagtctgagtgcatgaaaagttaaaggacattgaaacacagccatccccttttcttcatgacccacagcacttgacatccgtatcactaatttggtaatagagtatgtgctgagctgtgggggggcttctgattttgtcattttctttgtaccacttttcttcccaattgtaggcactctgagaacagcccaatatcttaatattaggaaacgtacttctctgtctatgaccataccaccctgaacgtgcctgatctcctctgatcttggaagctaagcaaggtcggccctggttagtacttgaatgggagaaaatgtacttttctatcctctaccctcaatacatagatgattggtattttattttgttttgttggtacataataaatgctcaatatatgtttgttttttaagtaaaaaaggaagaaacaaaataataaaatgggctgaaatcttctgaaatcaacccatcagctgaattaaacctgtgtagattatcttcccacatgtagctagtttgtcctggtacataaactatctgaggactaccttcacttctccctttcatagacaattttgggtctcctgtatgtgscagaactgtggtctgccctgggaagaagacaatgaataagttggcaggaaaacaaaagggagaagacagctgaagagctctttcaaaggagggatccacaaggcttggtgattaagacgacgcagagggtgggtcaaggacagcatgtwtgtgttgtgagtggaagaaatgtgattctcttgacagaaacagcagagtctgagttgaagcggggtgatgtggcttctaggtgatgcattcgttttaagtatgctcaagttaaatagaaaccattatactaaaaaatataatcattgtgaggttaatttcttcttggcctcgtatttatcagctcaaaacatagcacagggctcttaaaagcatgtgtatgggttgaccatcgcctttcttttattttattttattttatttttattttttatttgagatggagtcttgctctgtcgctcaggctggagtgcagtggtgtgatcttggctcactgcagccactgcctcctgagttccagcaattctcctgcctcagcctcatgagtagctgggattacaggtgcamgccaccacgctcaactgatttttgtacttttagcagacatggggtttcgtcatgttggccaggctggtctttaactcctgacctcaggtgatccacccgcctcggcytcccaaagtgctgggataacaggcataagccatcgcgcccagctatcccctttaatttttaataacttctatttcttagcatgttctgctttagaaaaatgggaaaatgtggtttagttccagtgaggttcacattattatttatagactatttattatgccatttatagggcctgtgctggaccataacaatttttaaagtaattgtaattattttacactataaaatacaacacaccagccattgaagtctaaatcagtagaactctagtacctgctgcaagggcctcatcctgacaagtgcttttgatgacagcaagaggtaggccatgtgcatccaaatatttttttccctcctcataatgggacttatctgatgtataatttatattctactttgatttcatctttcttagccttttcaaaatgtctgcttagtgatgatatgctacaaatcattaagaggcctaaagattgtgcttctccacaaacagcctgtgctttaaggacaaattaagagcaaagtattaatttccttttgtttgttttgttttgttttagagacagagtctcactctctcacctaggttggagtgcagtggtgtgatctcagctcactgcaacctctgcctcctgggtttaagtgattctcctgcctcagcctcctgggtaactgggattacaagcatgcaccaccatgcccagctaatttttttgtatttttagtagagacggggttttgccacgttagccaggctggtcttgaactcctagcttcgagtgatccaccagcctcggcctcccaaagtgctgggattacaggtgtgagccactgcgccgggcccaaagtattcattttcaattgtaacaatcacctcttattttaggatcttgcgtcttataattgtgtatactatacgtaaaacaatagtaaattggtagctagttatacacgggagaagatagcagttgtaaacaaggatggaataatctcaatagtgaaaatgatcttagaaacattataatccatttccattatcttagaagtaaaagattgggattaaagaaattaaaagatttggccaggcgcaatggctcacccctgtaatcccagcactttgggaggccgagggtggtggatcacctgaggtcaggagttcaagaccagaatggccaacatggagaaacctcgtctctactaaaaatacaaaaattagccaggcatggtggtgcatgcctgtaatcccagctactcgggaggctgaggcaggagaatcgcttgaacctgggaggtggaggtttcactgagccaagattgtgccgctgcactccagcctgggtgacagagtgagactctgtctcaaaaataaataaataaataaataaataaataaataaataaataaataaataaatgaaagatttttcccatgattgctaatagttgacagataaagttagaataaaaccyagttctcttgcttttgtgtcactcattatgatgccaaatagctctttactatggcaagtatttatctgcttatgtaattaatctaaacagacatcatcattaccaccttttttctattttcatcatcatcttttcatgtttttatatatctgcttttccataatttagaataaaacaagrtgagaggtcagcacactgaggccctctgactaaatgtggccagcagtctgctgttgtacagggcatgagctaagaatgtattttacatttttacaaggttgcaattctttgtttaaagaataatattttgtgatacatgaaaattatatgaaattcaatttccagtgcctataaataaaatgttgtcacaacagcatgaagttgagtagttgcagaagggaatatatggacctcacatgctaaattatttactatctggccctttctacatgttttacagaaaaaatgataataccacattaaggtaaaaaacagttaattctaagggtttccaatctcagttggaaagacaaaatcaactcgcaatatagaacagatccaaataaaataaagactgatgaaaaaaacatgtattccttgtccagatactaaaataatgcatggttcagacctggatcaaaatcgaggctcatcatgtgggcccctcactaattatgcttgagtcaccagctaatagagaactcaggccagcagtgatcccagtccaggtgggactctatttaaattaagctttcctcatcaccccatccatcctcttcagccagagccaactctagagagaaaacaaactgaggcctttcccagagcctgagctactttaaaaggtttgtttccaccagctcctccctgtccttaccccacatcctcccacacctactcacagcaatcactataaaaattgtccaggcacacctggttttattgccgtctatcgtatcgcacttggcagatattgtgatttttacagattgaaggtttgtggcaaccctgccctgagccactccatcagtgccatttctccagcagcctgtgctcatttgtgtgtctctgttacattttggtaattttcttttcttttcttttctttttttaaacagagtattactctgtcgcccaggctagagtgcagtggtgcgatctcagctcactgcaagctccgcctcccgggttcatgtcattctcctgcctcagcctcccaagtagctgggactacaggcatgcgccaccacgcccggctaattttttgtatttttagtagagacagggtttcactgtgttggccaggatggtctcaatctcctgacctcgtgatccacccgccttggcctcccaaagtgctgggattacaggtgtgagtcactgcgcctggccaacattttggtaattttcacaatatttaactttttcattattattatatctgttatggtgacctgtgatcagtgatctttgaggttactgttgcaattgtttgcagtaccaaaaaccatgcccaaataagattgtgaacgtacttgataaatgtgtgtgttccaactgctccagtgaccgcccatcaccacatctctctccccacccttgggcctccctaatcccagagatacaacaatattgaaataagaccaattattaataataaccttacaatgggctcaaagtgtttaagtgaaaggaaaattgcatcttacttcaaatcagaagttagagatgattaagcttagtgaggaagacgttgaaagctgagataggccaaaaactaggcctcttgctccaataagttatccaagttgtgaatgcaaagtgaaagctcttgaaggaaattaaaagtgctactccagtgaacacgtgaatgttaagaaagtgaaacagccttatcrctgatatggaaaaactctggtctggatagatcaaaccagccacaacactcccttaagccaaaacctaatccagagcaaggccctaactctcttcaattctgtgaaggcygagagaggtgagaaagttgcatgagaaaagtttgaagttagcagaggttggttcatgagatttaaggaaagaagccgtctacatcgtatgaaagttcaaggtgaagcagcaagttatccagaagatctagcttaaatgtttgatgtatctggctacattaaacaatagattgtcagtgcagatgaaacagccttctgttgtaaaaagatgccatctaggactttcatagttggataaaaaaaaatcgattcctggcttcaaagcttccaaggataggctgactcccttgttaggggctaatgcagctggtgactttaagtgggagcaaatgctcatttaccattaaaatcctaagacccttaagaattaggccacgttgactctgcctgtgctctataaagggaacaacaaagtcgggattacagtacatctgtttacaccatggtttactcaatgttttaagcccattgttgaaaactactgctcagaaagaagggttcctttcaaaatataactactcactgagaatgtacctggtcacccaagcgctctgatggagatgtacaaggacatgaatgttgttttcatccctgctgacacaacacccattctgcagcccatggatcaagaagtttttttgacttctaagaattgcaatttaaaaacacattttcaaagtgattcctctgacggatctgggcaaaatacattgaaaaccttttggaggccgggcacgatggttcacgcctgtaatcccagcactttgtgaggccarggcaggcggatcacaaggtcaggagtttgagaccactctggccaacatagtgaaaccccgtctctactaaaaatacgaaaaaattagccaggtgtggtggtgggcgactgtaatcccagctactcwggaggctagggcaggagaatcacttgaacttgggacgtggaggttgcagtgagytgagatcatgccactgcactccagcccaggcaacagtgcgagattctgtctcaaaaaaacaaaacaaactaaaacaaaaacaaacaaacaaacaaaaacaccttttggaaagaattcaccattctagatgtcattaaaacgattcatgattcatgggtgaaagacaaaatatcaacattaacaggagctttgaaaaagttggtttcaaccctcatggatgactttcagagcttcaagacttcagtggaggaagtgactgcagatatggtggaaatagcaagagaaatagcatgagaagtggagcctgaagatgtgactgaattgctgtaatctcataatcaaacttgaacaggtgaggaatcgcatcttatgggtgaacaaagaaagtggcttcttgagatggaatctactcctggtgaagatggtgtgaacattgttgagatgacaacaaaggatttagaatattacatacacttagttgatgaggcagcagcagggtttgagaggattgactccaattttgaaaaaattctaccgtgagtaaaatataatcaaatagcaccatatgctacagagaaatctttcatgaaaggaggagtcaaatgatggggccaactttgtcttcgttttattgtatggaaccactatagtcaccccaatcttcagcaaccactgccctggtcagtcagcagccatcagcgttgaggcaagaccctctaccagcaaaaaattaaaagctgctgaatgctcagatgatcattagcatttttagcaataaaatagttttaaattaaggtatgtacttttttgagacataatgctcttgtacacttaatatgactatggcatagtataaacatggcttttatatgcactgggaaaccaaaacattcatgggactcactttattgcagtattccctttattatggtggtctggaaccaagcccatgacagctatgagctatgcctatataccttaaagtgttaaaagtcttctcttggatctcaagcctgccctcccaccctgtgactttccacctggagtagaggcgggaagtgtagagattttcattcttgagccccttgcccaggtgtatggtgctgatgactgggttaattgtcatacagagattaccttcaccatcacttccaggaaatgtcatactcaattttgaaaaaccacatgagcaaatatctttctaaactcacttttcttaagagtaggacactgttgtacagtacacacacaggaataagggggcatacttgttaaacataaattatttctcagattttttggcattaaattaattcttttcatgtttgtcagtcctgagcagattgataatttaaaaacgtatacacaacaacacagaatgttttttccctttttttttttaataaatccaaggaacatggttttccttttttacaaagtcaagggaatgacaaacagaaaaggagaggtctgtgtcaaagtggcattttctttatcttgtggaataatcttttatgttattcttctgtctcaaaaattgaatgttctttagwgataaatgcattatagagaagaatatcccaaaacagaataatggcaagaaacagttttcacsttgtaatctcaagcctctctttcaattgaggttttgcttattttgagacattttgttgttcatatgaacacaaaagcagcttgattcttcttgatctttatgtttaggtgaaaatcagttcatcctggataataattttaagaatttgagaagatctgattgtctgacatgtgtcaccatcttaggactgttgcmatatgatcrtggtgtcttgtacctctgacatcatagtctttctcttaaaaaaacaaaccaaacaggaaatagcttttacttctgaccacttcagagatagacgggtcttcgttgcttctgtgtgrcttggactccttcttacctctgaatggcttggactccttctygcctctgaatggaagggaagctgccaccagcctttgattctaagggacaaacctcccatttgtagctggacctcacagccatggtggttcattcctctctcttccacaggctcagtagaccaaaaggaatcttttttttttaccccgttactccaggctggggtcacagtaggggagctcatgggaatttatactcttgagatccctttggtctttagtccattcattaattactccttcattcctgtgcctattcacttattcattcatttatttctgtatttaaccttccattatgttaagctcagccaatgcagaggtgaataaagttgcagtaggaaggaaaactgcyttcaccaccagccttactctctctgctcccacttagagttgccaaggctagaacaatttagggaatttcctattcgagtaatccccgacaagcctgactcaaaaaaggctaggagacttgtgcattcatttcagggaaagggaggaactaattcactgtagtgggttgaatagtggcttccaaaatcatgtgtctgcatccttggaacctgtgaatatgaccatatgtggaaaaggcgtctttgcagataaattaaggctcttgatttgagtcagtcatcctggattatctgggtgggccgtaaatccaataacaaatgtccttagaagagaagatatgaagacagaggcaaagattgcagtgatgtggcccaaatccaggaatgccagggcagccaccagaaactgaaagaggcaaagaatatattctcccatagactcttcagagcaagcacagtcgtgttagacttctggcctccccttgataggagataaatttctgttatrttaaggcagcaagtttgtgatcattagttgaggaagtgacaggaaacaaatctagtcacccagcttcaatatcagctcaagtggaagttcttagaatatttttcaattactatcaggtttttgaaagatacctcacatttatatyttagttgaatggaaaaaacagattgtgagacatttcaagggacagttggtaggatttggggattatctgcatatgagggagaagaaaaaggggtgcaactgacgactctaaggttttttttttttttttgaatgtttatactttttwaaaaaattttacttttaagttctgggatacatgtgcagaacgtgcaggtttgttacataggtatacatttgccatggtggtttgctgcacccmtcaacccatcatctaggttataagccccacatgcattacgtatttgttctaatgctctccctgcctttaccccccattgcccaacaggccctggtgtgtgaagttcccctccctgtgtccatgtgttctcattgttcaactcccatttatgagtgagaacatgcattgtttggttttctgttcctgtgttagtttgctgagaatgatggctttccagtttcatccatgtccctgcaaaggacacaaactcatccttttttatggctgcatagtattccatggtgtatatgtgccacattttctttaaccagtctatcattgatgggcatttgggatggttctttgctattgtaaatactgctgcaataaacrtacgtgtgcatgtgtctttatagtagaatgatttataatcctttgggcatatacccagtaatgggattaccaggtcaaatggtatttctggttctagatgattgaggaatcgccacactgtcttccacaatggctgaactaatttacactcccaccaacagtgtaagagcattcctttttctccacagctttgccagcatctgttgttycctgactttttaataatcgccattctgactggtgtaagatggtatctcattgtggttttgatttgcatttctctaatgaccagtgatgatgagcttttgtttatacgtttgttggtcacataaatgtcttcttttgagaagtgtctcttcatatcctttgtcctcttttgatggggttgaactaaagagcttctgcacagcacaagaaactataatcagagtgaacaggcaacctacagaatgggagataatttttgcaatctacccacctgacaaaagtctaatatccagaatctacaaggaacttcaacaaatttacaagaaaaaaaacagactccaaggttttaaaactaggaagatgatggtgttactgaccgaaagagggagttctgytttagggctgtgatgaggcaacggtgtccawtgagttgttttagaaaaagtgagtgcgagatsgcaaatatkgtaaaatctgatgttgaaaaagaagatttaagtgggatattaatttccttttcaagtcctttatcaccaagtgtcctagactctacaattgcatgcatacatggatttcccttgttgaaccttatacacacttacccaaagaaagggtctgtcgaatggaggtgcttcacagaaggaccataacaaaggagacactcaacaagtatcagttaaatgaatgaatcaatacactcaaaaaggcagggaaagaaggtctttcttttcatcacaatatctgtcttttcgcttacttccacttagtactttttttaaatttgcagttagtattttcttaatgataaaatattttaaaactgtaaacttactattatacactaatagatgagactttgatttgtgaccttgaagacaacatgataattttgaagtgtcaaaaaaaccctccacaaaactagcttcgactgttatcacgagactagtagcaggcaattatactaagtcctgagctctactgtagaatattttaagattaaccattgttccgttcagtttttctcaggggaattacaccatagaattattattgccattattgttgctttatatataaatcttagtatttttcttgatatgaatttatttttctctctgggataaaaccatagttttaggcatagtttcaggccttctaacaccattagacatgcaagaagacggaatcccactgaataagcataaccatgggacctttacaaatgtcaccaacagttaagaagcaggactgtttttgttaactcttgtcacaagacatacaagaaatgctctttctctttttttttttttttttttgagagagagtctcactctgtcacccaggctggagtacactggcatgatctcaactcactgaaacctccaactccctgattcaagcaattcttctgccacatcctcccgagtagctgagattacaggyatacaggcatgcgccaccatgcccagcttatttttgtatttttagtagagatggagtttcagcatgttggccaggatggtctcgatctcctgaccttgtgatccacccgccttggcctcccaaagtgctgggattacaggcgtcagtcaccgcgtctggcctgcgttctcatttctagaaaaccgaaatgtgagaagagagaggtacgcaattagcacacgtggcctatttatttttgtctcatataatccaggatttggggcatgtgtgtgaaaactcttacggaagccttacttagtcaaaaagtatcgctgtggccttgtgtggtggcttatgcctgtaatcccagcactttggaaggccgaggtggtggatcacttgaggtcaggagttcgagaccagcctggccaacatggtgaaaccccatctctaataaaaatacaaaaattagctgggtatgttggtgggcacctgtaatcccagctactcgggaggccgaggcaggagaataggagaatcgcttgaacccaggagacggaggttgcagtgagccaagatcacgccactgtgctccagcctaggcaacaagagcgagcctctgtctcaaaaaaaaaaaaaaaaaaaagtacagctgtgctagttaattgaaaggcggcaccctgagcatactaagcattaaaaggccatgcagagctgcctccatgcctccaaccctctgccatggtccctaagagaagctcagggttcctcctcctctgtggggagcatgggttagaataaggaggaaggattctcaccgccaacgggaagagcatttcacccaagagaatgctgttgcaggctcactctggaacagaaagttcccgggctctgttagcatttataaagggaataggtgaaggtgggggtgggtattcagagagcagaagtctctgggtcacactagcctttaccatcttgatggttagggctgtttatagcacatcagagcttctccaagcctagtggcaggtccagttttcgtgcaatgtgatgacatgttaccgaaatctaagtttttagagtttttaacagtgactttgaaatcagtactatctggttgtccggctacaaatggagaaccaatgttaaatatgcagaggaatcctatttctattctgtaacctaacagccagtgtacatgcaagcagaaattcccgtaacagtttttgcttcacatatcatgtctcatgtgataatagtatctgaataggttrtccttatggattcttagcaaatcattgaagcaaaagaaagctgtaactaaaatctcttactygtgatcagttttcaaaaggaatcaactaccctggcaagcactttattatttttgttccattattagtacctgctttatgcattccttttgggaaacttaggtgtgagaaggaattatggcaaatatattttttaaacagccaattcataagtttcagctccttggccattagatacttgttgtctactgagtgtctttgcaccaacgtgataattggatgctacaacaaaccttgcctacctgttaccttgcagccatttaatacttatttggctgttaaggtcatgagtgatttgatctccatgaagttgtgtcttcctctttccaacctcacaccttagcagtaaactcgagctcactggaagtgatcattacttgaagtcacacttggatgactgttattaaaccagagaggagaaatcatgctacgtatagaaatggtagtattagtaacacaccaatgttgttattttttaaactgagttggccagaactgctttgaactgatattctgcttatgtgagctgtgtctmaacattttaaaagcaaactgatacatttaacagatacagacatatgggcacacccatacacataccccaaygtagatttgctagattgaaaatgtgggccatttaaaaaatatagtattgatttgaaataagtagtcagactagctcatgctgctttcagagtaggacacacctgttcctcagtgggtgcactgcatctaagccaggtgtcagcaaactaggatccatgcaccaaatgcagcccaccacctgttttgtaagtaaagttgtattgaaatgcaaccctactcatatgcattgtctgtggctgctttcacaccgcagtggtagagttgagccgttctgatagaggatgtatggtttacaaagccaaaacacttactctctgattcttcttattttttgaggcggagtctcactctgtcgcccaggctggagttccgtggttcgatcttggctcactgcaacttctgcctcccgggctcaagcgattcacctgcctcagcctcccgagtagctgggattacaggcacccaccatcatgcccagctaatttttgtatttttgtagagatggggttttaccacgttggccgggctggtcttgaactcctgacctcaggtgatccacctgcctcggcctcccaaagtactgggacaggcatgagccactgtgccaggactactctctgattctttacagaaaaaaatgtcaactttttatctaagcaaatgcttatgttagccatgaccctgaagacagtctgacctctaggaagaaatatttttcaatatttatataaactctagtttatataaagcccagtattttagtacttgagagcttttattttatgttcttgagtagcgggaagcaagaataaagaaacagatgagtgattttggtgttccaatgcacctaaaagaaacaaaatacttaagagcttcagaacagggatgatttttaaatcatagaatcagaagaaaactggagatcaccttatactatgatgttctctggggagaagggaatacacatttgtagaaatatattgaatactctgttttatcgattacagtcaccatttatggtaaaaatgtgctactaaaaaaacagtatatgtaccttctaataaatgaaatatgatgttataaatttatatgaaggattcaaaaacccattgagtcaaattacagaaagcatatatcagcgcctttttttcatcctacagaagctctgtagaagaagcagttcattttcaatcttatttatttatttatttatttattttgagatggcatttcactctcattgaccaggctggagtgcagtggcgcaatctcggctcgctgcaacctccgcctcccgggttcaaatgattctcctgcctcagcttcccgagcagctgggattacaggtgcccgccctcatgcctggctaatttttgtatttttagtagagactgggtttcrccgtgttgaccaggctggtcttgaactcctgacctcaggtgatctgcccrcctcggcctcccaaagtgctgggtttacaggcgtgagccaccgcacctagcagatctttgatcgtaatctggagaattattgaggcagagagacagagaccctgtgcttggactcatgctttcctagcatctaagtagcatgaaaagtttctcctctagtctgttaacytgatgaactacatacatagattttctgatgttaaactattcttaaatccttgggatgaaccctgcttgattctgcttttttaactgtacactttcttatgttagataatatttacraaggatttttatatctatagccttatgtaaaattggcctgtaattttcttttcttacattgttcttatccagttgggtaacaagatattagtctcataaaataagttaggttatttttattatttgaagcaacaggtataaggattatctgtcaaatattattttaatggaaaaaatacaataaagaacagcgtaaagaaagaaaattaaatttgagctkaccctatagcataacattgttgtcagtatgaaagtgaacaatagtaatgttttaaagacccaatcaacagatgaggatttagcagcctgtgtttggagtactcttctaaatgctgtgatctcatcagatgaatggtggattatgtatgtgtgcaataagtaaatgaatcaatgatttttagatatattcagtcaattttaatagttacggtttatatccaaattctaaatgaagaagaaagctgagatggagatttgagaataaaagaaataagggtaggttagatgtctgatatatgaggtttcatatgtgtctccttgttaaccagtgtttcttaactgrcagcatgttagaatcacttgatgcagatcttacaaatatcagtgcccaaaaccccaccctgatcatcgcagaaagaggttctgggggtggtgagcaagcagctgcatttttacaaagttctccaggtggttctggtgcaaggtgtgcattgtgagaaccacttttctttttctttttttttttcttttttttttttttttgagatgaagtctcactctgttgcccaagctggagtgcagtggcatgatctcggctcactgcaacctccacctcctgggttcaaggaattctcctgcctcagcctcctcagtagctgggactacaggcacacaccaccctgcccagcgaatttttatatttttggtagagacagtgtttsactgtgttggccaggcttgtcttgaactcctaacctcatgatccacccgcctcggcctcccagactgctgggattacaggcatgagccaycgcgcccggccgagaaccacttttctagatctagcagtaagacatgcgagtttttcactggtttcaagagaatcaagtatgtgaggaccaagagaacaccaggaataaattaatcatgctatggtgactgccttttagaagactgtcagtaatggtagtcttccattttattctttactctcttaaaaaaccataactacattagatgtaggtatatgtataactgtatgtaagtgcagttatatgtaggtaagtacaccttacctacttttcaaatataacctacaaacagctatatgtaggtaagtacacctacctacttttcaaatatagcctgtgatgattgtgggttgaatagacagaaaaaattactttttgcagctttcatttttggcggttgtccctcctgctgattcttcctgcctaacatttcatcacatatgcattttgaattttcagttaatttttttctgttattttttatttttaatattttttaatcttaattttcatttaatttttagtggtttgttttttgtttgtttgtatgtttgtttttgatatggaatcttgctctgtcacccaggctagaatgcaacagcgtgatctcggctcactgcaacttccacctctcaggttcaagcgattctcctgccttggcttcctgggtagctgggattacaggtgcctgccactatgcctggctaatttttttttttttttttttttttatgtagaarcagggtttcaccatgatggccaggctggtttcgaactcctgacctcaagtgatccacctgccttggtctcccgaagtgttgggattacaggcatgagccaccataccgggccaatttttagtgttttaaaatgtctgttcttttgtgttcgttgtcatagtagtctctcactgcagcgccacttgaaaccttgtcactctgtgtgcactgaatgggcatgatgggttagtaatgtctgtgggaaattcttagagctggggataaaagcctgtcttttgtgggttgaccacagccccatgccttctctccttgtcgtgtttctgacattgtgtgatatgaatgtttgtgagtaaagatctcctgcataatgaaatgatgtttgtaaagcaacgaggactttaatttccaaaggaattcatttcagttttccagagaaaaagtcgaagtaattttacctttgcaaactgacagtattcctagctctgttaagtagagtcatgttgcataccacaatttcagtttagtgcttggtgtaagtctctcatatactttagataaaagcaaaaacatattatcttaaacagtttaaaattgaatattgacttcaaaagcaattatatccaaatatgtaattgtctaaacttattctttggcttcttacagtctttcaaaacttatcttccaatgttattggactgtttattgaaactgtagccgcactagtccrtagctatctatccgtaagcagtcatttgaataaaataaattgtattcagaaaactacatcccctaaaacaatattcacataaaaccagggtcaaatcactgagatacatataagaaagtaaaaacagtyttcagtaaaagatcacattctatcagagcccataaatctcactccatattgccatattaatatcaaatttataacctccacctgctgtcttccaactttcagttctcaagttttcccagcaatataataaagtgattttgctactgaaatggacagcacttttccatcaaatatatattgttttaggaaaatcccagtgtctcttaaaaytgacataaaacataaaaacaggccatggtgtgtgtgtcatctggtcccagctgtctctttcctgaggcactttgtagctcatctcatttctctggcctccctctggtttctgacctcagaggcccacgcggtgctcactctgaatcctgttaactgcacttgactcccaaccaaaactgttctttctcaagttttccaagtagatgttccaatttggtgggccttcttttttcatgatttttcctttttattccataccactttagagccattcgtcatctgctgacatacattcaggggttttatgtgtgcatttaatgtttcttcaaaaaagctcagttgctttacagccagaaccccatattgcttttctattcattataatacctagcagatcattggtcttgttgcaaattcttatcaagtttaccttgaattgagtgttgagcttctaccttgaaatcctaacattctgtgttctgctcttgctggccttcctgactgatgctttgtgattgtgtgtgtgtgatggcatatgtgtctgagtgtgtggtttagagacagagccttgctttgtcacccgcgctggagtgcagtgatgtgatcatagctcattgcagcctcaaactcttgggttcaagtgatcctcccgcctccaactcccgagtagctaagactataggcttgcaccaccacctggctcattttgtttctttgtttgttttttgtagagatggagtctcactatgttgtccaggctggtctcaaactcctggcctcaagggatcctcccatctcagcctcccatgtgattgtgttttatatttcttctctgtcttcctgttgaaaggttgtttatttaaaaaattccctctgtggctatcatcttcctcacagtaacaattaatttttttttttttttttgagacggagtcctgctctgtcacccaggctggagtgcagtggcacaatctcagctcactgcaacctctgtctcccaggttcaagagattctcctgcctcagcctcttgagcagctgggaccacaggtgtgtgctaccacgcccggctaatttttgtatttttggtagagatatgttttcgccatgttggccaggctggtctcaaactcctgacctcaggtgatccgcccgcctcggcctccaaaagtgctgggattacaggcgtgagccactgcacctggcccacagtaactattaaaaacacgttatttgggccaggtgcggtgactcacacctgtaatcccaggacttcagcgggtggatcacctgaggtcaggagttcgagaccagactggccaacagggtgaaaccctgtctctaccaaaaatacaaaaattagccaggcatggtggtgggagcctgtggtcccagctgctcaggaggctgaggcacgtacgagaatcacttgagcccatcaggccgagattgcagygagctgagatcacgccactgcattccagcctggacaacagagtgagactctgtctcaaaaaaaaaacaaacaaaacacattatttgtgcataatataagagtgattcttgaaaagcttctgaaacataatatagtaatcggcttattctcttttgtgctgctataatagaataccacagactaggcaatttataattaacagaaacttatttggctcatagttctggagtctggaagtccaagatcatggggcctgcatctggtgagggtcttcctactgattcataacatggtgaagacatcacatgggcaagagactgagagagagagagaaagagaaagagaaatgggccaaatgcatcctttgataaggaactcactcccatgagaacgacattaatccattcatgagagcagagccctcataacctaatcacctcttaaaggtcccatctctcaacattgttgcatcagggattaagtgtccaacttaggaactttggaggacacgttaaatccatggcaataawgtatcgttatttgtaagtactggggcattggaagatcacatgtattttcctacgatttcacagacaatccaaggcataaactcagttacctttaamatccccagtatttaaaggmgattggaaactgggataggcaagtggttatagcattggaagcactgagagtttctcattccaccccacattagtatgactgttactgatggggagcattggtggtaacaggaggctgaatgcaaatggagtagaatgccagcaactcacaatgaaggaattagactaaattcctcatgagctttcaacacattcctgagtcccttattgtctcaagttttgctccattgcaagggaaattattactgaacgggaagaagcccttcataaagacaaacaagaaaaaaacttttagatatttctcctattttgtagagttttttttttttttttttttgagacgtagtctcgctctgtcaccaggctggagtgcagtggtgcaatctcagctcactkcaacctctgcctcccgggttcaagcgattctcctgcctcagcctcccaagtagccgggactacagccgcgccaccacacccagctaatttttgtatttttagtagagatgaggtttcaccatgttggccaggatggtctctatctcttgacctcgtgatccacgcacctcagccttccaaagtgctgggattataggcgtcagctgccgcgcctggcttcatagaattgtttaacctttcccttatgtttccctggttcattaaatatggaggactcattccacaagtgctatctcaaaattgttatttttcttagcagatattattaaaatatggataatagccatctactcatggctgtcttccaggagtcatataaatatgtgactagccagtgtccagtacctgtgacgccatagctttgtagtagcgtcagcttccctggctcccaccatgagggaaggagggtgaccgctggcatctttttattcctaactcagtaaatgtatattggctgcttactctatccttgggactgtgctgggctgggctttacggtagcgaaaatagctgacgcacatatgattcttcatctagaccaggatcttctgagtgtaaaagggggtgctggtaataattttgctgggacaattgacagaggtctggactgttccaagcacatcaggacttagaatctctcacccgcctcagatttgtctttttcaaatcaagttgctctccgttttttcctattctttcttaaattataagactaaatgtgaacccaaaattcgaattgaattctgktcactgttaaagacaaaatacagcagacgactgaagagtttttatttgggttgtgatcatggcgaggacattcattacaaagaaaaatctcaaaaggaaggagtttgggggctcctaaaggcaggtaaatcagtgcatggtctgtgaccctatgggagtgtgaggaaggtgggggcagggcttaacttgaacatgtgaggccagggtgggtttcrgcaaacacaaaagactgaagttgaagaaattattattttttctattaaatgagtacaaaaaatggaataaataacaaagtagatgcaattagtttaaattacagagatcagaaaattgcaagtagaaataagcaggaaacattttaaaacctgtcaacacccattaagacaaaaaagaattctaaaacagttgaaatgttggcaggtacaacaaaaccatggcacctgtggactggaccaggcgtgggggtccgtcacgcagactaggaggtgcccttgggtttggcaatgtagagacccagaggaacaaactgaaaaacaagtttaagaaaaagaaggaagaggaggtagagagtctgacaaaccaagtgcaaacgagcagtatgccaagtaaagtcttcatttctgtagactggcaacctgaattaagtctagcacctcatctggaactgcctcgagggctaacagtcactgaggagtcattttcctttgggaactgggacacactttcctcagaaaccagtccctgyctgttaaaaatatccgtagtcaccaaggaccaccagaaaagcaggctcctgggtcttgtccatgcccaaaccagctccagaaagtgtaccaaatgcaaaaatgcaatgctttaaaattccaattagttttcaattcccatttccctctgtaacatcttcagcttagcgtgcatgtatcgtttcacatatcctctatggtctggaaaattcggaaacaccaaaaccatcaagagagagacctatttatgaataatttattatagttcttttgctttgaaaacctcttggcttctattagcataaccagggcctagttcagattccccagggaggtgctactggaattttttctcacgcattagatgtaagacatacccatttgggaaaaactgagacgtatttctaaaagacatacatatagatggagttgattttatcaaacgaaatcagatgaggtaagaagaaaatgtttgactgtgatttatatatcacgcatgttaaactcataaaatttaaaaaaccaaaaggaattagagagacacattttgatttccctatgataagaaaatgcattatatgataatacatgaaggtagagaaagcctttttttgatgctatatcaaattatccagatatttgtgacatcaaatcatataaattattgaaaatgtggaattaatatttcaatgagaactaatcctacataaatggtgaaaaattgtctatgaacattaatgcaaaacaatgacccaaaaagaaaaatacaacataaagaggaaaagaaagaaataaggcgaaatatgctgttatatcttgactttcacaaatgctaatgaatagtcctgaagaggcggtacctgacatccagtgggacagcctgggtgacctcagacaataattccagtctcttttggtatcagtttcctcacttgtaagataaggcggtgacctaaatcttccctacagctctaacagcgaggtcactgagagctccactacctcatattcctctcttaggcccctgtgtgcagagcaccagccttcttctaaccaaatgcacaggttttgtgctcagggcagagtttccattctgtatttcttcctctttcccaacccttgtgaaatagaatgtgaattccaagaagagaggacctggttcccagtcctatgcctagggtttatgacattacctggcacataacaggtattcagcaaatatttgctgagtcttgtcaacaattaattttgaaaatcttctttaacttttctaagtgatgcaccccggattcaatttttttactatgctaattttgcattaaaaaggcaaattctaaggtactaagtgggaaacaaataggaaaaaaaaaaaggcaaagactaaaatctaaaaaagtacaggtaaaatgcttagaaatcaagtgtttgctgcacaataatcctcttattcatgccacaaaatacccacccctcaaccacttgatgtagacagctgaggaggggagaggatgtctgcaaccttctctgcccttgggcaaggcaggacaaagttgcatttcttctgatagtctccttagagaaaatcggtagttttttgcatttctgtgccagctttttaacccattcaaacccacattcagtaacaaatttttttttttttagacagagtcttgctctgtcaccaggctggactacagtggcgccatctccgctcactgcaacctccaactccctggttcaagcaattctcctgcctcagcctcccaagtagctgggactacaggcacccgccaccacacccggctaatttttgtatttttagtagagacggggtttcaccatgttggccaggatgatctcgatctcttgacctcttgatctgcccaccccggcctcccacagtgctgggattgcaggtgtgagccaccgtgcctggcccagtaaccaaatcttaaatgacttttgggcctctctctgatgagattaataatggaatcaaacaaagctcttgtttaaaagtcttacagaccctggcacagcatccatagtctcatctcctcatggtacagtgatagagccatcattcctgcttattctaagtatgtggtgctgagaaggtgaacaatgcaaaatagattaaaaactaggttttcctcctctggaaggatatcaattatatcaacacaggagcaattacattgaggaattttctttttctacatgatggaatttggtaaggtgggacccaaatctggagacacaagacccgagtctcccacccacccaccctgaattgtttttcactcacgcagataccattttgtaaagaagcagtattgtcatgtgagcatatggtaacagaataattttatgtaagaactatgatgtaatcctttggatatacctgtattttcctcactggggacagggagcctgcttgggccctgtgctcccaacagcaacgggtaagaaatgcccactgctgttgggcaggtgctcaataaatatgcgttgaatgaatgagtgaacaaatctgttgcataaagagcataataattatctttcaagggctttagggaaattctaagataatctatgtaaaatagcctattacctggtatgtggtaaatacattatagttgttattggtattctgagtattaatagtaacccttgagaaaagttctaataaaattatatgtgagcaggacttggtcgctcgaatgaaagggagtgtgagacattggaagaaatatgtttctatattagaacccgcattagatatcatttcacagttacaaaacttctcttcacatggratagatatcaagaaaatgagggataagtcctccctcatgttaactctcagcataacagccttggagcctatttttatcttttgttagatgagggaagttgggaccaaattcagcaagatgcaacaaaagacttttaaaatccactattgagcaatctctccccgttttcctcttttccctccaattgatattaataacctaaaatggagttggcasacggtgtccattaaactcatggaacacctcttcgtgtcggattgacaggtgctgcccaagccttcaccaggttgatgtggcgacagactcagtgaataccagcagcctccctgtcatggatcagatcaaagcttgggtctcttttacaaatgtcccattgtcctgaagaaactttgctctaagaagccatgtggaaacacctgatttgaccattgtctgagaatgacagtgttaggaagcttctttactgagatgtatatatctttaatgtctttacggaaactaagctaccactttaatcctagggtcttcattttctcatcattattcatgaatttaaccgaccctggctatgcaaaaattggggtgatttctgactttgtcctatttataattccttctactgcaaattagaatttaaaatcttgtggcacgtgaggacattttcctgcctccaatactgttcttggagtcagtcaaatggtgtgctagcatccttggggtcttgttcatgaccagctctttgggaatgacccacatggttttccttagaatgtcgttcagtgcttcctagacattttttcctygttccacgtgaagacagtgatgatatttgtagggcacactgtggtggagagatactgctgcttctggacagacgccaccagcctagaggctactggccaggggctcttgctgtcctgggcatctactggtggcccagggtctcagagaattagttgtttggtccactggttgagcagctgagccacaatcccactttaaatgtttactgtttaagagttgattgattttcagtcagagagaagtaggttcaagttctgactctaccacttattaatcttatggtcttggccaagctgtttgaattttctaggcctctgtcccgctcatttacataaagctacccaactggtttgtacctgtgtaaaggactttctattagtaaacgctctatcaaggttagttcttgttatcatgattattatttagattcccagtactaattatagactccttaacttatgagatattccacagaacacatacgccaactccacggctgacatcagcattgcacaccaggaggcaggcaggcctgaagcgaagcgtgtgattctgcttccggggtrggggtggagggtctgtcctgctgccttatacccccttctgttttgcattgacatttcctcaacctctgaccttgtgaacaagaatcggggaaaggtggagcagcatgaatgccttattctgtgctgtccaatgtggtagcttctagcagcatgtagctctttaaattagccttaaaaattaattaaaattcaataaaacaaaaactcagttcctcagttgtggttcaacagccacatgcagccagtagccaggatatggacagagtagatacagaacattgccacsacagcagaaagtccaaccgtccagctccgtagagagaccctgaccatggcctttcaggcttagagtcttcacccaaaacccgaccacagggttcaatgttagctgtttaacaaaccggataatcaactttcaatcactttccttggaggcaaactattctactcccattctgcaatgttcatttctgcttttgatgcgactttgtaattttttttcagctaggtaacaaagggaaagggtcattgccaccattataagcgaggaatatattttgaaagatcktttagtctttaaaagtttaatattctttttgttcattttgcttcatgcttattaaaggtgatggggcaaaaattgcagactgagcactccacttttatgttgcccagaagttactgaaaattcttattcattatctcggctgctaactattctaaattttcttgttgccttaagcctcgggtccttcatctgcatcttcacgtaggcagaaaggctttcaagtggaattcacagagagggtgaggaccagagcctggagccttccacgcaggttaccatctccagagatcccaacagggatcctagggaggggagggagattcaccctcgatgcaaactgagtttgaatggggcaccaacatgatcgtagctgtactatggaatgaatgaatgcatgaatgaatgaatgaatttatttagagatggaggcttgctctgttgcccaggctgcagtgcagtgacacaatttcagctcactctaacctccgcctcccaggttcaagcaatttttctacctcagcctcctaagtagctgggattacaggtgcccgccaccatgcctatctaattcctttttgtatttttagtagagatggggtttyaccatgttggccagattggtctcaaactcctgaccttaagtaatctcccctccttggcctctcaaagtgctgggattataggcgtgagccactgcgcccagccaggaataattcttaaaatccacggattcaaacaaaataagcagaagaattttattcttaagtatccaagtgagaataaaaataagaacaaatgtggaaggtactagagaataactataactgctaatgactaataatcagataagaataatttgacctgattaaccagctgtctctcagagaagatggagaaggagacagaaggtggcttcagtggctctgtggttttgaggtcaggtatctgggagactcatgaggggctgttattcagaaggagagtcacggartagacccggcttcaggataataatatagagtttggtttggggccttcacgggaggcttaaattatgcaatcctcttaaacttttctgactataaattattaacccttattaaccttatctttgtatttatctgtctgggtgaagccaatttaaatacagtagcaggctgtccctcagacttctctcctccaaggatcgcctgtcatacatagcactcctgagtagattaaagatgaaagttcgtttcagcagaggaaatagctgacaagatactgaacccattttggcagaaaacttaacattcagcctcaatccgctgaaactgtcaaaagagaacgtgcatcctcaggcagaataaagagaaggaagaggcggggtgcagtggctcacgcctgtaatcccagcactttgggaggccgaggagggcagatcacgaggtcaggagtttgagaccagtctggccaacatagtgaaaacccatctcaattagccaggcatggtggcaggcacctgtaatcccacctacttgtgaggctgaggcaggagaatcgtgtgaaccctggaagtggtggttgcagtgagctgagatcgtgccattgcactccagcctgggtgacagagcgagactctgtctcaaaaaaagaaaaagaaaaaaaagagaaggaagaggtgtcctcagtgggccagattcaaggggagaaatcagcaaggacatgtctctcttgcccatggctatttttttttttttttttagagtctcattctgttgcccaggctggagtgcagtggtgccatctccactcactgcaacctttgcctcccagattcaagtgatcctcctgcctcagcctcccaagtagctgggattacaggtgcctagctaaattttgtatttttagtaaagacgaggtttcactatggtcttgaactcctgaacttaagtgtgcctgccttggcctcccaaagtgctgggattacaggagtgagccaccacacctggcccatggctcttatttttaatttggatcacccaggaaacacttctctcttatatgctttatgttctcatatttgaaagggggattttagcttttgtttaataaatgcaacctgaggacaagccgagtgtgctccttacatcttgttgtaaggagtacaggaaagaaatttgggttagtgcttaaaaattattcctggcacttgttaaagaacagtaaggcaggctttatttggaggggattactgcaatggggttttgcagcaggggaaggagattggactcaactccaaatacaataaggaaaaattggggatttgtagtccaagagcaggatgagacagagtggttgggggttgttggatagaaaattactcagaaggcaaagtaattatttgccaataggattcttgctgtaggcaggccgaggtgatcagatgtcacctggaagatggcagggaatgaagaaaccaatcttatatcaagggtgatcagatattgaaggtaaaccaacttagccagatcttgctaaaattgagggatgcaaagatggataagaaagtctaaaagtgggccaggcgtggtggctcacatctgtaatcccagcactttgggaggccgaggtgggcagatcacctgaggtcaggagttcgagaccagcctggccaacatggtgaaaccccatctctaataaaaatacaaaaattagctgggcgtggtggcacacgcctgtaatcccagctactcaggaggctgaggcacaagaatagcttgaacctgggtagtggagtttactgtgagcagagattacgccagtgcactccagcctgggcaacagagtgagaccctgtctcaaaaaaaaaaaaaaggaaaaagaaagcctaaaagtcatggcagataggaagaggattcagaagagcctgactaacgttgggtcaaggagagactctgtcattaggagatatgctcattccctcttaacctcctcaccctcttgctgtgcacctaatgggtttcatggagccttctcttttgttcctggattcatttattaagaaaaattgattccatggctttgctttgtgaatactgttgcaacaaacatatgcatgtgtctttgtcatagaaagatttatattccttttggtatacacacagtaatgggattgctgggtcaaatggtatttctgcctttaggtctttgaggaatcatcacactgtcttccacagtggctgaactttttttacaatcccatcagcagtgtataagcattcctttttctccatagtctcaccagcatctgtttttttttgactttttaataatagccattctgaccagtgtgagatggtatctcattgtggttttgatttgcatttctaaaatgtggtacgtatataccatgtggaataccatgtagccaaaaaaaagaatgagaccatttcccttgcagggacatgggtggagctggaggccattatccttagcaaactaaaacagggacagaaaaccaaataccacattttctcacttataagtgagggctaaatggtgagaacacatggacacatacactggaggggaaaaacaggcactggggcctggcagaaggtggagggtgggaggagggagaggctcagaaatcataactgacacgtactaggcttaatgcctggtgatgaaatcatctgtacaacaaacccccatgaccacatttacctatgtaacaaacctgcacatcctgcacatgtacccctgaacttgttaaaaagaaagagcggaatggatggggcttttctcctgtgatgtggcaatcttcgagatggctttcccagctctcagctgtccagggcaggctgccccctaaccaggtagatgcactttagctgctgattcccggtctttgcaataatgcacaaacacgcagggccccacaacagcctgcctgtcacctgtgatgccccagatgccatctgcagagctcaccagtcctctgtaatgacactatctgcacttgccatttggtcccctgcccacgagcctacgggtttctttagacatgagcttgctataaaatgaaagggcaagcagtgctggtggtctttgtgtgttgagggttgaacccttgtttgttcctcagcagaagaagagagatgctgtccatgctggctccgccaactgtaggcaagtgttgcccagcagaggaggggcgagcctgagatgggcgagtgcctcttttgcagaaatgtcatcagataacctgataaaagcaaaattgaatatgtcagattttgatgccagagcttgaaatattgctaaagctcccttaaaactgtcactgctaataaaattttataataggatacattttgtgtatttgcacacgggtatgtgccttctgatttgctcagtggacttttttccgtgtgttcctgaggagtgaagatcagtggctgattggctgcgcccctcctgtagctccacgtagcatccaagctgcctcctctgaatcccagaaggctttaaattgttcaaattaatttctgaaattagaggacattcctgattcaagaaaaatcaagggacagggatatctagagctttgcagacgagggatctgactctcctggggttccaaggactaaaatagagccccaagcattccagagtcagtgggacccccggctacctcctcgaatgggccagaactttcctgggctgcgaggatgcagtgctgtgctccctgtcaggagcagagagctccagccctcaccctgaacgtcagggtggtttgagaggcctcacttgtgcctacccagagagtaattcccagtgatttgcttattattactagccgtgacccccgacttagtgcagccttatccccacgtgcacattgtatacctggagtgagcccatcccagctccaggcgctccctcagccttcctggtttcttgtctcagtgtccggcttaccttcttccctcaggggcacctttctctccatctcttcccagtacaatctttctcactgtgggaggcatatctccaatgccacctcagttcccctacatcacttcagtagacaagagagctctgtttgtggctctgtcacttaacagcgcttcttctcccctctctgtttctttctgggcctcttttttccccctattttgcttctgaaccaaaggctgctcctccccccacctcgcccagtccctcctcctctagagcaagcactgcggagacacattggctcctgggtggggcttgtgcttgtcaggccccttgcagggtcgaatgggactccctgagctctagttacagatcaaagtgagttgcttctgccacttaccttgacctataactcggtccttgctcttgtcaagatgactggctgccctggcgcagggcgagctcagggtgaaagctgcaagagccgtgtttgtgcagagaccagcgctccccagggccgcatgcttgtgtctcctccctgcagtatgtggcactgggccagccagtgcagtgggacggggacagttcctgcaatggcgctgctagtgtgggaggtgagagagaatattaggaagcattaaggatgaggaagaggaaggtggctggtcttgtatttgcgagacctgggctaacatccaggctgaggcctgaacacttttaatgtgttatctcatttaagccccatgacaatcctgccagatgggaatgatgctaacccattttacagacttggaasctgaggctcggaaggctgaagtgacctgcccaaaggcatgcagcctgcagtgatggaggggggacttgcagctaagtctggcttgacttcaaagctgattttaaggcacactgcctcctgataaggagagtgccccgctgttttatttatgggtaacactgagttttcacaattgccctggtcttagaagaatctaaaataaggtttaaaaatttgggtcatgagtttctacaagttatttaattttctagtaaatattgtaataatacttaaaccatagcatggttttaaggagcagatgagtcaatgtatgtaaaatggtgcccagtacacaatacagacacgtcagctcttttagcagtcatgtaacaaaagcagcaccattgctgaagggaatgattaagaaacacttgaggcagagccctccttcagccgctttctgtcctaggcaagggggttaaggctaaggagacacatgcagaccttttcttctcatgacttgaggtagagtttcctgtccttcctatgattcagcagctcagaaatgacagaaagacctattatgcttgcttcttaaataagattatctgtactcctacctctggaaacattaaaaaagctctcaaaactattattttytagtgctttcatacaatgcaaattacagatgttaattggaatgcagttctccttcttcagacttatttcccaagtggacagattgaagctcacctgggcttttccaagcattttgttaagtctaccctcaccctcagtcccttattattcattatctattaccctggaacatataaacattcgctgctggctactatttccttgtagtttattcaacagtttggatttgatgtatgggttgttttttttttttttaaagraaaaaaaacccagacacccaggaaattaagaagtttatcaattggagtcctagagcagcccaatgctaaggctgtgaatgaggttcacaggactaaagacttaattaaatgagtcaaagtttgatttaaattgtaaattctctgttgatacctaatctcagtctcactgtaagtgaactgaattttaaaaaacaaacacactctgcttgcggacagtagccccatctaggggtagagcgtttctcttctctctttcatttttctaaattttcctcttcaatgtttattcaacccaggccattagcaggaggaagggaaaaattcccagattttcagacaacaccattttccaccagtttctcgggaaagctgaaggatgcttaaagagaggtgtgactgagcattgatgaggsgggaggaggctacaggacattttcttccatctggtgtcacaggcagagcgtcccctatgctgaaaaattaacagcaccatgctgcctcttttatttagtgcccattccttaagacagagcgcaggggatgctctttatagtgtgagctgctgggtgacaggagtgtgggagcggagcgaaaacgagaggcataaaaccccctcttgcaaggtgagccaaatgcaaactgatgttttatcagcttcacaggtgctgctgcccgcattcatttgagaccttggcacctcacacagctcccgtcattttacggcttgtgctcgggagcagtgaaggcccaagaactgggaagtggagtccctctccccggttcaggggatgctttagtagaggaagggagggagctcatggccagggtggacgaggggcttctagtttgcacctggatatgacattttagcttcttcctgttttctaccttccattttgatgaacttactcttaggtttttctccgtggagaaatcctggagaggcatatgataattatgatcgtctctggtttacacgtagaaaatcacagtgtagaataatgagcaggtttaacaagcatctgtgtattaaagaggaccctgctttatctctatccaagttccctgaactctcattcacgctttgcttcgtatgaggtgataaaattgaaaattgattgcatgtaggaggctggatttaatcgaggccactcaggctggaattttaactgaatcatgtacggcaatttccccctcatccagagccagggatcttggatggaaggatgaccagatgaggggactccctgtgaccactggcatcgcagaacctctgcatgctgctgggatgagtagcccacatatggcagggctctcaggaccctgtgtggaaattttaaaagagaaaagaaagcaagcgaatactactgcattgagaccagaactactgaggcttgaaaaatgcacagatttagcacccccaaagctggctgtaaaaaggccgcactccgagttagctgctacaaaccagagggccaccaagagctcttcagaaaggaagctatttaggggccaccccctttttaaagaaaaaagcctgtcatctttctggcaaaaagccattgaatatactgagagtcatttgctggcaagcaaccaaatatgtaccaaaaaataaattgggtatttaatttaagacaactgaaaatgcgtctgtgtgggcagcttcaaatcgatatgtgctggagccacacaccctttatgtgaactgcaatgaacacttccaccaccagttagcgtgtttgcaaaccctccaggcttagagagacaggggtcacccatgcccgggaaaataaaattaaaaaggcttttaaaagtccaccttaagagcacgtgctgccggctgatagaagaaacaggataactcagttgcctacaagcaaagtttgcacttgtgcctgagcccctccccaaccctccccatgcgtggataagccggtgccgcctatccccggcgtggaaacgcatggggcccagctgcagcatgcggtgtgggaaaagcattttgccgctgccagtgtctcgggccttacatcactgtcgtattagtctaagcagaatagagcagattgtttattttggtttagctccgctgcaggctgtaacatcagatgtaactcccagagtgacaaatttcaatcacaatgtcacagattaaacaagggtacggaagagtggggtaagcacgtttcccagggggtgtggagtgggggttctgcgtgaatctgttttccaattttccctgccccaggaagccccccttccttctcaccatacgctcaagtcagttcccttttgccccatggattggtgayagtcacagcatcccatcctgtgggttaaataagccaggtctttaatttatttgaaaatactaaataaaaatgattcccccttttccttagagcatatttaactcctgtcgtatttcagattttaaagaatttgctgagtagttttcagtatcctgaaactccagaggggagaaagaattagtgaaatcagtaagagacggacttaccctggagagcgacttggccacagcgggcagaaatgatgcctagtgagtataggccaagctctgcctgctgacgggggtgctccggggtggggtgggttggaggtgctcacaggcttatttgctacatgttcagtcatcacgtagctaggtggggtggctcatcccacagaccttctttaaatcccaggcaggcaatggtacaacaaggcaaacttgctgtctcccagaatggttgccctggcctgggagggacccctcccatcgcagccaccctgagagccagggcgtgtgtagcatcagcttttcttgcattctctgaaaccctcaaactgttctgcctgtggatatcatcatcctcatttttcacacatgaacctccctctacccagtgcttccagcaatttgcagaatgcagtgtctacaatgtaacaatctgaagcttccagccggcttgttcctaatgagcgtgttccccaggtagaagaataattataaagtatcttacctcattgatggtgttattcaaacggagcatcagtttattacmatttcccaaacaagttatggataagaactggtaaataataacaatgcctagttaccgcaggctattttgaaactgtggagaccagggctgtgtactctagtctttttcctgtaaattagatatggtccatgggaagccttagaagcctgacccgtttaagagtgagaatgtgtgaggccttctacctgcaaaggaagaaggagcttttccccactgcctttctggagggggattatttggctgtgtagaccgactaagggagaagtgtttggattactactttgcatttatacagcaaacctctcggctcctagatcagtgcataaaactggtcagttttatgatctgactgagtggatggagaagctgagacatggcctctcctcactgtgtgctggagaccctgaatcccagcggctgctcttacacgatgtctgtgccgctgtcttaggttgggacttttgctcactgtcttttagtgtttgatcaattaaaaagtccagagttccatgttttctaagtaattggtttcccatagattctgagacatagcttccaaaataaaaaacgaatcatgagttcctttaagttgctaggtttactgcaaaactacatgtataatctaaatagttctaggtaagatctagtaggaaaccgaaaggctccttcaggacccatgggataggaacagagctggagtgctgcttcccayataccctttctccacctctgtgtccactgtcgtgggtgctagcctcggacacaacaacttacttatccatacagtgaggcagaagctgcagactcatctcacttctcaatggttgcataaccaaactccaaccccgatctgctcactccatccccacctgcccacccggacatccgaggggagtctgtgggagacggctgctgtgagggagagctcaggtattgttcgmaccaatgaagagagataaggaagtgtcaagactgaggcagcccagggaaaaaaaaatgctaatggtcctagaacagcatcaggttatagctagagacatttagtcaaaaccttttcttttgcgtttttctaggctagggattagcacttcatattataagctacctaacttatcttaaaacagcttcattcccttattaaaatgagcctttcagaagacattaagcaagaggattaggaaatcgctcaggcctccgggcaagcacttcagtgacgagaagtcatttggccacccrgagactgtatctggcggtgccccattccagggatcacggcttcttaggctgccctggctttataagacattttctgtgctaccagctcaatcagaaaagggggctcttagagtgggcaccatctcttagagcgggctccgtctccttcctccyggttgttccatagcacacagtagacgttgcattgtctacagtgaactaattgtatgtgaccttgggcaagtatgtgtgtctcatgaggcttcctattgactgcagcctggggatcatagtaatacctctaggactgctcctcaatcggccggggatggggggacactcactatcacctcccaccctcagccagacattcggcaatggttggagtcatagttggtcgtcccaagtaggagaaggctgctggcatctagtgggcaggagcggggatgctgctggagaccctgcagggcacaggcgccgccacaaagctttctccagacagaccgtagagaatggggagggtgagatgccctgctccaggatggcgcatgtcaytgtgtcacactgtgtggctgtaagrcaccatggaggccttagggatcggcctgtattacagttccgygggtatacactgatattgatctttttttttttttttttttttgagatggaatctcactctgttgcccaggctggagtgcagcggcatgatctcacctcactgcaaccaccgcctcctgggttcaagcgattctcctgcctcagcctcccgagtagctgagactataggcacatgccaccacacccagctattttttgtatttttactagagacgaggtttcaccatgttggccaggatggtctcgatctcctgacctcagaatctgcccacctcggactcccaaagtgctgagattacaggcgtgagagccaccccacccggccgatattgatgtttrccatctgaaaaacaacgctattattctcatgaccatacttctattcaagaaagtactaagatattttcaaaatacgtggttctatgggtccccataaagctatgcttattttgagttttaaaacatcaggcatccctaatatacatttgcatttctcttgaagttgctcttttgcagaaatggttgctaattgaaaagtgtcaagagtaaataatggggcactaatgacttgaaaaggaagaacatgtgaatctagtaatgtgtccagttggtaaatgtatccaatcctacatgggagaaacttccacatggggacagaaacaagacagccagacagttgctggatcctggagcgtgggggccttcctgagggagtcccaagaggcccttgtggctccccagtcatttggcatggcccaaagtggctgctgctattggaagccttctctgcagggacttggaccaggaacagacttgtgttgtagtaggaaagggctgtggcagaccctcttccttctgcctcctctccctgtttccctccctgaacctcttattttttctggattctgaatagggtaccaagccagctgacatttacctgcacaatatgattaaaggaatccacccagattacatttcattcccacttaaattcccactcatgagactggacagtaagagtccacaaaatgttaagagaggcaaagaacatttctgctgcttctgcacagaaccagtgctccctcgccaagttcactgttgatcatcttgaaatgcatttccttgaaatgcatggctaatgttatgaaaatcgggaacctccacggagcctgggatttttctgctgtcagttgacttgtcaaggtggttttggaagcagaacacaagacaatgctgtttcttccctctgtcacttcgtgttgattttgtgctggatatgtgaggaggaagccgatgatctgtaagcagctgacatgtcacatgtacttagaaatacatctggacaaattacagcttcacatccaatcaacatcattcttgggatagaggtcagttcttaatacagggcttttatttttatttcattgtgttttgttttgctaatgctgtaagtggaaactgcagaccacctgtatgtttctccagttgtttgcatctcttggttagaaagtagttcctaatgaggctgagtatgtgagttcaatcccctttatgggccagttagctgctctttcttggttcttacaggaccatataaccgttactgcagagctgatgtttcctgttgataaaaagggatctggataacagtgagatgaaccagaatgtggagcttggccagcctgtgtttttgatgacctggtcccttgctgtggttggggagcagggtcataggaaagggagacttttggccatcttcctctccaggctgcacctctttcttctccttggtatgctggatgccattagaaggaggttgcggacaaagcaaacagaatcccatgctaaggagtttgtatttattcttcagttaaaaaatcatacaaaatcataagtaaaaaatcataagtatgtgaggtaatgcatttgttagctaaattagcttgatgtagccgtttcacaatgggtatatatatcaaagcaccatgttgtataccatgaatatatacaatttttatgtttcaatttaaaaaggaaaatctaataaatgtaaaaaatgccttgcrccaagtagcagtgacccagtgacaccttgttattagtaaaacaaaggcgggccgggtgcgggggctcacgcctgttatcccagcactttgggaggccgaggcgggcagatcacgaggtcaggagatcgagaccatcctggctaacacggtgaaacactgtctctactaaaaacagaaaaaaattagctcggcatggtggcgggcacctgtagtcccagctcctcrggaggctgaggcaggagaatggcgtgaacccaggaggcggagcttgcagtgagccaagatcgcgccaccgcactccagcctgggcaacagagcgagactccatctcaaaaaaaaaaaacaaaaaacaaaaaaaacaaaggtaaccccgacacactaggagacaggaacacgcagcagagactctggttccagggccagaggggcaaccccagtccttaactgtggggcatggttttgggcaaattgatttttaccttgctgagccttactgacctcgccctacaagtgggacagtaaggtgtaacctgtacaaattgctgtgggaggtgaataagagagatggtagtagggacaaaggggccagtgtagccgaagcagggcaccaacatgaatatgacccagctcccggccaagctacggacwtggcgagaggcagatccctagctctgcaaacttgttcacttgctacatatgttatattcccatccttggttcttgtattgrcattttttttttttttttttttggcatttagtgctaagtggcatgaaggttaaagacttggggtcctcatacacaggttcccgaagctctggtgccttcagagcacatgttcaccaggctctgggagtggaggagctgggctgcagcttccctttgctttctttgctctccggggcawcctgcaggggcgtctgtccacaaagctttctgcggaggcctttgcggggcctacccagaggctgcatcctgagagtggcttcctgagcgttagtatccacctggcagggggcaagaccaccagcagggctctctaggccaaagagacctcaggaaacctgtttcaattcatgtcagtctgacataacccgcttgtctgatcctcagaccgcagggagcacagagagcctaaagatcagtgaaaaccgccaaaagcctagattcatcaaaatgtctccaagggaaaaaacaaaacaaaactgtcacgaaacacaatgccaccagtgcagtctacttggaagaaagccctgcagaccagactgtggttggcaaaggagctcatgggtgcaaaagcacttgcactttccagggcttcttactatgctgctgttattgttttttttgtttttgttttcgtttttgtttttgttgttttgagtctggctctgtcacccagactggagtgcaatcgtgtgatcttggctgactgcaacctccgcctctcaggttcaagtgattttcctgcctcagcctcccaagtagctgggattacaggcacatgccactatgcctggctaatttttgtatttttactagagacaggtttcaccatgttggccaggctggtcttgaactcctgacctcaagggatccacccaccttggcctcccaaagtgctgggattacaggtgtgagccgtcgcaaccggctcttttttttttttttgagatggagtctcactttgttttccagactagagtgcaatggcgtgatctcagctcactgcaacctccatctcccaggtttaagcaattctcccgcctcagcgtcccaagtagctgggactacaggcagctgccaccagacccaactaatgtttttgttattgttgtatttttagtagagatggggttttgtcattttggacaggctggattcgaactcctgacctcaggtgatccgcccacctcagcctcccagagtgctgrgagacagagtgcctggcctgttctgcatattctttagtgccctctctcaacacagcacagtgagaggcagccagtgagaaacagaggggcgggaagcagagctgacgcctgtgggaggggcaggaaaagcaaaccagcagcccctttgggcagaagcacagtggcgtgaggtcggggggcccacaggaagcagccagcactagattgctcccaagggtctgccgtgctgttgtgcatcactgtttgccgtgaagaccctgaaccacagagtcgtatttgtaatactcttgggaacaggatgtcacatcaaagattcactcaaataagattaaaaatattttggtgctttatgtagggttcattttctgaaagtgccagaaaaacaagaaattattaagctaaatagttactggtaaggctttatttggcttaattgactaaattttgaattctttgaggaaaggagcagggtctgttacttctgttattgcctacagtattttgcaggttactcacaagttgtgtggtaaataagatttgattgaaagggaatctttctatttattcagattcttattttcaaaacacagaggtcttttattcctttattcctaaggtcttgagctgttcatcacacagaataattatgtatgtaataagtgcatgaaaaccagtataatttcaaattcatgagcagaacggtggcactctagaaaaggcaaagtcagttagtaaacttggttgtgatcagtaaagctggtaactaaatagtcaataaaacttggtagaaatagaattctgttgtcttttagtttccaaatttgagcaagtggactacaatttaaaaagtaaaatcaagggccgggtgtgctggctcacgcttgtaatcccagaactttgggaggccaaggtgggtggatcacctaaggtcaggagttcaagascagactggccaacatagtgaaacctcatctctattaaaaatacaaaaattagccmggtgtggtggcacacacctgtagtcccagctactcaggaggctgaggcacaagaattgcttgaaccagaggcagaggtttcagggagccgagatcacgccactgcactccagcctggrtgacagaktgagactctgtctcaaaaaaaaaaaaaaaaaagtaaaatcaattgaggtgaatacaaggtagagccctaatttctagtctaaaatgattatattttttaaaaattcaatgccacagttatatagatacatgtatcctctgaatacctacctgcagtgataatttgctcagattctaaaaacccatctttcaatagccttctggtaattgcagtaaaactcaaacccattgggaaatctcagttccctagactacctctgatctgagaggaaaacaacatgtgaaaaagacagcatcttcagggtcttcagatgaacagagccccttccatagctcgtgctcactgtgattaagtgtgagtgggaagaaatgtggtgttgtaaggacccccttatctgagatgtgraaagatgtgttaattaaaggagaacagtttggccatgaatccatgtaagttaggcagacagaattttcctggctcattttatatatgtcatagtcctccaagctcattccctacctacaattaagcctccccattgtgaagagcaggtatgaggtgtacacttggacgtggtgctgtgtcatcttattgagctatattcttgtcctgccaatgcaaatcaaaattacacactatgggatttagatttccagaagagagaagaacataagtcttcctgtttgggaggctatttcgatcatgcatatttgcctgactttctcctctaaaactcgctcagcgtgtccgttcctacatgcctctctgttgaattggtgctgtcagaaaggataccaagcaaatgtatttaatgtctttgggaaaagaagttatgggttaaagcctctgccagattcaatctttgttttggcatgattcaaaaatgtgtattgtggccatctgtctagaactgactgggtggaacarggaagcttgtcctgcgtctgagatgggttggtcacctccttccataggagaaaaatggcaatggataaaacacgggtgcagacgtccacaaatagaacttttagaaaccttcacttttgcatttgtacattaatgggttttctgcaaggatgagcagaaatatactatttttgctatagtcatcatatgcctatgtgtgtataaatagatgcatgtattgtattttgtatttatcaagcttaacccaaaatggagcttatcaaaataaagctcatttttatgctatcattttccaagctaataatttatttttaattttcttttgttttaaaatttgtcttaaatatgatttttctactttttacatgaatttcattcatttctctaattccttgtattgaatttcagagcagtgacccaaggtcatccgtactgacatgttttggtwtgaatcttcgtggtaatgataatagctacagtaatgagggctcctacctgctagattgccaggctttttaatttctgttagatggtttgcattttagccagggtcctctagagagcagagcttgrggcaagagtgagagctgacactttctttggaaggtggaagcccgggatggctagggtgaaaaatagaggggaataaaggcaaggaaacatgagaagcaactcgaagcattcttgccggccgcagcttcaggggccctaaagagccacagttggtccttagcaggtgtgtttgtatgacacagaggactcttagtgaaaatttgcaaggaagaaaccacaacttggaccagccctctgaaggcaaggagaagggaaggaggcctttgtttacccagaatcctcctgtctcccattactatggatgaaggtgtgtcccggggggagcagacaccctcgcatttccagttcacatcacatttccttgcacttgcccaggaagcaaaaccccatgcccagaagatcaagagatttcattcaagcttgggagtagagcggaagctccatgctgaaaagtcccttgagtggggatgagggccgggtaaacccaggactaacttggttaaagttaaatctcttgagagtttgacaaggacacttcctggaaagggacatggccatgagcagcccagaccagaaggattttggaaatattgacgaggccaaggggtcctgaggaggtgcttaactaagcagagacaagttcagattttgtggggatcttaaattacaccatttgggagaccttctttaagaaacagaatgcaraagtattactataattgataataagaaaattacaacagattataaattttaaaaattcagtagataccaggaaaatcatacttttagaaaaataacatatttcaattttcttgctgtgtgatattccctttaatactctttttcctatgatttttggtcatatgcctcttggcatatgacttttattgtattgctttgtataaaaagaatagaaaataatttagtcttccaagcatagtcgattacaatttatttttattattgatggttttgaaaagtaccttttagttttacaaattattggaaatatgacaactttgaggcttgttttcaaatttgaggtaacttctaataattttccattatttctggtgtgtaagattgcagagcatttcaagtcttattgcatagtgactgcttacatatttgatcaattgacaaaactcatcaatgaatatgtcttcaatatgtccttttgtgttggcatattatgaaatgaatgttatcttagtcaatgttagtatatcatgtcaaatcaggaaaacatttaaatctttttttcaatgtggccctatgattatttctcttagttaattagcaaatacttgaatggcctgttcattgctacaygcagttcattattagtagataaatgtagcaatttagtcactggaatatagcayttgcttctgcaggcattttgttaggatgtggcaatttgtgtactattttcrtctggagcccagatttctttggtttgagatgtttccgatacagtaagacatgatctagtacattagggtgtataaatcacgcaacttcataactgccatattcactgtagtatttatttctacaggtttctgcacttcaagtgtggaaataccggtaaattctctctcaagtggtttccattaaaataaacaaaaagcgtacatgattcatttgtgtttatgcacaaggccttatcaagtatattcttggccaaaatgaacttctgtttgacaaggtgttgatgagaatcgcaycttgcacttatgacttggcacatctaatgattgaaagaattatccacagacaggcttctggctccctaaacttcaaacctgcttcctttttctccatccacacgtttcaggtgctgggtgccatatcagaactctgatcttccctacttcgtggcgttgggtgggtgtgtggacacagtctgtgcgaggaggatccttggaagccatgcttacactgaaacacctgggagtatgttacttcagtgaaggaataactgtaaactccataccacatctcactaaatggcagacaaactgcacatatatagctcagcttcccaaatacccattaccactccaaggccgcctgacacagggggatttctaccagaggcagtgctggagtggaaaggggcacctgtcctaagcaacagctgtgaaaatatcttcttaaattttggggaatacatagccatgtgatcaccttgctcagtcctcactagacctcctgacaggcccaagcaagtgaacagccctgaagcttcagcttcagcagttcgcagaaaaaccttcctcagtgcacggggtttgcacaccaagggagtgtgcacctaaatatttgcatctgcagtcatgaaacctgacttgccaaatgtggctttaatgggwtaccctaacattttaaaagatgagattttgagattattttctcttaaagcaaatctgtaataccatcctttcggccaatgaaagaagcaagaagttaggtttctgtttttctttactgaaaatgagaaaaatatcttcttctcctagggtaacttgaatgccaaatatttcatacacttatggacaggattttaaagattcgtttgtttggattcctcctagtgtctgcagtgtacccagcccatcacacccatagccacacccacgcattgcctttgggtgaaagttgcatatgataatgaattattaagctaatttatgaatagatgaatgaatggaatttatttcatgatttgctgccgacagaagaaattctatttatttcataaagaagtacatgccaacaggaaaaaaagaaaaaccaggatgggcacagtggctcacacctgcaatcccaatactttgggggaacaaggcagagggatcacttgagcccaggggtttgagattagcctgggcaacatagaaagaccccatctctaaaaaaaaaaaaaaaaaattagcctggcatagtagcatgtgcttctcgtcccagctacttgggaagctgaggtgggagcatcacttgagcccaagcggtcaaggctgcagagccacattcatgtcactggactccagcctgagtgacagagaaaaccctatctcaaaaaataaataattaataagtaaaccagttaaaaaaattggcaaggatataagtaaacaagccaattaaaaaattggcaaaggatacaattaggtcaaattgaagatgatagaaaatttatgataaaagggtttttaacaagacaaacatttaattctcacataaacaatgtccagaggtaaatggtcaatgactggtaaggtggcttctcaaacattatcatgatctgagacccctctggtttgttactgtaacatccaaaacatttgtcttttttttttgacagcgtttcactctgttgcccagactagaatgtagtggtgcaacctcggctcactgcaacctctgcctccaaggttcaagcaattctcctgcctcagcctcccgcgtagctgggatttcaggcacacaccaccatgcctggctgatttttgtatttttagttgagacggggtttcgccatgttggccaggctggtgttgaactcctaacatcaggtgatccgcctgccttggcttcctaaagtgctgggattacaggcgtgagccaccgtgcccagccatatgtgtcttttattcatcgtccaagatgcatgcctcagcttctgctgttgcgtctacattccaacaactaggaaagatgtgcacttttcctttaaaatcactttctggaagtsttataacaaacccttttcttcatgtccccttgcccagtgtttagtcacatgagtatccctaactttaaaagagacttggcaatgtagtcttcatcctgtatgaccgcatgtcccattaaatattggggtgttattgctaagaaagactgagtgagtgaatattagagaacagcaaatggtctgagctccagatataaataaaccattatcaatagaaatgtcaatagccaagcaacttaaaaagtgaactcactagtaattttaaagatgccaggggccaggcaggtggatcatctgaggtcaggagttcaagaccagcctggtccacatggtgaaaccccgtctctactaaaaatacaaaaatcagctgagcatggtgatgcacatctgtagtcccagctactggggaggctgaggcaggagaatcacttcaacccagggcgcagaagttgcagtgagccgagattgcaccactgcactccagcctgggtgacagaatgagactgcatctcaaaaaaaaaaaaaaaaaagaacaccagtggaaatattttccaaaagtgaagcagaaagaaaatactcagtcaaggctgtagrgatgtaagttctctcctgtactattttggggatataaagtggtagggataattaggaggaaaatttgccattgtctgtgaaaatgaatgtgtgatcactttttcctgaaagttaacacttctggatatgtttcttaaagaggatagaaagaagtgtactaagctgtttcatacaacattatttgtaatagtgaaagtctggattaaaaaaaaaatcccttttattgggatgggttaaacacatttttatatagccatagaattataaccagacattaataagartgatgattatgtacgggctaggaaagatctccaagatggatcgatatgcacaggataattctgcctatattttaaaaagatttaattctgcctatatttttaaaagatttatgtttaaatacatcctatgcttcagactgatatcagtgggtatgttggtggaggacaaagagtgagtatgtttgggggtttttggtaattgggggattttactttttgctttatataattagtatttttacaaaaattattttctctgaaaatatttttaatgaaaacatataatacacatagtcattcactgctatgaaccatatggtgggctttttgtccattttttagatgcataaatgtgtatgtatatctatgtctgtgaattattatattcataagatagtatagatagaatcacgctgtacagagagtttttgtattgattttattacatagtgtcatattgggggtattttccaaaggcgtttatacttcaaaggtttattttaatgattttcttcatacgcatactatgttacacataaccacttccaattcttgaaaatttaagttgtttgcaatttaaaaatatatttataaacaattgtttatatatttatgcttataaatatatacacctataaatgaatatataattatataattttatttatgcataaaattttatacttataaaaattgccatttataaaataaaaattttattcatatatttttataaatatttgcatattgtatactgtatattatgtaattatatttgtaatatttgtttatatattttatatttatttgtaattttttataaagtaaatgaataaaatttttattttttaaattatgaaaaattacatagtatatattatataaatatttataaacatataaactttaacattataaatgaaaatataaatatttaaaaaattatttgtaataaacatcttcatacaccatctttgcccatatattttattgtcacaggagagattattactaggagttgctgtgttgaaagttataaactttttaaaactcttgatatgaattatattaccagtttgtttttcagagaggttttgctaatttatattcccactagcaatgtatgagtgaacccattttgccagagctaacyaccattgaatttttattcaatggtggttattgaatttttagaaagattgtaaatttgatgagcaaaatgctctctttctggtaaaaaagtttaaattactattaataatgaggttaaacagtttcaagcatttactgggataggtrcgtttatgtcactggcctattttctgtggcttgataatagcatgtttttactaaattgtaagagctctttatatactgaggataataattttttcagtgttacttattactaatatttttaggcttaatttggccagttaattttatgctgttttggatattatgctttgaagtatctcttacgagttttgataaatcattttttatttgaaaaatattttctaagcacatgttaaatatctgctgctatgcttagtgattggacttcagtggtggataaaataaatttatctactttttctttgagattcgctttaaaatgtgatgtgccttaatctctgaaaggtagcctttgaatgtaaaccaaatgtgtttttaatagcactattgtactgacatccttagagtagagtggaatttctgttattagaagctctgcatgtatttttataaaatttatttaatttgggaatttgattgggggtaatacctatagagatacaagaaacatttaggagtttaacataaatctttgttacttttatgctcattatttgctattatttttatttttatttttttgagacagagtctcactcttgtcacccaggctggagtgcagtgcgtgacctcagctcactgcaacctccgcctcccaggttcaagcgattctcctgccttagcctccctagtagctgggattacaggcacatgccaccatgcttggctaatgtttgtatttttagtagagatagggtttcaccatgttgtccaggctggcttgaactcctgacttctagcgatctgcccaccttagcctcccaaagtattacaggcatgagcccacatgcctggcctgctattatttttaaagggtatcacatctgtattcatctacctatgtatcccctttattttttatgatatgagaggacagtcaaggactctatgagaaatgaaatttccatttatcaatactgttcatttgggcacctaagttcggagtataatgtttgaatgcaatgtacattttcaagaacataaccgcagtgcgttgagggtattgaaacattcatgcactcagatgccacttattgaatgtctccaggcctaaccacagtacatgttagatggataaggccstcttcacctgtccactgactccgtctggctcccatgcccacctgtatacctacagggcttgaccttccctatcttaccccacattcaaagacttctccagttcgtagctctatgaagtgtgtggaaacaagtgtgtcaaattcccaggcccttgttgttggagatctcttgccttctagtttttttgagggaaaaattacatcattgctactgtcttactgccttctgtgaaaatggttttccttgctatctagtaacctttccaaacttgctaaattctgtttgaaagtgactaggggctgggcacggtggctcacacccagaatcccagcactagggagtccaacgcaggaggatcgctttagtccaggtgttggtgatcagcctgggcaacatagcaagatcctatctctgcagaaaaattcaaaacttagccaggcatggtggcataggcctgtagtcccagctaattaggaggctgaggcaggagatacttgggcatgggaggttgaggcagcagtgagctgtgatcgcaccactgcactccagcctgggtgacagagtgagaccccatctctaaaaattaaaaaaaaaaaaaattaaaacaagtgaatcagatgtccagtctttccactttgttttgaacttcttgacctcaggatagtaggactgagtctcacaaggacctgcccctctaccaaaaactggtctttgagtttccacctatgtgtctttggtaaatctgaccttatctttcaggagagctcaaagcagtcacctcacagctgtccatttccccctacccaatctaattaggttcatctgcacctgataactctgtgttgctgtgtgccgtcagagtaataaaatgcatgtctgtgttatgatttgattaaccttcattggtgccaatgctgtttctctgtttccatggctcctacgccagtagactatccaaggaattattagttaccttatcagagcttcacatcttcaggctcttcgggggtctccttggagcaacggtgggaagtgattattctgcctccttatttgtgttttctggaagcttggcaggtcaagttctttttgaaaatattgggttgaggaaatttaagatgagatttcttacgctgtaggagtagcrttgtcattcgtgatcatgtgtgattgtgttcacagttctttgtttttattgtaacttagtctatataaaccaaaaccaaaatgtcgataaaattttccacatgcaatgacaagtattgatacatttaagacttttcagttttattaacaagttaacttttcttaaaaataaagtggaggactgagcaatataggtttacaatatttcattttaccatgtaaggatgtttaaaaacacagtaacaaaagtatctagtctcaacatcacttaataaaagggaatcattttaacaggaartctgggaaatatatagtttcaaataaaggactttcttctaattggaaaatttgtccttgtcactagttggtggtgacaaacatayactaggtctaaatccctggggactgggcatgggaaacccacgtggccctgtttactctccagttctgagggggctacttcttagctctgcagtgaggctcacaattcactaccatttagagcctcttaaaatcgagacaggattcatgcccagagtttatcagaagtctgtgaatacacaaagcacattgatttttcttcctattcttttccttcagaagctatagtgatgggggctccaggagtttttaatgtgattccagattaattctctagcagtggaccgggaaggtagaattgatcaaattctaggacccagtctcctgggcaaatcgaagcacaaattagaataacaaaacaaaaactttatgtgtgtgtgagtacgtgtgcatgtgcgtgtgtgtgtatgaaagtaatgaaagcccaaagccaggacctcattttttcagttcccttttgcagggagaacttacctatgggtaccrttttggaggacaggaatcaaggcatatactgaaccctgttctctttgtgagtgaccctgttgccatttgggacatctgaaacagggcatgctttcaaatgcagcatagtgacaatccttttacacgttgctcaatagcaaaattggggttaagaaagtgactgcgcatgaacaatttttttttttttttgagatggagtctcactctgtcacccaagctggagtgcagtggcgtgatctcggctcactgcaacctccaactcctggggtgtgaacacattcttcttgtggcctccctccagctgyattgtgagaagacagccacatatgaaaatctttggttaaacaagccactgtattcttaaaccttttttctgtgcatgaaatttttcactgaggtataagtggtgtgtgataaaacacacatattgaaagtgtgcaattcaattagtcatgatacatgtatacaccggtaagaccactatcacagtcagtgaacccatcacccccacaattgcctcaggtttctttggattctctccctcccaccccactctgcctccccttctcatctcctggagaccactgatctgttctctgtccccatagattagttaccattttttagaggttttggaagtggagttacccagtgtgtgtttctttctgcttgtcttctttcacacagcatcattattttaagactcacgcatgctgctgcatatgtcccagctccctcctcgttggtactgagcagcctgccgccacatggactgcagggatccaccagtttattcactcatcagttgaggaacatttgggtggcttcctgtttggggctatttcaaayagagctgccaggagcatttgtgtacaagtttttgcatgcacaygggttttctctgcattggttagaaattctggagaagaatggctggatctcctgttagatacatgttcacctttttaagaaattgccaaactatttttccatagtgagtgtacgtgtgcataccattttccaaagcgcaggtttacaccagcagccagacgcttcaggtgaacccgtcgtacagttttctartcttctctgtgcagctctctctgctcagttctgttaactccagctgccccgtcttccccctacacacagacctgtsgsttcaattcygcaagtctgctgagctcccsctrgggyctccctccctgaaccagggcctggccactctctgaaggcagsaggctggagtgattgcaggactcagcaygcttgcttcctgtctctcacggacctttgtcccacattgtctcatgtcactgtcttgaaaaccattgtttcatatattttgtggaattattaggttgcttcagggagggagataaattcagtgcttgttattccattgtagccagaagtgaaagtctgataaggcacttttgaaagttgaccaagttggatattaggatctgcgttaaccaccaggaacaaaaagtcccctgctaagtaacctataatcagcccacaaaagaatggtaacttttctttgtataggtgaacactttggatggttgaactttgtatacctgaatgtttttagataagttatagttctttgaattcaaagtacaatacctctagttgtataaagctaggtgaaaagtgtatagcattattcattttatacatatgaaaattgagtccaagaagtaagtgcgagtgtcctagaatcatatgaagtaacggctgccacttgcagttgtgtaggttgtatactgcacaggcatacctggctgcagcaatgaattggggatgaaatgcggcttatggtctgttccctagacttagttccctggtatgtggttgcacacacctaragagagtttttctcattgtcataaaagtacctcaaagacccataaattcagagaagaaactgtgtgatatgatttggttgtgtctccacccaatctcatcttgagctcccataattcccatgtgtcatgggagggaccctgtgggaggtaattgaatcatgggggcgggtctttcccatgctgctctcctgataatgaataagtttcatgagacctgatagttytatgaaaggcagttcccggctgggcgcggttactcatgcctgtaatcctagcactttgggaggctgaggtgggcagatcacctgaggtcgggagttcgagaccagcctgaccaacatggagaaaccctgtctctactaaaaatacaaaattagctgggcrtggtggcacatgcctgtaatctcagctacttgggaggctgaggcaggagaattgcttgaacccgggaggcggaggttgcrgtgagccaagattgggccattgcactccagcctgggcaacaagagtgaaactccatctcaaaaaaaagaaaaaaaggcagttcccctgcacacactctcttacctgccaccatgtaagacatgcttttgctcctctttcgccttctgctataattgtgaggcctccttagccatgtgaaactgtgagtctttattagcaacatgagaatggacgaatacactgtgtctctttagaaacctctttggtcacagcacatttgacttccaagagttatgcttcaggtggcaccgttatgtcagtctggacatttttgtgtattctttgtcactatgaagaatattttaacaggaatggaaacagcacaatattaattcactcacagcacaatgcttgaataagagtagaaagcagtgtagccagtgttgctcactacaactagagactggcagtttgtgctccttggatgtttgctcctggagaggaaaaaacgtcgcatcaccaragatgctaccttctgtcagcaaggccctgagcataagataaaaggatcctcttttatttggatatatttgccccacctctgtccattttacctgttttagaccctttgaattggggtctgagtatgaaacagaatcaatccaaataattctagatgctttaatgacaaagatgaatttgcagagatgtgggcagtggtagtgaggaacccagaaactgccagctccatcagcaccccagtctttcagaagtaagtggcctgcttagtgctgccgcagctccaggaggcatggaggagaggaagaggatggccaagaggatctgtagcagggaaggatgaagccactgtcagaaaatgtgacccagagctgggtggcagctggcagccagagatcaggggagccttgtgggtacagccccaagggcccaactttctgggatgcagagcaagcctggcagggcagagagtcgtcatggtgatgcggcatgggcatagggggtgggggcagagagaaaatgtgcactgtaggcttcccggttattttctctgtggatggatgaatttaccttactgattatggaaggccagacaggtcttttccttttccttggataagaagttagaagagaaggagaaggaaactcagctaccccgagtcccacccatgtggcaggcatcagccagaagctgtccacagatactgcaccgcctcgccgcagcccggtgaggctggggacatcccctcctgtggtgggtgaggcgcctgagactggaggttgggcaaagggggactcacatgctcaggtgcgcacctgggatgctgaaccaggatgatgagaagttcatatcctttccactgcacttcctcccacaagctaagcctctcctttaggaaatccaactgtcttcctgtcagttaaarcagaatccatccaaggaggttaagcatctggtcttcctgctacgagtctctcacctgcttcagtccaacttccatgtctgatttatcttttgaataaacaagcctcactttgttacttcctgcctgaaaacttctggttccatgtcctattcaggttttattctaattctttcatcacttttgactatcataaataatgctgctgtgaccatttgtgtaaacgcctttgtgtatacatgttttcactcctcttgggagcagactttgtggaattgccaaactctgtggtagcatatattcaatttttaaagaaactttacagttttaaagaaactgccaaactatttttaaaacattttaaagtatctccacaataatatttaagggctttagtttctctatatccttgccaacacttggtattgtcagtctttttaattttggatattttagtaggtgcatgataatatcttacattgttttaatttgcatttccctgttgtgtaatgatctgcaccatcttttcatgtgcacatttgacattcygctatcttctttactgtggcatctattcaaatttttctccatttttaattgggttgttggttgcttggttgttttcttaatactaaactgtaagtttttttatgtatactctcaacataggtcctttctcagacagatgatttgtatgtattttctgccagtctgaaggttgccttttcatctttatggtgactttcaaagttttttttcccccttttggacacaggcttttgctctgttgcccaagctggagtacagtgccgtaatctgcagcctcaaacttctggcctaaagggactcccaccccctgccttagcctcctgagtatctgggactacaggcaaacaccaccacacctgagtaattatttttatttttattcttttagagacagggtctccctgtgttgcccaggctggcctcaatctcctgggatcaagcagtcctcccgtctcagcttcccaaagcactgggattgtaggtgtgaactaccatgcctggcttcaacaacattttaattttaattttgatgaagtccaatatattgattttttgcttttactgttcattttttggtttatcttatctagaaattgttgtcttgctcaaggttacaaagaaaatgtctgttatatttttccttctagatttttttttaatttttatttatttatttatttatttttgagacagagtcttgctctgtcacccaggctggagtgcaaagacacgatctcaactcactgcaacctccacctcccaggttcaagcgatacccctgcctcagcctcctgagtagcgggactacaggtgcatgccaccacacccggctaatttttgtatttttagtagagatggagtttcactatgttggccaggctggtcttgaactcctgacctcaggtgatccacccgcctcggcctcccaaagtgctgggattacaggtgtgagccaccgtgcccagccccttctagaagatttaaagtaatagctctttcatttagatccttggtcaatttcttgttaatctttgtgtttggtgtgatgtaagggacaatggttatgttactgttgctatcgtgcatatgtttctcctcttgtccaagccccgtatattgaaatgaccagccctctcccgttgagctaccttggctcctctgttagactcactcttctgttctgttgatctatttatccatcctgatgccagtaccacactggcttgatttctgtaactgtatatgatgatgtctaaaactgtctttcattttgccaggtgaactagaaaattaaacaattttttttttgagaaactaaaggacaattactgcttggaatcattagtaaaacccagaaaactttctttctgacaattgattggcctagtttattggcttgtgtgctgcattatagcaagtcctgaaatcaggaagtttaaggcctgagattttgtttcatttttcagaattgctttggctaatacagatcattatatttccatataaattttagagttagtttgtctagttctttaaaaactttgatgatatttcaaaagggattatttcgaatctacagatcattttgagaattactattttaccagatagtcttccctctgcttggagtaccctttcttcctcttccccatcagacgaacccctgcccatccttaaagatatagctcaaaagactttcctcctctgggaagccttcctcaagttccccaggtaaagctagacaccaccttggctgtatttatgtctctgctatagcatacatcgtgttgaatttgaattagaatcctaaggataatgactgtattttattttttgatttttccaatgcctagtataaggtatatgccatatgcttaataattacttgtctaataagaagtaaatacatgaatgttgcaaataatcatttttagcataggtattttcatttgaatgactgttacataagtagtcactcctacagttagcagccatgtcttgatccaagggaatgtcagcttcccaaccaaggtatgatgctttctgtttcagaaaaaaagcttttgtatatgggtataaaatgatgaaacgttagacgttgtctaggacctcctcttatctctaaattttaaggaggtcacacagtaatttattatcagtctagaattccagtctgtcataatccattcaagagttttcttagacaaaactaaaatatacatgtatattagtttgctcaggctgcctactacagaccaggtggcttaaataacagaaatgtatttcctcacagaccagaagcccaagatcaaggtgttgaaaaggttggtttcttctgaggcctctcttcctcgcttgcagatggctgtcttctccctgtatctccagatgggcttccctctgtacatatctgtgtcatagtctctgcttcttgtaaggactccagtcatgttgaattaagttccacatatctgacctcatttaaccttaattaactctttgaaggccccatctccaactataatcacattctgaggcactaggggttaggacttcaatgcacgaattttaagggggcacagctcaacctgtaatactatgtatgtatgagtatgaatactcattataaagtttgttatattttattaaacacatttttaaaagtttattattaaaaacacgtcctaagggattgaaagaattccacattgctttagagcagaaacaggcacacttgtttagattagctacttaataatttgaagccagtttaacagaaatgtagagtctcaggtggtatccttcatccacctacattcttacattctgttgatgatgtgggacttgtctcttgtagtttttcagtgtgaagggtgccctaagtgcatttgtcaaggaaaaatttattatcagtataggaaattaaaattttatcaccaaaatggaatgatttatatttttagttttcaaaaattgatgagtgaataaggtgacttacatgttaaataatgttaaatccaaaaaatagatatttcccttaagaaaaaagttcgctacgcaggacaataagctattaagcaactgggatatttgctattttttttgtcgctttatttctagagcccacacagaaccaataattccaaaatgcatataccttgacccagtttctccctaacatttttttcttaacattgttatctaaacccttgacattgtacttcagattcattgtcaccataaatgcaagtccagaatccacctcctcaccttctcgtatgatcaagtacccagccccacagtggtaattcctcaggactcgggatttctgagtcatcccccttccccccctgcctttgaggactgttgatgtgtgggtaaggggtacacccaatatggtatttataactaaaaaatattttctatctgtgtcatcctttcaactttaaagttaaatgaatatgatctgaccgggctctgtggcttatgcctataatcccagtactttgggaggctgaggtgggcggactgcctgagcccaggagtttgagatcagccttggcaacaagtagaaaccccatctctacaaaatatacaaaaattacccaggcattgtggtgcatgcctgtggtcccaactactcaggaggctgaagtgggaggatcgattgagctcaggagtttgaggctacagcgaactgtgatcgcaccaccgcgctccagcctcagcaacagagtgagaccctgtctgaaaaacaaaacaaaacaaaacagaacaaaataccagaatatgacttttatcgcagtcttgataatggagtaaactaagtttaattacttttcatttgtcatatgactatggcacctttttgaagtcctcccaccaagataaggagcatggtttgaaaattggagagtgtattttgttgtttcttagactcatctctcaatacaattaaaaatgcastttaatctctttttaagttttcatttgaaaatttcaaatttatagataatacaaaaataatattaagaacaccctttataacatctgtcacagttgagctattgttcatatttcaccctatttgctatatctccttttctgtgtctttcaacacacacacgttattcattacaattttctgtactatttaagagaaatttgcagatatgatggtcttttactaataaatactttagtgttcagttaagcaacttatattctcttacattaagacagtacagttattcaagtcaayttaacattgatacagtgcttttatctaagttaccagctgttttccaattttgtcagctgacccaatgatgtcctttgcagaataaaaataatattttaaattgaaaatttaaatattattagaagattgagtagtcttagaagattattatgtgttaaataatgaaaatatgaggggtctgtgatgaaaatattaataatcttcctgtcttcatcatttayactagtcctgcctgagctatgcaatggtaaaagttaggggtaccttattctgtatcttagaaatgaatagattaagtcaattactctggaaaattcaagatcgcacaatacaggaactcagacagaaaatgtaaatgacatatcacttcagcacaattaattaaaaactaagccaacattatttgtttgtggagggtgtgtgtacctgtgggttgaattgtgttcccagaaaaagatgttgggccctaatctctggtacctgtgagtggcagtttatttggaaatggagtccttgcagatgttatgaagatctaagttaagatgaggttttactggagtagggtagggccttaatcaaatctaactggtgtccttataggacgagagacaaggggaggagagggaagacgtacagaggcagtgtgatgtgaggagacacaggggaactgcccctgggggacagaggcagagactggagggaggcatctccaagacaaggaatgtgaaagattgctggcaacaccagaagccaggaagaggcaagaaaggctcctctcccaggtttcagacgaagcgtggcctttggtttttgactttctacctccagagctgtgagagaatcaatttgtgtttttttagttgcctggtttgtggtactttgtcatggcagccctagcaatctatgtgtatatgtatgtgtatatgtgtctgtttatgtgtgtatgcacctgtgtgtgtccatgtagctctgtgcgtgtatgcatgtgtttgtgtatatgcatgtgtatgtgtgcgtgtatctttgtgtatatatatgtttgcatgcgtgtatctgtgtataagcatgtttatgtgtgtatgtgtgtgtattcgtgtgtgtgtgcacacgtgtgactgttgcctccacctctctttactgaaatctccgtatggtttagtaactgaaggatttatagcaacagaatattgctcgttctcatatcctcaatgtaacacttggctaattaaacataaacctmacaaaattgtactgagaaaaacatgaaatcatttttagtacctttagactatttttaaagtttaacacttacagcgcaaatcaaaggaatgaagacaacctttttggaaatcggtaactacyatcctcattaggttcagatggagcttacagtgggagttaggtgggtttttatgcaggtggtgttcggatgatttctcactatttgcgaaaaatttcacatgttctcaattgatcctgcgtgactctctttacagcttaatatcaaacatttctccaactcgattatggcctcttgaagaagggtctgtgttttctatttctaaacaaaattcccccagatccccaatgcacattcaaataccagatggatgttcaataaaggctaaattgacatttaggcaacagcttagtgatgaatcttgtcttgcatcctgcattggagtgttccgtcctacagaataagagctgggtggaggtggagagcctgctcgctcctccagaatcagagctcggtggagagctgcctccttctccagcctcctcgagggatgacctggtgaggtgcttcatagccacatagggtctgaastctctcttgttgaagaaacaagagagactgggcaagtctggcttgtaagtctgactggggaagttttgctgctaaggagggaacctgtccatgcagagttcagtatgagttgggaaaggagaaatgatgcrggtgctttcgagtccaaacatcatgcgctgcctctgtcctgtgttcgggaagccacaaccgtgagtgctgttcctgtgtgcgatatcagggcccgtcagttccaggagcggtggcctctgtgggaccctctgctgcagatgggcaggctgcttcactactttggtgtctagctgtcgctggtcatgtgtgagcaactgtgttgtggggcaggttggtaatgacatggctgcttggacgaccaatcacgttgatcatcagaggccttgattttgaagtggacagaaaatgaatctccaatatttacgatggaatttcttttttgattttgcttctgggcaccagttcatcccagaaggcctatgccagggagtaggctgctctgtggggaagaactcgtcgaccctaatgaggagcaggactttctcttggctaagcttgctaagcagagctgctgacaggcagaagcagcacaggtgtacgtggacttgctgcatttagagtgttccaggccaggtggacccatggggcaaataggagggacagcatctattcaaggtggagctgagatggataccatcaccactcccctccacccccaaccaccccggctctccatcaacagctgtttctcctgcaataaagatccttcagacacatcaaatgataattctcctgtgttctagaaaacagaatccttgcctcattgtaaagcaaatgaagtcagaagagtgtgcaaaccaatgcacacagaggagccgggggtagtgatggccatcggagggcctgcgctggagccctggaagagactcactagagcaacaggaaatagtaaagacaggatctggtcatcagaagatgaaagcacaaacagggagctctatgtgtacatgtgtgtgtacatgcatgyrtgtgtgtgtgtgtgtgtgtgtgtgtgtgtgtgtgtgcatgtgtgtactcaggaaggccacagaaggagggctccctagcgggacctcgatggcatcctcagatgcttatccagaagaacgcttccagatgtgatgagggtataaggtctgtgaggatggatattggaaaaggcactgcttctgtgacacgatatggaaataagcatcgagtaaacatgaagaacgaagaacaggcagtttcaagttgaggcgacagaggggatttattgacttggggaagatgatttttaacataccagctgtgaattgagacacattgtttctacagtagcccaggcagaaaattcatgactgtattcagaagcctcccactgttaaatttcttcaatttgcattcttttgtagtgggaggcaaagtggaaatgtggtttagtggccatacgataacctagattctcatgacttgtatgttgaaactcatagtctgaatgatgccaaaccactctgtcacctttggcaagttatttagtctcagttaatagtccaactttcttatctataaaagtattaatagaaattcaagaagacctatttacatatgtggaaaatgtcaggcttagaaagttgagtactggattaggcccttctgccatagcactgctcatagacagcaatagattgggaaaatagaatctagaatttgtttccaagtgctggaagatgtttgaaactttttcagtgttttgtggttattattgttgcagaactctaaaacgcattgttgggacaatgtgtagatgcaacagagtttgccaattaatatatagctaagtgttattaaaatagatatatgatttattttctatgaattgtcaaccttgtctccaaatctcttcaatacaccagagtttacttcaatccttccaagttaccttctccttctccttatgggtccaacctcaccagtggaggggagggaaggggatggagagggagttcagaggcagatggcagaggcagatttcagatgtccttgcaggatccagagctgaaggccaccagccttgccttcctcctacatcgaggcacgttkgtggagctgccccaaagattctgttctgaaacctaaaaacagctggcagcatctgagcacctgcctatcagtgtccacactgctcatcaccagagcctcatagatcaagttctgctgctgcatcaccccaagttcattcaggccccattgtcctctctcctcttgggtgtcgagcctgcattcaggtggctcagtgtcctgggagatgggtggatactctgcgctcttcattattcgtgattgttagggaacccttgtgctgctcagccaataatgaccttcattgacattgaaacctgtccctgaggcgtccgtgcacttgctatgtgttaccgtcagtgttctcctgctgtggcagctgcaggtcacctggaggctgtgccaccccccatgtgtctgatggcagcaggcccacttctgacctctacacatcggcaacaccgcctccttctttggttccatcttctttcattccttttagcgaaatagtacctgacaaactcctgcttctcactttggtgggggttcggacttgaggtctttgcttcctttatgaaatgcatctgtgtcgcagacccgccacatgccaggaacttaggaggcagcagtgcggaaaagctctcggccctaatgcagcttcccttcttgtgataagagacagacaataggtcacacatctaataaatcggtaactgtacagaaggtcactggtcagctatggctgagtactaagaaaccgggcagctcactggcccctgacactacgtccagccttctcacacctctcggctccacccgagttgagctggggctgggctgagcttggccctgcttcgggcagtgaatgtggatgtttccagtctgctcaatgagtccatcatccttaagccagtggctacccaaggacagttcttctcgtggtgaaaggcaggaattcagaagggcaggcctcaccaaacaagcacatgccacgtactggattatgtcacatacactactatcctattggcaaaggaagctgcaggggaggcaaagcttttcttctacccagagtcccaactgggcctgagaatgaaatagacaggaaacagatgaacaggaggaaagcatgcaagtttaataaaagcgttatgtgacacaggagccctcattaggaaatgaagacccaaagaagtggcaaaaccagcattcttttgtgttgggttgaaccagcagaggcaattgtggaaaagtaactcaagtgtttggaggctaagggaagataaggcatacataccctaatgagggctgtttgtgcagaattcactctgctataagtcccaattgaagagtggtttttctcctcatgcaaggagggtgtctttcacatgggagttttcatctcctgtttccaggtataaaaggggagatcagaacacccttctcacatcacctgtttttttcaagggcctttagctttaagtaattatatggccaaaatggcatattttggggtgacatattcagccaccctacaaagccacgtggctcagctcaccatcaactggatggggaaatatatgcagcttctaactgaggaaagacaaagtcaggtcaatggctggggaacagggagggttgaggcattgcgagtaagaaggcaaatctactataggaagtgattgatgttatggagacaaagactaaaacaggccatgggaattgggaatgtgggaatgtagggtggggtcaccaccgttttacatgagcaggtggtggttagaggggctcgttgcaaaggagacattggaagagctgcaggagggcagggtgtgagccacgtgaccattggggaagcacgctcgcacaggaggagccggagaaaggctgggagccaggtgtgtgtggggcatgtgtgggtcatatgtggggtgtgtggggggcgtgtgtgggtcatatgtggggtgtgtgtgtggggcgtgtgtgggtcatgtggggcttgtgtggggtgtgtgtgtgtcatatgtggggcctgtgtggggagggtcacagagttcactgagcctggatcacagcgagtgggagaagagaaggagctaagggacagagaaggggcagtgtggcaggcttagaggatggattaaagtcaccattaggacttggacctttttctgaatgaccagggggagccattgcagagactgagcagaggagtgagaggctataactttgattttgaaagcatcttctggttgctgtttggagaataatgactcttcctccaatgagcctttgctgagattgacactagcttaggtcagcctgttccttagtcttctctactcctctccattcttgcaactctcggtaacacttcatttagcacgaattccttgtttgtgtatgtcaccttccttgtgaatctgcaagttcaatttgaggagaaactttctctgccttgcctgttgtttaaccctcagcacaaccattagttgaatgaaggaatgaaaaccagaaatacctgcttgtatgcaagcagattccagtgggagacaagaaaaagaggggtcccttcattacatcccattgttcacccgaaacctggggtgcccagtcctggacacacgcagttgcacaggccttccctgcgcctcacatctgaagcagctggagccggtcctggtcttgactgtggggaagaaagagcttccagtgaggtgtgagatggaaggttaaaaccggctgatctaaggcccgttcgattattttcataactgaaaagcagccacaggtaaaagtggctgaaagtcrtggactctaggttgttgcccactgtgtttgacagatgcacagaggcaggtcttagaaaccgtgacactgttcgatgtttatagctcaataagttaaagccccgtaatcaaatcagtcacacggtaatctcagcatttccttggggtggccccacccgctcccatggctgtgattgccatctctccatggatgggtccccaggccctttatagccccatctttctcccgaaagaaccgtgaactaaactgacttctgcacatcttcgctgggacatcccaaagccatctcaaactcagcaagcctagaaccagaagactcagtttccagccctgctgctcctccagtcactgtactgtgtcagcaaatgtccgtagcatccgcagaggccgggccctggcatgcggaattgaggaatgtgggtggaacttatgcagcgctggctctggtgcctgctccgtcaccggtgggctgtggacagtgggtgtttgatagcgccctaggcctccgtttcctcccgtgtccttctctatggtagggatttcactgttgttgtcatgggaggggtgggggagccatgcattcatgcattaagccactatttttggagctcctcctaggtacaggcccagcattaggcagtgagattgcagagaaaacacaggagtgggccctgccctccagaatcattctgcagatcattctgcagattaaaatagtgatgccgagaaagcacttagcaggaaacatggcacattagaagcattcactaaatgatgagaagagtcaccagacattgtgcctgaatcccctttctgactctggttaatgagtctctgaatcttgacaattttagttcctaaatatctgacacctcccacttttgtcccccagtgccgtcactcccctgttgaagataycagctatggtcccccaacagcctcacggggcttcataggccagacactgcccacaacaggtcatcagtgggagcagagcccatgcatcccatgcccactgctctgtgcccagcactgggcatggtagaggggatcagtcaatccagtggatgttttttaaagggagctatagttttaaaactgtattaatatagtattttgttaccaggctcattatcatttaatctgggctctaagcaaagattttaaatttgcttagaaccagaaagggttcatttccatttaaagtaatatgaaaggtgtgacttttagaaccatgaacccatggatgttggggcatgattctgagatttcctaaaaagcgagaaatctgcaaatggtagtaggaaagcaaagctaggtaggagacatcaagcactcgattgccccaaacatattgtctacctgtcgttgcctctccctctccactgcttgatccacggcactctcttttcttacttggatggctttcaccatgtccatgcatctcccttcctttgtagccctgctccagtccattcgttacctcaagttagagtgattttttaaaacataaatggtattatgttgcatccctacttaaaattttgtcctgacttgccattgtccaagcgctgaattcctgagtatgtcttaaaggccccatgtggcttccttcatctcctcagacctcatcttgctccactgcctccttggtaactgtgtccccaaaacactaaccccctgattaattcttcacaaatgcccagcattcctacctaagtgcctttccacttgctccttccctgcaaaccctcttacgccagacctgcacatggcttgtcattgagatggcaatgcaaatgtcccatccccaggccttcccaggccacccagcatgggcagtgcaccagcactatcacatgatcccatggcatttccttgctgtcacttttcattgctagtttttacttgtttgcttaatacctatcccttccaatctgaagagacaatgacatcctgaatgctaagtgcctggcccatagtaggcatgcagtacatttttgttcaataagggaatcaatatgttctttgtcctatttgccctcttcaaagttcttgtgccttttcctttccattatgtggaagtcgcaagtattgggtgctctccaaactggactcagctctctgaacggatgagcctaactctggcagatggggggagatggtgttttcagcttttgacagcagttgaatggcttagctcaaaaccagtcatctactgcagacctctggacactgcaaaaattgttgtttgcctcgcttttgtccctgttccttgatagtcattcattccttgagtcaaactgtcagtcactgagaacataaacattgaccaaacaccagccacaggccaggcattgggaatacagaaagatagccctgtgtttgtggagtcaacagcctcgaacaggaataagcaaacatgtcctgataagggccaaataggaagtaacttaggcttggtggcccatctaggacctgtcacagctagtgaatgctgctattatggcacaaaagcagccacgagtaatatgtaaaatggctggcttccaataaaactttattggcaaaagcagtctgagggccaaatcccagttttctggcctctagtctggcgagaacatagacattgaagccagtgggtgagtacccyggggacctgtgatgaaaagggtgagggcagtgtgtgggggagccccgagcacagtggaggggcgcctgacccagggaggcccaggctgacccagggagcctgtctgcacaggctcttcttccatgtaagcgtgcctggccctggtgatcagctgacttagttgaaaaaagaacaaaggagccttaaaactaaaagctatatgtaatattttgtggccttttttgtttttaacaccaaaacatcttttctgatcttcctggaatactctggatcaagatctccctctcataagtctcccagggagtaaaatctctagaaatctccagtttctcacccttgcttgcagcatatgcattaattcaagaaaggtgaaatccaaaatatgaataggctttgtatgtgctttcaagtgaggattaagtcctacaagctttcgataaaaaagaaatgttgtgatcatataaattgaagatggcaatacctctatatccagaaagtctctggagatggtcccatctaacctgctgatgtcacaggtcctcgtttcacagaaatgggattctgaggccagctaatgctgcagccggctcacaccaccctcctagggctctttacaaacctcgctcaaccaccagctgcatcccatgtgctgggtggacagtcacatctttgcatgaattcctttatcttgggtttgcacctgaactcattttttttgtttgtttggtttggtttgtttgcttgtttgttttgagaaggagtctccctctgtcacccaggctggagtgcagtggtgcgatctcagctcactgcaacctccgcctcctgagttcaagccattctcccgccttagcctcccaagtagctgggactacaggtgcgtgccaccacgcccgattaattttttgtagttttagtagagacagggtttcaccatgttagccagaatggtcttgatctcctcacctggtgatccacccacctcggcctcccaaagtgctgggattacaggcatgagccactgcgcctggctctgaattcattttgatttgtattgttatgccatattgatttttattatattttggaaaatactttgggatggtatacaatccttttctggatacacgtaaaacaagcaaaaacaactaagttgggaaaataattttatctactatatgccagaaattcttatgtcaatattttaatgctgaactcatctaatgataccttagaaatttcacagtaccttctcatgttgagacattttcattgttgaactgttttaagatgtctacaatcttttcggcagactcctcatttcaaaccactctacttcagacaacctgatttttaaatattcctctaataaaagaaataaaaggcccactgggcacagtagctcttgcctttaaatcccagcagtttgggaggctgaggcaggtggatcacttgaggtcaggagcttgagaccagcctggccaacatggcgaaaccccatctactaaaaatacacaaattagccagatgtggtggtgtgtgcctatagtcccagctacgtagggggctgaggcacaagaatcacttgaacccaggaggcagaggttgcagtgagccggaggttgtagagccaagatcgtgccactgcactccagcctgggtgaccgagtgagactctgtctcaaaaaaacagaaagaaagaaagaataaaaagaaaagaaaagacccagcatacgattacattcattcattttaagaatgaatgaaaaaccggtacacaattgtttgtgcagggttttggtgagtcaacagcaaaagatgtatctttttaaaaccactctgtgtctgaaataatttcttatgttaaatagcttctaacatttatggccactggactgattcttagcacattaattcttcctgtcatgaggtttggggatacaycagaacaatttatttcacagtggggttcttatccaaacaagatctgtcttcatatctttctcaatttagcagaatgcttttgcagtggatctgggcattatctgcttctagctgttttgcacagaggcaaaaacaaagacaagatatgtgcatgagttagtatgtattacagatggcatctccaacagctaaatagttgtgccacataacagctctgtgcaaatgatatgacccagaaactattttatgttaaatctggcttgagctttttttagttatacatatcgacagtctgaatagaatgtgacctgaaattagagtctgaagaacttggactattataaacgtaattttgagcatccttgaaaaaacataactccattaactgggggataggaaagtatcgtgataattttttatgagctgcgtttttctcccatgggccaaataccctttggaatttttagtttcttttcttttctttttacaygcaacaattatttcattatgatttatccactatttacaattacatgtcagtgtctgttttctagtataaaagcctcggcaagaaagctagggtaaaccaaatcattctaacaaattactacaaaacaggactgacatctttgcttttaacttactttttaaaaagaacagaagttaatttttttatttctaatatctcttgttacattgtaatgttttcartctagcactttgagaagttaatgggttatgtttgggttcaacctgtcaacagtaattatatttagaaatgcaatacacaaattagactaaaggcaaatgggtatcttccaggactgaaatcatctggagaaaattaataatacattaattccatcttgtaatcgtggctttgtatttctattttgcgtagccagtttattgtcaatggctcaaaatgttgtaaacaatggaacccaattcaaccacacttgggatattatataaacctaaaacgcagatttatgtatgtggcttatagaagcattatcattatattttaatataatttttaatttctggaagaatttgggactttaataaagcctgagaagacagtatgaaaataccgtatacagcatggttccctgatcttacctaattttactccatctgaagtgttttcacatctttttcccacttccctatagtttcttggtcaggctaactcatttttgctttttcggccttagtttgtattttccttctttcaggaaatatcctgtgcctgaccaacattggactgagtsgcctcttaytagatcttccaaggtgtccctgactgagttttctcatcatcagacagacttcctgagagcaacagctgcatccccctctcaggtctagtgcagggaccggtgcatagtagccttccaattagtatatgttgaatttgagttggagagacctggtgcaggttcataaagcaggtagaaaacaatacaaaggaggctggactcggtggctcacacctgtaatcccagcactgggaggctgaggcgggcggatcacttgaggtcaggagttcaagaccagcctggccaacatggcgagaccccatctctaccaaaaataggaaagattagccaggcatggtggcaggtgactgtagtcccagctacttgggaggctgaggcatgagaatcatttgaacctgggagacgaaggctacagtgagccgagattgcgccactgcactccagcctgagctagagagtgagaccctgtctcagaaaagaaaaaaaaaaaaaaagaaaagaaamcagtaatacaaataacatgtaataatactaagttaggccaggcacggtgactcatgcctgtaatcccagcactttgggaggccgaggcgggtggatcatgaggtcaggagattgagaccatcctggctagcttggtgaaaccccgtctctactaaaaatacaaaaaattagctgggtgtggtggtgggtgcctgtagtcccagctactcgggaggctgaggcaagagaatggcgtgaacccgggaggcggagcttgcagtgagctgagatcgcgccactgcactccagcctgggtgacagaacgagactccacctcaaaaaaaaaatgctaagttaaatataaaagcaatactttctaaatgtaaacattacaagaaattagacagtgaatagcacatcgatgttatctggagttttattgaaaaagcttatgggggaggttgcgcctcagctgaaccttgtagttttggggggaataaggactaagaggaggagtcttgcctgtagggatgggagcataaggaagaaagcagcaaagagactgacttgagagaaacagagggattcgtgaatgggaaagagggaaagacattccatagggtgaatccagcttatggaggctccaaaagatagaagaaaaacctgaggccttaatacatgggcactgcgaaactagttcatattttggggccaagaactgtcaggatggaagcctctttagaacagtgttgctggggtgagctgctgggatcagacagggggtccagggagggaagaggggatggagacagcctcggtgctgatgtaggtcttggccagacagacgctcgtgagaattcagactccgccaacactcatgagacctaatccattgctctggggcacactgcaccgtggccactcctaaatcttgactcaattatttttatagcacctgtgttgcagactctcaacctcagcaggtatatattgaagggagtatgtctgcaacagaaaaagtggctgttacttgaaacttttctatttcctttcatgacagtaaataaaatgagttaacctatcaatgggaacataattaatttgatagggaacttttaaataaaaaaattccaggtagacacaagccaatgccacgagatgcataaaatcaagtcgttgcccaggagtgaaagggaacgtgcctgacaggagggtccacagagtgccgagggcagatagcagcagagtcaaacttggaaacaaacaccgaggttagaaagtctcttgaatttaacaatattgaataccccagatgggatgttgacttactggatgagaatttaagaggagaagggaactcttaggaaaggagatagagaatttatattttcataatcctttgtaacatatttacaatattattttatgtagtaatttgttaaaaacctttataaacaggaaaagccatttagtttgttcagcctcttctcactatatagactggatgcactgagccatgagctatcttgggagcccttcctccaaccccagagataggctaggtgtctccaaattcatccttatggtagtgcttaccacactatgaataattaattatttgtcttcaactctatagactgtgacctcctgaggagatggaacattcttgttcacttttataggatgtgacatgacactgcctggcatctagtggccggtccactgtgttggcagaatgggtgaataaaagtgattcaaaaatgtagacataaatgaattttaccttggctacgttgtatatgctgaaatattgggacttctgcaaataagcttacagaaccaaagtaaaccctcttccatgcagcagagtggactggataaaacagggagaacatgagcagaggaggcaagaaaaaccagaaggggtagttagtgagctgattcaggatctgccagtgccttaataggactgtgattctaagcaggccaatggacaactgaactgatttcaggattttagacttggctgctggaaggaattttgaagatcattcaactgttgaagcttatgttaatttctaaaagttgagtctatcaattagtatctcggagcaggctcctctccagtgaggggggttgctcacttggctaattcaaataatgaactcatacgacccacgtgggctgaaatgctctctctggcattgttgtgggcaggcgctgtgccggttacttctttgtcagkygtgcactttggcaattagtatgtaattttgccaaatatagatcaaattaaaatgcatttggtctctgagatttcagtcatttatttcttgtttataagccatctctaactaaaaggggcttaaagtgacagtcgttaagaagataaattcatgttttttaatggtgtagctttcctcttttaattacttttatctaatcaaatactgtgttaaatgcccaggagtcatagttctccatgtgtggagtttgcagagagctttgaaagattgctaactggggcatgacttctgtgttactattgcacaaactaagaacagtggaaacaatgtgtgaattttcaagggtcaagtgttagctaaattgcaagactctctccctcaagtgaggaaatttagtttttatttcctcaaggattttgcacgtaatatttttattttaacttgtgctgcttttcattgcatttcagatgctgctgctcttcatacatatgtaataactttgctttccactggggagaatgaagaaaccagccactcttgataactgagcattctcttttcctgctctgtgctttcacagctccattcttttctcttgacctcaggtgttgtctgcatctttatgcactggaatcctgaccgtttttcaaatgcccctacattcatgaattcttttctggtcttcaacctatatatgacctcytcctcctctgaacctgaattagttagatattgctgaataacaaagtatcccataacttagtggctgaagaaaataataaacattgcctctcacagtttcagcaggtcaggaatttgggagcaagttagctggatagttcttgctcagggtatctcatgcagttatagtcaaaatatcagccagggcttcagtcatcctagggcttgccaactggctgccaagtagatgccagctgttgttagaaggccccagtttcttgctacatggacttcaccatagtactgcttgagtgtcctcccaacatggctgctcgctttcctcagagcaagtgatctgtaagagcacagacagaggctgcggtgtcttttctgacctactcttggaagtcacacattgccgtttctgcacttttcctattgcatgtgagtcaatccattcaatgtggagaggaactacagaggaggtggagctcactggagaacatcttgaaggctgcttaccccagagcgtgagcgtggcaatatatcctatctctctaacatgacttaaaatattctgtcctgtatagtaagtatttgtttccctctcctgcccactctactggatttatatgtccttgagagcttagatttgcttcctcatctttgcatagcttgaaatatctggcacattgctttcgatatatgtcacatttcatccacagcctctctcttaatgagtataaatgaagatgtacacatgggaaagaatcaggcaaatggagagaaagagaaacagacagattttgccagagagtgtgtgaaggagggcaaatgagagagaacaaacaaggtggacagcagagtaaattgcacatttttctagataaacataaaaactcgcatgctatttttgtagatgctagaatactaactttacaagaatttaaatatttggaacactgtgtaaccatattctacttttttaatgtatgtgaatgacttgccacattatttgtaactcaaactccttcaattgtgcttaaatattctgcaaacaaagggtcgctttttatcaaaacagagaaatcattggttacaaataactctttggcattgtcaaggaaagcatttataagtctttttatatataattgagaactttacttaacctttaatttaccgctctttaacctggcccattggggtgaaatcatctctggatcgatcaattaacatttatatgtagataattagagcaaagggcacacaggaatgtcaggaggaacaaaagrcccatgagaggataagtcctggcgggtcctgctctgaaatgtcacccgttcttcttctcatttccactcccagagccatttgcacatcatagtccagttcttagtaactcatgtctaaattatcaaaatgacctcaagtagttctcactacttccagctttccctccatacttctgtcggagctaaacttactaaaacatcattcccttcccatgtttaaaaactctcttagtacattctggctgctataacaaaatcccataaactggtggcttataaacaacaggaatttatttctcacggttccggagactgggaagtcctagatcaaagcactggcagatccagtgtctggtgagatccccacttcctggttcatagacggtggcttctcactgtgtcctcatatggtggaacgtgtgtgggagctttccggggtctctttaaaagggcactcattttattcatgagggctcttctctcacaccattcacttcctaaagaccccgtgttctaacaccatcattttggagataaggattttaacatacgaattttggggaacacaaacattcagaccatagcagaaaccttcagtgaatcccacagtctagaggccttatgctaggtgtgtctcctagagtcaaccctgatccctggccagaatctcctctgttctcaactcttttcatcttgtcccccaccattttcctgatacatctttttgatcagcccacctgattkctcttctgttccaagcatacttgcatgtctgtgattccttcctgcttagaaacaacatttctttccagtgaccaaacatcaatcctcccgtttctttaaattcaattcaagttccctaatggatccatcctgactcaataattctcttttcctaactttcgggctcccagagtttggggattacagatacttccttgtaatacttgttccatggtaatcttatgtctctcaactacgccctgtgattgtgtaagccaagtataactataaggtatttatccactcactgggtgctgtagtccacatgcatttactaagtgcctactttagtcaaagtagatgttcaataagaaatttagtgaacaacatgtraatgagagcagagaaattataaaagtatgagaaactacaaaaatagtgacccattcatttatccactagaataatcaataactcttgattacaaaacgatcaggtgctcagcattgtatttgatgaggcatgggtcatgaaagggttaagcaagtagggtctctacaatttcatgacttttcatttaatgttgatagctaaggaaggagtatatgaaacactttaaacaaaagtcaggccagtattgaagtacattacagatgaactttttaaataactattgaagaaaggtaaagaaaaagggaagaggcagtgaggtgttaggctccagagaaagttccttggagatctttagtcttgaactggacctaggaatttgtgatttggctttgaatatgaaggtgagtattaccgtgagactagatggcaaagagcatgcatctaggtgtacaggaactagaagaatcctaggctacgcaaggamcttcccagctggaggggacggaggtgcggagagaacaggatggacggtaggggaggggcagtttattttacgaggatgaaatgaaaggaagtctgcgaagttcctagcaagccacctaacccgaagtaggtgcccataaacactagctttcccctcctctttgatttagcatttaggaagttaatgatgtagaccttctagccatgaaaagatttttactcctttccttaggtgattaatctaataactttttattggtgtcatgtttattcctcacctaactttccaaaactacaaggaatatcttaataggagaggagcaatcttagctcacagctgtatcaagaattccaggtgactgataattctatgtgaaatgcacatatacaccgtctttataacattatctgtgtatgtgcgtgtgtgtgtataaaggcagcatatatacttttctatatcttcatctgtgtatcttagcacatacattcawatattgatatctgtatctatcatttatctatatctgtatataggtatatatccaagttgacygtgtatgtatagtaatagacaatcagaattcctgaatgactcatttatcatttttgactccctgtaacttgtaaatttctttcttttccgaagaggacatgcagaaacacacacaacattccagcttccccggttgcattccacacctgcgtctgggcagtggcgtttcttcaagggagttacatgagtctctgtcttcacttccaatgctagtcccttcactgctcactctcyggtaacccactgttacctggtgccaatttctcctattttttattmaaggtagacatcctcagttcaaggaggttgaggtggcctggtgcagctgtagcttagttttcagtaggactcttcctgtgtccctaggaagatacacttcactctgtgggaaccaaaactctggacccaccgcatctgcagctgtctatgcttcactgccagttgcaggatgggtaagatggactatttatattggaaggtgtgcacttccaggccccaagacttggacctctaaactttccctaatgtccctaatggctcctgtcactgcacagggttgatttcacaccatggccgccaacgtagtgcttgtttcttgttaatgttctccaaatagcaggatgtcattaatagagtaggacaattgatgttccatgtgttgtctagatggtatgagtcatttgggatcatattaaaactgaaggagacaactatagaagtgtgctgttgtccatccatgtgagagagaactcttctaacaggaatggaaaagcctgcagaagctacactgatggccgcataccacgcagccatggctttctgggccactgtggcgggagttcgtgggctgaccatttaggctctgtaagttttctttatgtttcctctacagggtcatttctaagcttttttgtttgtttgtttttgaggcagagcctcactctgtagcccaggctggagtgcagtggtgcgatctcggctcactgcaagctcccgcgttcatgccattcacctgcctcagcctcctgagtagctgggattacaggcgcccgccaccacgccgggctaattttttgtatttttggtagagacgggctttcgctgtgttagccaggatgatctccatctcctgacctcgtgatccgcctgcctcagcctcccaaagtgctgggattacaggcgtgagccaccacgcctggcctctaagctttctttttaactttgttatatacaggcacattttcataaatgttctaatattttctccatgaattagtagcagattgggaggtctataaaggttttagtctaccatgttgctgaaagcaagatggagaatatttttcacataacagctgtgagagaaaaaggtagaatacagcagcttcatagggtcgcaaagtgaaaaaagtatgtgtgtgcttgagcatgtgtatgcgagtgactgtttggttagaaataggaaagcattatgaaggacttggataggttccaagaggggaaaggagaagccgcacctttaggtgcgcccttgctcagattaagttgaccgattacttacacatccatggcattaaaataccaaggaattgtattttctttgtttgtattacatattgctttgaagtaagtgggataacagaattttgaaaatcttttaggtgttaagaaattatcttttatattattagtattattcatttctctagaaaaagggcttttgaagagctcttataggcgttaaagattgggtataaaatgaacatgtttattttgtattttgttacaattacataggaaataggcttatctaaatagactccaataactttcttactattaaaatcgccttggggctgatttcaaattcatgtattgagcttgtctcctgtttgacataaacttgtgtggttcgttttccagtaaaaatacatggcttttaagattttttttttctacagagtattttaaagggataaaaaaaattaggatttatatatattgattaattagtaatcccataaccatactctgagaaactgaatatttggatggtttcgagatggcacaatagacaaaatcttgcagtagaagaatccctgttggataaccttttatccctaaattctacttttttatttgccaataaaatgtgagaaaatgtttaacgtttttactttgatgcaatagtaatttttcttttgatagtggggaaattcagattctattgttataacatagttataattaaattaccaaggaattttattttctttgttttgtattacatattgctttaaaataagtgggatagcagaattttgaaaatctgttatttcactgttgaattttctctaattatgtttatgggattactagtaaatcactatatacaagtcctaaatttttttgattcccttaaaatactttggaggaaaaaaatatttaaaatgttttaaagatttaaatttttaaaacattcatttaaaactttacaatgcctggtactatgggaatagcaaaataaacataggaactactttccaggagatcacagtctatgagaaaggagaagatatgaatactgtggtgtaataacggatcaatagaaatatatacaagcagatgggatgatttgataggttaattgggaattctgagtcagggaagacttccagaaagagattatattttagctcaggtttaatcaaaagattgataaatgtgttaacataaaaaatgtaaaattaggagaatcagttttctatgtagttcattgagtgcctccaatttttaagatgttgtgttggtatacatgagcttaatgcttagcagctccggtctttgcacagagcacagtctacacaaccctccaggattacagaaattggtctaaagcacgtgctgcctttccacactgacaggtactagaggaaacatcttcctttctctctgcaggagccccgtcctggttttccagtgcaactcccgccacgtgatttgcttagactgtttccacttatactgwgtgacaagactcaatgatyggcagtttgttcacgaccctcaacttggctactccctgccttgtgtgggtaagtctagcatgttttctctccatctctaatgctaatgaagaacagaagaacaattattgatgtaaaactggcttagatatacgtaaaccctagcagaagaatttaaatttgatcattgctggatatgaaacattaatgtttggatcgcaaaagataaaagttctggggaatgaaggaattgtgttgaactggaaaatgcattatttgcataaaggcattgagaataagtttgtcaatattattcagccaaggtatactaagtttttctgtgggttagagtcactctccatgttctagatttgttaccgtggaactagagcagtattacctaatttttaaatcgtatacctctatcactcaaaatgttgaacacatacccaatatatataaaataacatatgtgaaaaagaaagcagaatgagataaacctgaactacttaatattttatcttttcacattacaaagcaccctttacttgtactatactgttattacatatatacattttaatggaagtgaaattcatgtaaccaattaaccatttacaagtgtacaattcagtggcattttgtgcattcacaatgttgcacaaccactacctctgcctggcttcaaaactttctgaacacctcctacccagctaatcactgcctgtgaccccctgtcctagccctggccaccaccaatcactttctttctctatggatttgcctattgtaggtatttcctataaaagaaatcgtacaataggtgacctttcgtgtctgccttatttcacttagcatagtgtatttgaggtttattcaagttgtagcgtgtatgaatatttctttcctctttgtggctgaataatattccactgtgtggataccccacaatttgtgtgtccattcatctgctgatgggcatttgtgttgtttccgtctttttggctattatgaataatgccgttgtaaacattcatatataagtttctgtatgaacatttgctttcatttaccttggatatataccgagaagcagaattcgaagtttaacctttaggagaactgcccactgtgttccacakctgctgtaccgttttatattgccaccagcagtgtagcaatgtcccaggtttctctctctccacattcttgtcgtcacttgttactgtttctaactagtcatcctagtaagtgtgaagtggtgtcttattgtggatttgattttcatttctctaatgactgtgatgttgattatcttaattcatatctcttccttataagaatgtcrgttcaagtcctttctttgctcatttttaaattgagttatgtttttgttgttgagttgtaagagttctttatatattctggatactggatccttaccagatataggatatgcacatatttctcccattctataggttgtcttttcactttcttcataacgtcctttggtgaacaaaagtttctagttttgatgaaatgcaatttatctgtttttgttgttgttgctaatactttttgtgtcaaacaaaagacttcattgccatatctgagatcatgatgatttgcttccatattttctaccaatagcttacctcttgtatttaggtcattaatctagtttgaggtaatttatgtacctggagtgaagtaaaagttcctatctctctctatgtataaatgactgcaatgtgactaaatatgtttcattaattcttcaaaacttaatttgaaactatgggataccttgactcaatggtgaggttttaagttcaatttatttcaagatttagttttaatgtcaattatagctgaaaaatatacctccaaatgataaaaagatccaaatggaataaattaattkctttgttgactttgtaaattatgatactcacttttaagcatatctaccaataatgcaatgatttttaaaactaagattcacataatatatgttaacatattgttaaggaaaacttgttgaaagttattgtgcctttctttttaacaaaagcatccaaaatctagtgaagtttattatttacagattggaaaactctgtaatgcttttaatgtgacaattttgttttggtaagccttctgccttcacaaagccacaaacaatagaaacatttctaaacacacattttcaagtcttcccttcacactctatctttttagttatcagttcattttgaacccattttcttttaatgtgtatctttttattttagacgatttcaaacatacaaaagtaaggaaaaatactacagtgaaccttcctgcacccattagtcaggatttgcagtgtaccaaggtgctctcgacctttcttgtaattctcgccgaatgacctgcaagcagccatttttctcaggacctctggctccctttcgtaggaaatagtatttaaaagtcttggtgcttggaatgctcattgtcaccatgttggttactgtttctaggcctagtggaataagctaggagacttttttttttttaagtacaaatgcaatattagttatactaacattttcagttcaaatccagtgttaccaaattttcattgaaaagtcaccaatattacaactgttgtttctttcacccttggcaaaaattctgttactgagtgataccaacaaaattactcatttgccttactttggaatgcacccacaacagtatcagtattacagtatcgacaccatcacctaagtgtgattattgaaaacaatgttaagatttttgcagtttgttttgtcattagggtatatccttatagggatataaactcatataagttaatgtatagttatgtcatcaattgaatatgtatttctcattgcttttttttaaattttttaattaattaatttatttttttgagatggagtcttgctctgtygccgaggctggagtgcagtggcatgatctcggctcactgcaaccttggcctcccgggttcaagtgattctcctgcctcagcctcccaagtagctgggactacaggtgcatgccaccatgccctgctaatttttgtatttttagtagagatggggtttcgccatgttaaccaggctggtctctaactcctgacctcaggtgatccgcccacctcagcctcccaaggtgctgggattacaggcatgagccactgcacctggcctttcattgcttttaaatttattgtgttttcataatatgtaaaatatttccattattccaaagcaaaagctacaaaacatgctatattcaaagaaatacaccctttatctacgttctctttctctcccaaaggtaaataataaataaataaaggtaaataatattccttttctctcccaaaggtaaacgtttattaaaaacaatcacctattttaaaaataggtaaacatactatagatgatatcaaaaatggtatagatgtgtcaccttcttaagtagaaagtagattatacacatttttctttaccttgcttttttcactctatagtacctattatattttaaagatcactccctagtccgatatagatattttcttacatataaaaatatatagcattattgaattcctttgtgtaggtatagcttactttttccttactggcaaacactaagttttcatttttttactgtaaatattgctacaactaatagacttgtgtgcacccgtattttcatattgttgtcagagtattactgggatctgctccctagaagaggggttactgcaccaaagggaaaatgtgtatttattttactgtttccaaatttctctcccagtagtggtgcgctttccatgcccatcagcaattgcaaagtgcagtatcaggctctccacttcctccccaacaggggagccgmaaggcttttgctttgtttctaattatatatttgagaaatgttattctatgtagttggctgtatgtttctttttaattttaaacaaagttgagcatcttttcatgtgtttaggatcctttggtgtttctttttctcagtcatgttgaaaacatcaccttttctttcagggacaggttacatatattattttcaaaaatattttctgtatagcacactgttgacagccccttgtagatacagaaaagattagcaaagttgggtcacttgtaaagaatgtgcgtaaattaactttaatttcggtggttctttgccacgagataactaacaacctccttgaaaagaattttgcgtggtcaagctctatgttgttaaaatgcattatatggattctactaaatattaattgtgttttaaacaccttttagacttttatttttaaattcagtatgccaatgccatcctcagaatcttatgcactcttgggttcaacttcttggttttaatagggagtgaggcagggatgaatggatggaaagatgttgcgttgcaaagtttctttggaatccttctacacattttttgtgaatgtggccacctcatcactggttacttaaatataatactcatagaaatttgcttttattttttaaaataccagttgctattgagaacttatattccstggcacctcttttccttaatgtttaataactacaagtgctaaagttacatatttgtgtgttttgctattttaaaaaatgaactagtaaccagaagctgagacaggctagaaacaactgtactgccattcaactgtgtagtcagtcttccacatggcatggttcggttccatccctgtttcttcatagcttcagccatgttttagtatgtatctccgtaagtactcactcatgagaaaatatagttcggtttgtcacaagattgtttagcatgtgttatttcagcctttttaaaaactgtatatccaattacaatgtttccctatattatgcaaagagaaactttcagatgtcatagattttattttgtcaagaacaaactggattttctttaatatttgctcaacagagacactcattttgtttattacttgcttagtttttaaatgtcttgctaaatataatggctccctactctcgttagcttctgtctcggagcctattttataatcacattgatgttcacgtatgtaccgacatcgtcagtgttgccgttttctcattttcctcatgtttagattattasttctatctttaattaatagtttctttgaaggattatttttaagtcacctatctgttttaatagggttaatttaattaaaatgagataagttattcattattcttttagccaagcacagatgaccttctgctgaaaggtgactgacaagagagggctccactctccagtggtggttgtgggactccctgttcccttgggataacccctttgcaatacatgacatatgaccatccaatatacaggctagggtatgagatggtacacatatcattctgtacattaagtctttgtggaggtcaattctttycatattttttgcataatacctgtgtaagtcctaatattacccccataaaccagtgaaccatttttcacaaatcctggkttatatacggcacctcagaaaagcctagttcaaatgctggctctgaatcttactatatacataatacagggcaaggttcttcaccttagtgtgacttgatttcatcttaggtaaaatggggataatgcattagcatcattttatgtggacacattaaaataatgccttatgargtacctttagggtacatgctgaagacagtaggcacgcaatgtacactggcttttgttattttggttgtgatttaagcatgcactccagtaaacatatacatattgtgtttgtgtctatgtctgcatgtatgtgtatatttacagagaaacatgcatttggacattctttcattgtaggttgggattgggatttcctataattcaatgcataaatcagccaattacccatctatctggtgatctctcttcttggtttatttggctttgccttgattcgtggagcatagaacaagacacataaaataaaatgataacaaaatagaaatagaaaatcaaagtttatagtctgggcacagtgactcacgcctgtaatcccaacactttggtaggacgaggtaggcagatcacttgaggctaggcatgagaccagccaggccaacatgatgaaaccctgtctctactaaaaatacaaaaattagctaggtgtggtggcrcatgcctataatcccagctactggggaggctgagacaggagaatcgcttgaacccaggtgatggaagttgcagtgagccacgatcacaccactgcactccagactgagtgacagagcgagactccatctcaaaaaaaaaaaaaaaaaaaaaaaaaaaagaaaagaaaagaaaaagagaaaaaaaagaaaagaaaggaaaggaaagaataggatcaaagcttatcaaactataaatcaaaatggtagattatcaggaacaagagctgatggaacccatattactcccagggcacagctttcttctgtggtggagctaaaggttatatcaatgtctatgaatcttataaataacatatgttggctaggcgcagtggctcatgcctataatcccagcactttgggaggccaaggtgggcgaatcacctgaggtcagcagttcgagaccagcctggccaacgtggtgaaaccccgtgtccagtgaaaatacaaaaattagccaggcgtggtggcaggtgcctgtagtcccagctactcgggaggctgaggcaggagaatcacttgaaccagagaggtggaggttgcagtgagccgagatcattgcactccagcctgggcgacagagcaagactcagtctcaaaaaataaataaataaataacatatattaataatacgtatggaaaacagaaatgacagttaattctgtaaagaaacaaataatgtattgaaagcacagctttatggaagctggactgctacgggaaggcttcagagtccatgcctgatcctgtctgtggtcagatgcagcacagcccctgacaacacgatgggcactttgggcacgttgctgatcgtgcactccyggtgctgtggaatgtttctctggaggttcttggctgacctcctcagcaattctaattgtataaaatggcyggacctccagagtcagaccccagtgttgtctttgacgtatggaatcttgggagtggcccttgctgatttctctgaagagtggtccattaacctctccaccatcccagcttaaaatgcctgtgcgaattgttttgagcccccgtggggactactggctatttttggattgtaattcctccaagaaaattaaagcaagatttatttatgcamtcaaaggacattttatccctaaagccatcgkttcctttcaatgataaagtttctatctaatcataaaagatggattartctggtactggaatccatagctccaatccattccttgattttcctgaacttaggagtgtgaatgaagctgcaaatggggtagatttattggtaaatatgttctttgaatttgtttggtggttgtatttctatcttggtgtggtccaaaggactttgatcaccacaaattggaatgactcctcctgctggggtggcatagtcaccactcaacctgtggaagaagcaaatgtcccatgcatggcactgttccaggatcttctgtgcttttccataaatgcagctatagccctcacctcctctccaccctgcccctagcccatacaaatggtcctttcccccaaattcattatttagtgtctccttagcctaggaaatcatgtaatagaatttgaatacagatgttataagaccataataataatttttaaacccctgggactgttaactagatatacatacatatatatayayatatatatgtatacatatatatacatatatacgtatacatatacatatatacacatatatacatatatacgtatacatatacatatatacacatatatacatatatacatatatcatatatacatatacatatatacatatatacatatacatatatatctatatatacatatatagatatatatgtatataaaatatctcttatatattgtgtatatatatattatatatatattctcatatatataatatatatatatgagaatatccgtagagttagcaaacyattttccaaattacactggtctcatgcaccaaacgtcttaacagtgtctgtatatattcatttctagataaatatctaatacctcttgctatcaagatgtgtgtaataagatgttcttttctgtttccatcgtctagttttttgtgtctctttcaaacttcttaagctaaacaccttatacattcttcaaggtatggccaggcaacaatgaaccaatctttttcattgacaaaattatgatgrtgaataattaaaactggcttaaaataccatccaggtagaaaccctgctctcctagtgtgaactcattctttgaccagatattgtgttatactttctaagggtaggatatgaaattttatttccctaaaattcaaaaacgagtaatgattaatgagcgcttactataaatatggtgccattcttagtgcttactcataaacctccattgaatctccagaaaaccctattaggatggatgttgttattcttctcatttttataaatgaaggaatggaacctcagaagttcattaaattgcacatgctggtgtacaaagccagagagttatggctctagcgcctgcgttcctaatcactgtgtgaatagataagcctgcctcaacagttaaactatcatacctttgaaagttctatgggaagaaggtcaagaaaagaacatttctaatttattagcactatttcatatttaaaacaactataaggtagaaattattattcttatttgtacagaggaagaagtaaaggctcgatatcattaagcaaccaggatcacagagttaggaggaggaaagctgagagtttaacccagatacgattggctccagagctccgtactcctgcttctctgctgccctgcctctccctaggctgtggtcttcaaccccagatatgcttttcagttacatggaagtttttaaagatcccaatgccaaggccatgcctcagaccaattaaatggtaaccttttaggttaggcatcatggtttgttaaagttcccacgtttaaatatttaagaactactctggggtgggcagtctgtaagcaagaaggcattttcaatgggagtctgtagcattcataaatgcaaaaatactccctctgcccatgtctatgtaatctctagtgatttgacttgctagctagcatgagtttttcagtacattttgatgaagttgaaaataagattgacaaacatagccaaaacagcctatttccagaacctctgacaaactcttacctaaaggtatgggctttggtaaaatctttttaattatcctgaaaggtttgctgccagctattactagtagtctatgctcggaattgttttgaaatgatgaagcaccctctgcatctccttttaaaactgagtagcactcacccaacttggtggagcttcatgtatttaggttgatttgttgagagtgctactgtagaatgatggctactatgcaaaatgcacttacttcttgtcctttataagccctggtagcacagatttttctgttgctctaggggmtgaggaagtagtttcccaccttccctatgaaatgccatcagcctcaccattagtaccattcaagtccatcggttatgtttttgccttttgttttttgtttttactgttgtactcccaggtcacttttcatgtaattctagttttcacctaacttagaatgcaattccctttccatctattatctcagctcaccaactatagtccgttatgcttcttggttgttgtcagtcatagtgcagcatgagacagacagttctgatcctgtttagatacagagatattctcgatgcctagggagtcaagaaacttgggttgcagacacctacttagggagcaaaacataaaatctaatatgaaggaatattttttggttttcgaacattrctctcctaaatacaaataatcatgttaatataactcctaaaacacattggaaaactaggtaaatatattaaaagatgcgttacaaaagaatatatgcaaatggccaacacgcatattaaaaattcaacataattagttgctacggaattgctaacttaggctgggtgccctggcttaagcctgtaatcctagcactttgggagggctacgtgaatcacttaagcctaggaatttgaggctagcctggtgcaacacagggagaccccttttctacaaaaaatttaaaaattaggtcagtgtgttggggcatatctacagtctcagctacttgggaagctgargtgggaggattgcttgagcttgggaggctgaggttgcagtgagccatgattgtgccatttcactccagcctgagtgactgagtgagaccctgtcttaaaaaaaaaagaattgctaacttaaagcataaaatataaaatgatggacacacattcaaaagaggtaagaatataaattcatatatttccataaagcaatttggcaatccgtattataagctttaaaatgttaaactacccagagcctatccacatgcaatctccatgtgtctgcctgtctgtttgcctgcctcgctgaaacagacagtccattctctttctagctcctggaccttgtataattataattgccactgtgaaaatggtggcaccaggattgaagccacattgaaactaactcctgatgtgcttgtagtccaagttcaaagttccttctgcctccaaattgattgaaattaaatcaaacttcctaagcttcggagtttaaactccttcctgttttatttttgggaatgatttagcaattttgacagttttcctttgatttggatgcatgaggcggtgtaaagtcagggtaatagtctaacttctctaaccaaagcaacactggaatcgcagtggctgaacagggtcaagattgatttcccttcatgtcatggtccagtgtgggttggccaaggggcctctgctccactccgttatccagggacccagacccgaatcctgccatcttctggttctgtcacccacagcagcccctgtgtctcagctcgatcctcttcatggggccagctggcggaggaagagcaagcagcacaccacactggagactcaggtttagatcccaggcctgcaaatggagcatgtcacttatttccacgttccttgtaccagaactcagccacatggccctgcctagccacgccgtgtgtgtgtgtgtgtgtgtgtgtgtgtgtgtgtgtgtgtgtgtgtgtgtgcgctcagggagtagaaaggatgggggaggaaacaggatctggccctgtgccaaggagaaaaagcaaacgggctgtcaacacacagcagtctctaacgctggtggagaggagggcgaaacataacatttattgaatggcttctcagctttcctctccctgcttgcaacaggaacaacactcaatcaagtgacttcattataaggagtgactggtacacggacaaggaccagaaaaagagctgtaggacaaaattgatggtgttgcagagctcattctagctggatcaacagggcactgtctgttcgrtcatctttttggccttggaaatgctgcctttatagaattctacttcagagaagacaacagaattttatgtttgcctgatgcatgcatgtgtctggattacagatgaagtgattccgtccgtccgtttgaaacagctccagcagcatcactcccttcctctctgggaggaacgccaagacaactttgcccagttcttactttccttgaatttcgactctccaaactgacttctttccccttcttcttcttctttttctgcatcttattaagtgtttaaagataaaataacatttgagaaagcaaaaataaggtgggaatgttctgaatagcagagagaataaaaataattttttccacccatttctgccaaaaactcttaaaaagcacattctacctttgttttatgagggcaaacacaaacaatttttagctataaatttattacttatgcaaagaaatgtggaaagatgtctgtcagtacttaaggtagctacaaaagttgctcaaaacagctgtctttaggatttcttcttctttttagtgtgtgtttgtgtagtgtgtatgtgcagatagataaatggatagatgaatggatggaygggttgattgattgataatagatagatagatgatagatagataaacagatagtagaatggcctgaattctttccccctgcctcgtcagcagttggcacaatttttgaatgtatgcattctgcattgtcatcagagtgggcacctcctgaggctgggaggattctaacgtagtcaataaaatacyaattgacctttaaatatatcattttaaatggtttgatgtattcttaaatttattatgagccatattatgcatacacaagagtgcttatagcacttgtatagttatagatttgcatagttatagaaaacctctgtaaccaccacctggatcacacaatgtgagccagcagcccagaagcctccgtgtgatctcctccatagccgcttcctctgcctgtctagatataactactatctgatcttaataattatsattccctgcttttctttgtagcactaccacctatatatacaaccctaaataatgcaagtttttgcctgcttttaactttcaaactagtagtgcttgaaaggttttgccaaatgtccctctccagaaccatctaaattccagtaatactcctagtcctgaacctctgaatatatgtgcaaattattccattcaaggttttttcattcttatttttgttatatatattttgttaattacactagataatggctgtcttcctcattgggttgagggatgtgtgttattgggtgtgaaaatagtttattatctttttcatcagataaattttaagcttacaatcagagatttaaaagcaaactggactagtgactgggaagaattgcttggatgacaagatcagtttattgcactttggtgagagtgcgtcttatatttgtttgatgaattgtaaaaagcagagttcattgcctgtgttaaatatcctccatcatctgtcagtgttgtatccaacgtcctcarctgcttcagatttggtgttttgggtggttccacctcagcgagccccacggcctatatcagaacatgtcgatygctgagaatcacctaaacgaagctgacttacagcagccagagagccgctcggcaatatgcaacattagagacacattgagcaacacagtctgtgatctctgcagtgtcacaggaaatgagatgcctgctatatcttcctgagctatggatttttgcaactagtcagaactttattccagaagaaagcagggccatgtgggtcaagaacaatttaagtgtatctgaggctggaatccctttggattttaaaaatattattcctggtgcagacaggttcaaaaaaaaatactgttctagctgtagattccgttccttcatcactaccgccatcatcatcacccacaggcgtctattcagagcctagtggtgctgcattcaatactgtatgttgctttggccacttacatacaaacacacacacacatacacacacacattcggtaactgtgataaaactttattcttcctccctgtgcgatgtcttgtgttamtgagacttcatgcatagaaattgctatgagctagtgacctcctactatctttgaaataattaataatgtgcttagaggggttgatttacatatttatgagggtttatactgtttggttcyaaagcaggagactgagakaatttcatgttttcaatgcataccaagttagcaagaggaggagtggcttaatattctaatgtcaagatgaacataaatatctaatacccaaaccaagtaattgtattatttatttgcagtaaagtctgaatgccctccaggtgatctcacatgttccatcactgattctactcgagtgtttggaaaaaataatatttcttatattttctgctttttgaaccattactagacatcaccagtcttggaattatatatttatagaggaaaacactgtacaaaaggcagtggtgaaacacaaggaaggaggaataagaacagcattcaaagaagtaatcttatttacttcctcagcatcactcctratccctcccccaagctgctacctgtgacagctctttcttgtggctcaagcacagcagtgcttttattttwttttattttatyttattttattttttttttttttttgaggkggagtcttgttctgtcgcccaagctggagcgcagtggcgcgatctcggctcactgcaagctctgcctcccaatttcacaccattctcctgcctcagcctcctgagtagctgggaccacaggtgcccgccatgatgccaggctaattttttatatttttagtagagacagggtttcaccgtgttagccaggatggtctcgatctcctgacctcgtaatccrcccacctcggcctcccaaagtgctgggattacaggcatgagccactgcgcccggccatcaactactgtctcagtttgcccaggcttctattacaaaataccgcagcccgggtggcttaaacggcaggaattaattttcccacagttctggaggctggaagtctgagatgaaggtgtcagcagggttgatttctcctgaagcctctctccttggctggtagatatcgtcctgcctgtgtcctcctgtggtctattttccctctgtgcctctgtcctcatctcctcgtcttctaaggacaccagtcagattgggtgaagatctacaccaatagcctcatgttacctctttaaaggccctgttgccggccaggcacagtgactcccgcctgtaatgccaccattttgggaggctgaggcgggtggatctcctgaggtcaggagttcaagaccagactgaccaacatggtgaaatcccgtctttactaaaaatacaaaaattagttgggcgtggtggtgcacgcctgtaatcccagctactcgggaggctgaggcaggagaatcacttgcacctgggaagcggaggttacagtgagctgagacggcaccattgcactccagcctgggtgacagaatgaaactctgtctcataaatgaataaataaataaataaaggctctattgccaaatagagtcacatcctgaggaactggggttagaacttcaatgtatgaatttgggggtacacattttatcctataacaatcagtttctcaattctgaaatagtttttaaatactcagcacccccaagttcagaaaaggcctattgaacgtgagccctctgtatgtaagttctgctccctgcggttaagctactgggtgttcctaagacacgccttgtcctccagccttcccaaaagcccttccccatgctccatgtggkctggtttcctgagcttcaacgcagtgtccctggggaatgcagggctctttctgccaattttctgatttgaaaatctagactcactagcagacgtttcaggatggatcctcctaactttcctgtgctttgtaaatgtaaagattcaagcatcttcttgggggtgcaggtggctaggacagcatttgtggtcatgtctcagtccctggctctcccaggatggattgtcaggacctgaggcgtccagttattgtggactaaactgccaacagttacagtaaagccaacaatgtaatcagtggctcacacacaaccgcagcataattcttgcctggggtgggcrtttcaggtgggtggtggttatcttctgaggggcatttgtatcttttgcctttattatcccactgggcctkgtccatatctccatggtcaagcttaatccccacatccaagatccrgctggcagaggggaatgaaattataaactaggcatgcatctttcatataatcccagcccagaaatagcacacacccctaagatccttaagctaggccttagtcatttggctatatataccttcgagggagtctcagtaatggacccttgagtagaggcctaggaaccagagaaaagaggaatttaggcggacatctggcagcctctgtcaaaaagatattcctctaggggtactgggagcccagcttccaaggagtaggcttggttatgttcatgcttcaggaaccttgggcaaagtgaggaccctgtactcagatggtgccaattcaatgaccagcccactcaactggatgtcgagctgatttcctcgttttaaaatgaagagaattctgaactcagaggtcataaatcagatggtatataaaaatgactggcacagtacctggtacccagtcaccaccaaacctatgcaccagttttagaatgcattctagaaacgcgtgactcacacgggaaacctgaagctgcgatgtaggtttaattgaagttgtatagttgaaaagtaaaaatcttattttctttttgacattttctacattaatactttgatataggaataattaattcctttgaatcagggattaacattataagaaatgtaaaackttccataaatacgtgcttgtgaaaacaaataacttggaaagttattgatagttctttataaaattcttatattagatctattgcacaaaaccagattttctaaactaatctttttcagaaagaggtatatgtaggmgtataaatagcgkcattactgaggctaccactctgtattatttttctcttctcactgatagcattggtaggctgctttaactgggttgttagtataacttctaagtcctttccagaaaattttgtattctgaataggctgcagatgagtaatgaataaaactcatttatgtgcttgtggactgaaatcaagtatgatattaaacagatatgtagtttgaaattggggtcacggtattctaatggaattgggagctacactaaaagaagtggactccagactatggttcattgggctacaggaagaaaactttataatttctgtgtttgatttactttttatatcctcctttaaattttttttgtttttctatcttttgttttccatgtgtttaaatgtatataaaatagaagcagtatttgcattgaatcagtattggtattcataatcaattctttatttttactaataggggttttccaccaaaattttggagagcactgatctaggccagtggatttcaaagttacgttgctgctacctatggaaagagatacattttacatcaagagctataaacatataaaatgtacacacgcatgtaattgaaaaccctttcacaaaataatactttcctactatatgtgatgcactaatattttcagttttaatctatttcagatgcatttgagccatcccaaacacttaaaaatcaaccctgtcttgaaggactttcagaaggaataccctaacttcccttgggagcccccttcgtgtttagtcatttcaaatatcagaacctcttgtttctgacataactcatgtcttacgctgcagaaaaaaaaaaaacttaattagactagatttgaacaaagtagaaaaaatgaagtcatccattcatttttctaaaccagtcagttttaaaattcaggaaaacataaatttttgatacatcttaacagaaagcacatttcagatacacatttcattttcaggaatgccatcactaaagccagataacatggatactctagggataccacagtatccatgttatcccagcctagtcacacctgagtgaggggctgctacctcccctgatgcagtgtccggaagacccctacctccctgcactcccatccccacacccccagccccccacccccagccaggacaggacaactttattattagaacagtaacctttaaggtaacatagttacaaatacctaaacagcctcagttgagagtgacttctaactgtttacttctccaccgtgttataatttctaagcaaatttcctgtgtgtctttagatgggcatcagaagtacaatagttaatgcttgcagctttgcttcggagcgttcttttttctgccatgctgattggtttttgttttttttttttgagaaggagtttcgctctgtcgcccaggcgggagtgcagtggcctgatcttggctcactgcaagctccgcctcccgggctcacgccattctcctgcttcagcctcctgagtagctgggactacaggygcccgccaccacacccgactaattttgtttttgtatttttagtagagatggcgtttcaccgtgttagccaggatggtctcgatctcctgacctagtgatcygcccgcctcrgcctcccaaagtgctgggattacaggcatgagccaccgtgcccggcccatgctgattgttgtaagggaaatgctgagtttgtcttggaggttgtttttggacctacagcaagatgcactcattagctaacttgttcttcaaattagatcactatggtagaaatagtactgaactataagtcgtgrggctaatcctgactctaccccaacttaacctggttattttggtcacgttactttctagctactggatactagggcaggccttttgcgtacattaccatatataagcctcacagtgattctctgtggttgatactaataatctccttctgcagatgaggaaactaaggctctcagaagctaaatgtaaacataggtctgcctgactgtaaagttmattttccctctccaccttttattcacaaaacctctttcatgtctaggacttcttccacctcaaagatgttatgatccttgtctgctggcccctaaaccaagtcttactatttactgaatccatgaaattggtcagactcagcatgaaaaaatacaatcaaatcartacgtggagacagtgcctcctaatggctctgcaaracacactagcatctcagcctctctgcagtacctttagattgatgtttatcaaactgtgttctgtggaaccgtggggaggggttgtccataaagcatatcaaggattattttacaacaaaaaaggtgggaggatcacaaggtcaagaaatcgagaccatcctggccaacatggtgaaaccccgtctctactgaaaatacagaaaaattagctgggcatggtggcgtgcacctgtagtcccagctactcaggaggctgaggcagaagaattacttgaacccgggaggtggaggttgcagtgagccaagattgagccactgcactccagcctggtgacagatcgagactctgtctaaaaaaaaaaaaatgtggtcaatgacagcaggcataagttttttctgttttagtaattgagacttccatatcaatactttatcaagggaacaacaggcaaaaataggggcttctgtagtcttcaagtcatagcagaaattttgattaaaatggttttggtttcttaatactatatatttttgtagaataaaagaactgtacatgttgtattgtgagttaaaataacctaactgcaaaatgacaaagaccaaattttaattgatctctgttattaacatagagggaaactagtttattaatattaaaatactgtgttatggtgtagaaaagtaggacctaaaataatagagcatagaagtaaaagtatttgggacactttgccttcaaaaacaattcaaagcattttgttttattttgtttttgatttgttactccctattttaatttgaacatgctcgtttcagttagagactgtttactttctcttcatttcaacaaaatcagtgatcttggtgagtttttattgttcatatataactaagcaagtagtaaaagatgttggtttcagagggagtaagacctcttgttggatgaaatgccaccatcatcatcacaatttatttatctaatatctcttgttggatgaaataccaccaccatcatcacactttatttgcctaatataccactttagaaggtactgtttcaagaattgggtgttgttctcggttgtacacagcttctgtagctatcatcatatcaatagaaggagtaattacctataaagtatgcttaactgtacactcatgctaagtrtagcatactgggtataaatcaacaacagctaacttcaaactttattttccaaagcaaacgtctaggctgtaattttgccattcttccttctgatccaaaaataaaaataaatcaagctgtaaagctgataatgagatttgcaaccagctaagatataatctaaatcataaggaggtttaaaagtcctattgttcattttccactatgcgaatgatttagaaaacccgggttcagagacaaggaagaccactttgccatttaaataagggactggcacgggtagcttctgtgtttcatgatccacgtccccaagtaatatatgatgtgtttataggaatgttaaaggaacactgaagattatggaagcgtttttggggataataacacttaacaggaatatactgtttaccagtgagactgaaatgaggctgaagtaagtaataagcatttcagaaaattacccaattacatatttaaccactccaaggcattttacaaaattgcttttaattgtgaattgtgtgtttgcaaaggaacctggtgtggtagtaggaggcatatttgtcagagctcagcaatggaatcttttttttaaaggagtttgaatacaagagaaaacatttgcagttgcttttctgatgccaataaaatatgtgtttaagactgcttggcatactattctagaaaagactacagagctattttgatgcctgagggatttaataccaagtactttgaattgaaagcatttagctattgttttaatacactttccttctgagactacagctacattgtagggagatagatttctaaattgcaaatattaattattcatattacagaaaacaccctaataagtttcctgtttttatttcacatagaaatgcacaattaaattactgaattcttaaaacttgtatcaatagcttaaaataattttcccttaacttggaagtagagcttaattttcattaaaaatggtgcatctggtcacattttgagaaatatatggaactgtggcatcctgttgaatgatataatttgtatcctctaagtaaaaacaaagacggttgcataggcctctacaatttataaagtgtgtccttaaaatgtcagataaagcaaatccaagcatcctgtccattttataggcagtatctactacactgcaggctctgcgtcacagggagaagcaacggtttgcagaatagataagcttcttcccctcaaggagcttgcaattyagtgggggtttcagatatttatgaaaaaccatgcagctatataattacagattagataagagatggaagaaacggaggaagtgaggcaggacaggggaagaaaggaacaacttgaggtaaaaccttgagacaggagagagcaaagcatgtctgtagcatggagagaccagagtggctggaggagagtgaaagagaccagcaaatgggcagggcccagcaagcccaccctggaggatgcagtcctggaagtcagatgctggaagcttcatataagagaagtggcatgatcagatctgcatttttaaaagaatactcctgctggaggraggaaaatggttgcaaaggggcaagaggagaggtgaaaraccaaattcagtgggactcgtgatgggcctcgtgtggaggaagggcaggcaggcgttgaaggtaatgcttaggtttctcgattcagctcaggacgggtaggtcttcagcttgtagctcacaaatgctcgtgagtggtatcatggaatccatgacaaaaatttaactttcaatcaatttaatatgggtgatattgcactttgcacgttgtgggggggaaaggggctggtgagtgtgctgttgaagttctgtaaatgacccttgctgaatgtgcctcagccttaaactctcaactcacagcaacgggcagtgcaagaaacagagacagaaacagatgcacaatctcctcttacaacgtggtcgctgaggaaatcacccactaacactgctccgctcttcgtcaactcctgcaagatgttcccctctgcactaaggctcatctggttgacaggaacagaaccaactaaagctaatataagaagagaggagggggttactatcaaggatgggggtgtctcctgtttcccagggacaggggtgggtctcgggggcaacagaaccattggtccaaagaccccttctttgtctccatgcatctacatcacctgtcaatctgcctgcttctttcagcctttgcttctccaattccggcaggaacgtgccaactcacggctcacaagcttacagagagtcgcacgatttgggcaaatgatttgtgcgattcaaagacatttgcgtgattcaaacttcagtccaggaaaaatattagttctcctgaatgacacataagttttctatgctataggtaatacaacggttacagagtacaatgttgactctccttaggccactaggaaggtcaggacttatcttaagaaactgtcatctattctgggttttatttctatatgctctctttatcttttgtcctcagtagtctctcagtatttcatgttctctccattttttgtctacttaaatgttattggtatacatttgtataattgtctcagatcctttctagaaygttacaggaaaggaaagataattgaaaacttcaacttgaaaatggcaatagaatttcttggtgccagtatatttgagagcaatggtggcctagaatgtagcaattatgcatcaagaatataacagtataaaacttattatgtgtagaattttattccttttccttaggcatttcatagctctatagtacactgaatgcattgtgtgccaaacttcacatgtggccaccggtttttgwagttatttaaatctaaatttatatagattatatgaaattaaatttcagtttctcatgattacaaaacaatgtaaatacgttyagtggatacaatattagttcaggcatagagtatttccaccgtcatagaaatgtccattgcacagcctgacatcaagtagtctttaatttgttcattaatagcttgaaagtaacttctgcattaaaagaccctgacttaamccttctgggtctttttcaatcacgtttctagtgcatctgtctttttggtttgctttctgttctaacttggtcactattagcattcagactttattctactcctgaatctacaagaacctcaaaattcctcattgtcaggttctcccactgctgtccattcgctcactgtcttatgctaattgagattccatttttaccacaacagtgttctggtccagcctactgtggcttcgtattttttcttactgtygcctcacatcagcctagttttctttcttggctacctaaattcctctcattaactcccagagcacgacttcatgtgtgcctgttgttttttcagccctcacccgtaggaattctgtcccgtctatgccaactggagaatgcctgaactgcctgcccactctcgctctgtagctccagatatgtcctgtcctccaccaacccagacctccctaggccaaatgtcctgtcctccaaggtgctcatgtcctgttccattctggaatcactacctaattaccagatacaaattgttcttgataaatccacttaaattataaccattttgggaaaaaccttcaaatcttgttcttccttgggattccgtttttcccagtgccaacctcctcaggaaatgtcacttcatgagtgtgtacttgatagaattcctaaggtgatacaagccttggactgaagttggtacctctgttttctgattatagctctgcttctagctctctatgtatgattggcctttcctttaacatttcagaatggttttcttacttggaagccaggagattgggctggtcagatgctgatgcttacagttctgtatttttataaagtcagtctttaatctatttcttgggtcccattatatatcttgatattatcagatactacctatttctgactgtaacttgtgcatctggtaaatctgatgattgtcatttgtcatgtgagcatttgcaaccattggccgaggtctcctgttacattgtaccatgtggcacaaaggcatacatgcacatattgatccatgcatttgtctatccatccattcatccatcatccatccatccatccactgcacaccgtagctcggccacagtgctagtcatagaaatacaaagcaaaaagacgtactttttactttcaaagagcagcccgtcttatctggagaaagacacaaaaatatgacaataaagaattgatttattcaaggcaagtacctactatgttttgttgcaacacaatggttcaccatgtcacttattaactggccataataccttaggactgggacattaattttcagtaattctctagaacatctgtttaaaccataaaatttctctgggtaggatttggcctctattttacggcagtctgccattctgaagtgattgctgaatactcaaagcatggcatagtgaaaaacactctattgattgtggccagcgaagttgcattgtattgaaatatgtgctgcctcactgaagtcttgactcattcatgccattgataacagtttagatatgtgcgggtgtaggctgaaaacgcacaaatattagggaacatcagcaacacttgattatttatgctcttagaggacttatgctcatgattcttttgcattgagctttaattatgcggaactgaaggttctgatgttgcaggacttttccttagttcagccatggacggggttctgtgtcccaygaccacaaaaattcaggcttgcaagacaatttraagggtgggtaagacagggttttattaggtgaaaaggaagaaaagggggaaacagggactctcgctaggccagagtccctgctagacggcttccggcgctcagcctgaatctcgggttccacacaggaggaggaggggccaggctcctccccactgcagagggcaggctggttggagtttctccagggaccccctcccacctggctgtcccactagaactgaaattgaggcttgaaaaaaagggtcttttccatctttaaaggtgttgttttacttatatgtaatacatcattttcattaaaataaaaatgtaaaagtccaattccaggacgcagatacccgtgtgggtgtcgttgagttgcgctgtggctgtggtgggcagttagaaaattgatgtgactcagtctgacatcgtggcattgttttcaaattcagctcagtcttacaatgttcccagttaaagtgtgagtgacactaactaattaaattgaggaaaagggtattcataaagtggacgatataaatagaaaataaagttagcaattgacattgtgaccaccggattttttttttttttaagaacgagctgtgtggtaaaagggtatatttagagacaagaaagataaaaggccatttgattgagaagtattatttgtggttcaatcggttgcatttaggctgctatgcctcgttcactgaaagtataaacatccttcagttgtatcacaaagcttcttttacctcagtgagctatcagtatgtcagctcattggtcagacttcagaaaactgaacccagttttatgttcaggtgkacatatttctaaatctggggaaccctaaaacccacttgaaacaccagatatatactctgcaatgtggtgaycattggctgtacaacctgtgacagaaataaggttgtggaagccagacaatgggaaaactgcgtggaaggatctagcaattaagtgaaatgtatgtgagtcagtgaatagaaaaaggtaattgaaatgtaatctatgttagtgacattgacagtatatagaataaaaaagaagttggaaatggctgccactctgataggtgccgaaaatctgtcatgccattcagctttattggaatgattaacatcttagaacagaatactgaagacacaaagaatcctggtttttasaagtcaaaatgggacataattgttccattagtctttcatttttaatggctttttggtactttctgaagcattcagaaaaacacctttaaatttacagtgactggccaacctttccaatccaatgcattctaccractgacctaggaagcccctagatcctagttactgagggggaagatgcaggcgtgccatgaactcatacattaaaatgcttgccatcctgattacacaacttgaaggaattttgatgtctttgaaatgagagattatctcttgttttaattttgttttttttttttttaaacagtctcactctgtcgccaggctggaatgcagtggtgcaatctcagctcactgcaacctctgcctctggagttcaagctattctcctgcctcagcctcctgagtagctgggactacaggtgcccaccaccacgcctggctaatttgtgtatttttagtagagacggggtttcaccatcttggccaggctggtcttgaactcctggcctcgtgatccacctgcctcggcctcccaaagtgctaggattacaggcatgagccactgcgcccggcctgaaatgagagattttcaaaacaaaagaggttaagatgtgtttgtgtggtataggacggaagagacaggttgtatactcagacagacctgagactgaatttcaagtctcttcagctttgtgacttcaggccagtccttttatttctctgagctttgacttcctgatctatcatctttaagtgggcctgtgttaattaaatggctaatgttggtttatattgtttttaacagctttattgacatacaagaggcccatatttaaaatgtaccatttgataagttttacacacgtatatgccagtaaaacaatcaatgtaaggaacatagccattgacccctcccatgtgtccctgccaagcaattatttatttgtttacattttctagaattgtatataaatgctaccgtagagtatgtactctctttttgtaggatttctttgatacagcaaaattattttgaaatttatcattgttgtgtataagaaaagtttactcctttctactgctgaattgtgtatattttatgtatacaaccacaatttgcttatcctttccactgctgatgaatgctgggcttgtttccagttgccaggcattaccaacaagcatctatgaaattttatgcaagtctttgtacatgtagatatgtttctttttatcttgtgtaaatacctagaagtggggtgactaaatcatattttagagtttctttttaaggaactkccaaactactttccgtggtggttgtaccatttccattttacatgcccacccagaatgtacgagagttctagttgctccagttcctactcaacacttggtatcatcaatcttttaagttttcacattccattaagtgtgtagtggtgtctcactatggaattatgttgcatttcctaatgactaatgatgttaaatatatatatatatatttaactgtatatatatatacatatatatacagagagagagatgtgtgtgtgtgtgtgtgtgtgtgtgtgtgtgtgtatatatatatacacagagagagagagagagagagagagagagagagagagagatggagttttgctctattgcccaggctggagtgcaatggtgcaatctcagcaaactgcaacctctgcatcccgggttcaagcrattctcttgcctcagccccccgagtagctgggattacaggcacacgccaccatgcccagctaatttttgtatttttagtagagatgggattttgccatgttggtcaggctggtcttgaacacctgacctcaggtgatccacccacctcagcctcccaaagtgctgggattacaggcatragccactgcgcctggcctgactatctttttatgtgtttatttgccattctcttactttctttggtgaagtgcctgttaaaatcttttgcacatattttattattatttttatggtgacacggagtctctgtcgttcaggctggagtgcagtggttgctcatattttaaaatatgagttgcattcttactataaaaatgtaagaattctttatatattctacatgcaagtattttatcagatgtatgatttgcaaatgttttctctctgtgtgtggcttattatttcattttcttaacagtgtctttcaaagagcagaagtttttaatttcagttaaatccaatttgccagcttgttcttttatggattgtgctttatgtagcatacctaagaaatctttgcctaacaaaatgtcatgaaggttttcccctatgttttcttctagaagctttatgttttatattaagatatctgatctattttgaattatcttttgtgtatgatacaagttaggaatcaaagtttcttttatattattggtatttatttttttcaaacagcatccactgaagagagtatccttttgctactgaactgatcttgcacctttgttgaaagtcagttggccatgtactggagggtctatttctgttctctgcgctctgtgtcactgatctatctgggtatctgtatgccaatagcgtactgtcttgatttctgtagatttacatttagtgttgaaatcatgaagcatttatcctttaactttgttcttccttttcaaagttatcttagctattctaggttcatgttattatcttatgactcagagtttgaagtgaggttgctgggacttgcctccatatctttcaacccctaacccagtgggtatttcactagcccacacaggccatgaatctctatttaaaaaaaagaaagacataaagacagcaagaaagaaaaaagaggaggtagggggagagagagagagaaggaaagaagaaaaggaaagaaaaatcttttggtcttgtcatgtgataaacagttctaaagaaagaataatttgggaaacagcaataaaaattaaaagctgagagaaagtgttttttttttttttttttttttttttttcgagacaaggtttcactctgtcaccctggctggagtgcagtggtgtgatctcagctcactgcagcctccacctcccaggttcaagcgattctccctcctcagccttccaaatagctgggattacgggtgtgcacgaccatgcctggctgatttttgtactcgtagcagagacagggtttcaccgttttggccacggtgatctcgaactcctgacatcaagtaatctgcctgccttggcctcccaaagtgctggagttacaggcatgagccaccgcgtctggccgagaaagtgttcttaaatacaatgtttagttatagtaattttcatgaactatgtgttctaagtagaagctactagcttttttttgctgctttgcctttaatcggactcattattttttattactttgaatccctcattgatcaatttcaacccagctgattgctaattttcaattgctcatgagtcctttttcaaggctcacattttaatatccttggcgttttttccaacacctattgcccactgtctattggcaacagagggcagtagccacttgtgctggcctgtaggggagagtctgtttcccactcacctgcttgataagacattcttgatgatctggctgacatgaagacagccagccaacagcacacgtcaaccctgattaacagaatgtgaaatgaggaagttctggatcctcaaagtattgttttacttccagtgtcttcacgttgaattatccacattgaattacggatagtgtttgtctactatccattttgcactgtttcataatgaaagtaatgttattttcatcattatcatcatcataatttcaattctgcttgccgtagtcgaggcactgttttaagtacatgtttttccccccaacatatgaaagtaccagcaataacctactactgtctgctaggaatgcaagatatgtatttttcacataataggaatatatatccataacccttcgatattactgagtcccttttgtgttaacagttatcaagtactttccaacatgacaatttcagaactatctgggagtgatgatgtttactgtcatctgagaggtcaccaagcagagttatggagatagtgtagggaggctgctcccactgtcacgtgggtgcagtatgttgggagagtgcgttgtctgtgagaatcattgcagagagtatggatgataaaaagaatcaaaacgctttctgtcatgcacctcccctactggcaagaagctgggcttgtctgtggctgcatcctcagcccctgagaaaactgtcacacgctatgggtatgcaatgttatcaatgaacaaaggaataaaaaatttaagttgggtcaagtgatcaatgacatattgatgtgtttgggactttgtttgccatactgcctatcctgaaagaaacataagcactttccctggtaggtcagctctctggatactggcaccctgggactatttctccccctgagtggggattctcaaaccaggctctgccatcttcaacattgtttgggtgaaaaagtttgtgcttccctaagtgtctcaggaaaagattctgtaacacactaaagaggctaaatgccatcatctggcaccacgacagttgcatttttgtttaaaataggaatttgaggatctaaagtatgtgagctagatatgaggaatattgtgaatgttagggatattgaatattcgtttacacaatatttgtcatctttgcacggaagtggtgagaccctaagggagagggaagaaaagggatgtgagttggcccccagcacctgcagggcctgtgacctgaccatgggagggctcagcccccatccctctgagaggccgcagggaccctccagtcttagctcccagttgtcttcaattccgctgtcttctctactctcacctgctgctaatcacgcaccgcagcctcccacaagcacccacctcatggccctcgtgtccccacccctcggacagcctccgccatggcccgtgcacttccctggatgccccgcgtgtttttgctgcaggaacttctccggaaccaggtcgtctctcaaggaaaccccttcctctgcttgcccctccctctccacatctcctaggccctcggagtcaagctggtgtcctctcagcccacacttttctctttgagatcagcacgttcctcctgagcatggcctgctgtgagcttcaggtcatttgtctcacccgcctactcttcctccttgtcatgcaacattgggtctgccaggccttccctgtaagctgttgaggctttctctcccctagaaatcctgcctccattccagtggccaatctgaaccccacatgaatgtccactttgcagagctggagataattacacaactgggctcacccattttactttaaattcctccgcagatacacactgggcaccgtctgggatcgtcctcctcttctctggctgctggatttcccgtgctcctatgcagctcttcatagcttaccctctgacctttcctaacctctcctctgctctccctcccttactccatggctgcactgcacacatctttttaaaatgtaaaatgataaagtagaaactatcagaagggacctttctcattgcctcacaacccagtctcaacctccttgccatttgcatccttctctggcacttgtgttcccattaccaggagagaattggccttgctccaagccgagccccccygcccccattgggcttgggctcccccactcggggttggctcttgagtcatctgcactctaggtttcatgggccctccctccctgcttcatctcctacatcctacaaacatgctctcctctcccatgctcagccagtcaataactgaacagcaaacaaaagtccacccataaacctcttatccccctccgcagaattttttatccttcttcgtactgcttctaagagtggttgccatatgttgtccccactgacttgcctcccattccttcttctctctttccaacctggcttttttcccctccatcccactgggatattccactggataagacaatttaatgccaaatgatagtaacactaatcctcactgcgtgcttactatgggcttccagatctccatgccctctctgtgttccttctccctcggtggtggctccttctgtctcctttattagcttctcctccccaaccagacttctcactcccagacaactatcatgcaactcttcatcagcattactttaatatcatttacctactcatgacttctaaatttatgtcttatctcctgaactctctgcagaacttctgaatttcatggtaaactgactccttgaaaactccacttggattctcaaaggcatctcaaacttagcttgtttccaagtcggtcttgattctaaccgcaccataacccacacaccctttacacctgttcctctgacactgttcctcacacaagcgttaccactgcccatactgatgccattctctgtccctcccttcctgatgcccctgataacccatcaccaatttctgttgattcctgctcccaaagtacctggaatattttcattaccctctgtctttgggccaccactctagtccaagcctctagtatctgtttactgaacttgcgtaaaagtctactaaatgatctctctacttcctttcttggatatactacaatccatttgcgacacaaaagccagcatgttttttgtttgtttgtttgagacggggtcttgctgtgttacccaggctggaatatagtggcatgatcatagctcactgcagccttgaccttccaggcttgagcagtcctcccacctcagcctcctgagtatctgggactacaggtgcgcaccaatgcacccagctaattgttatatttttatgcagacggggtttccccatattgcctcagctggtcttgaacttttgggctcaggtcattagccagcctcagcctcccaaagtgctgggattactggcatgagctgctgcacccaaccttgagcgagttttttgtttgttttgttttgtttttttgtttgtttgagacagagtctcgctctgtcaccaggctagagtgcagtggcgcgatctcggctcactgcagcctctgccctgagttcaagcaattctcctgcctcagcctctcgagtagctgggactacaggcacgtgctatcacacccagctagtttttgtatttttagtagagacagggtttcaccacgttggccaggatggtctcgatctcttgacctcgtgatccacccacctcagcctcctgagagggtttttcaaaaatgtaaattaaatcagttccctgtcccaaaacggattccttaggaaaaatacaaattcttcataatattctccataatgttccgcaggttcctttcatatctctccttcccttgcctgccctgtggcagttgtacaggcctcctcgctaatcctgcagatgctgaaccaccttcccgtgcagggcctttgcacctgctcttctccagccagttcactgccccttctccttcacctgctgtgtgcatagctccttctcatccttcaaggcttggctttgaaaagtcccataccataagcctggtacctggtcacagcttcctctttgttttctttataccccacgtaataatttgcgatacttattcattggtgagtttatttggtatcatctcccagaaggcagggatcgtgtaatctggctcacagctgaattctccatgcttgtcacagtgtcctcagccacagagtargagcacaacaattatcacttggattatgtaagacaagaatttggactttagtatttatgctgccgtaatttttaacttactttatgattgtgtaattttatgttctcacacacttttaaaggcatcaacatattttacaacttaaatatcagtgtgaaatttacaggtaatcataaatgtgtaatgtagtacagatttagtgcaagataacaaaccaagctattatgtgaatttcaagaatgggaaggctttaatatttgataggcgctgagtgtaccaagctattcagctggctgatagaattatgattgataggaaatgtgaaggaagaatcattcctggctttctacttggaggaaaccaaacagacgatgttctacacacagagagagatttattcatcttgtccttgtagatgttgaccaagataggagaattatgaaatttgggcaaaaaggtagacctgagtaaatgacaggtattctaaatctacatgttttacattgtttgttaattggttctactgaacttttttttactcattctaccagtatgtattatttatgatattaatggctcatcaccaatgaagtgaaagaaaatgtatatgatatttagggagaaccacagttaatgttcaaccaaatttcaaataaaagtccatcagtttttacatattttctttctattccacattgctatttctctgactagtgaaatatattgcattccttttcgatgactaatacaattatatatttgttgtacctagagccttatctgcttgctctatgatggtcataccagacttattgattcatctattaaatcaattccgtggacagaatttttaatacttttttttttttttttgagacaagagtttcacacttgttgcccaggctggagtgcagtggtgtgatctcggctcactgcaacctctgcctcctgggttcaagcaattctcctgcctcagcctccctagtagctgggattacaggcatgtgccaccatgcctgtctacttttgtacttttagtagagacgggttttcaccatgttggtcaggccggtctcaacctcctgatctcaagtgatccacccgcctcggcctccccaagtgctgggattacaagtatgagccaccacacctggccaatactgacttaaaatatttattcacttatggatttgtcaggaagaaaaaaacatgccatgatgcctcatttatagctatttgagatcaccagcccttccaacacattagtttcaacaattattcagaaatagatgtcaattagaagttccagcagaaagtgtggaaagaaatttcccttgggaataagtgttttatttggtagtgttgctaagtcaattaaattacagcctatattttgccaagatgtaaaaatctcaacatatctatgtaaaaagaaaaaagaatgggtttacaggccttgcaagttaggaggcaaaacaattttgtactaatttatatatgtgtgtgtgtgtgtgtgtgtgtgtatatatatatatatatatatatatatatatatgtcctatgtgtgctatatccattaatatcctatgaattgaaaatatccagtcaagtggtattgcttcaactgggctattcctatataaaggagttagttctcataacaaacgcaatgcaaacacagaggactataaaatcagcattttagacaaatgtggaaatggtaggcttttacaaaggataaaatctgttgagtttttgttgttttttaaagtactctgactgtcacttcttgtaggtgagaggtgcagggtgaatgtgggtggggagcaacggagtacaaggagaatttatggctccaactacacaagtttgtcaagtgacagagcctcgccaggggagtcctgatgtgccccatgtcagccccgaggccgagggattacagagcctttcccctcctccccactacagcttccccagctcattacagcttctcagaggggtttgcagtgtaccatggggctacaggaaaggatatttttctttttccctcttaatgataagaggtacaggtgaagagagccagcaaaacccagggcccttgataaaacttaaattgctggagttgaagactttgtgaaaatttaatgcattaaaatctgtascaggaatcacttctgcatagaaattgatcctgcaaattactttccttcctccataaaagcactaaaatgatgtataacttaacagatacagatgatgcataattatagattwatatgtaaggtatacgattatacacatacatgtgtatgtgcgtacatatgcacatatatgcatgcatgtatatatatgtactcagcactttgctcgttgctctgtggcttacaaagatagatgtgacacagcttctcccttccaagatgttacagtcttgtcagagaaataggcgaagctgcgcccctctaggtcccagtagacattgctaactggggtagacccggagggggttagcaacacaagaagcttaggcgtacctgcttgcccrcctcccggccctgaatccttactatagagagtcatctgttcaccaagtacaaggaccccctccccttggttttgccaaccttccatctctcccagcccttcraaatgtttcccagctgccccctggcggcgggttggtttgttttgtttcgctttgtctggtcttttcatgcgttgtggaatacacatgacaggcaagggaatttctcctttaagcttttgactaacaggtaactgtagcaaagcagctatcccctcttgctctgcttaaatgtttgaaaggagactttcaattctcaacagctaaagcataagggarattctcttagaggtttggaaccccaaagaagcagtggggtatggctctccayacactccccgcgtcttcccaagtgccccttctcactgttgtctcactaaaggcacctgcagaaaataactgactcttaatgaatgcctttgtcagtgacccgacaagtgccccttgcctggaccaagatgagaaagccagtgttacttccaggaaccccatttccatggactgatggaatctgcccctgattctgctgtcggaggcgaaccagaccctatagaaggaggaggtgattttytgagccaaaatcaaagcgcgggtgggagttctgccaatattttctttagattagtttcatgctttctactctgggagcwtagggcagkttatagtctgagtttcatttttaggtacacatttgtggtacacagacaaaaaaaaaacgtaagagagtgattcgggatcagcaaaaaggagaaagaaaaaaaaaagacgtgtctccttcactcacctgataaatcttttatatttactgacatttttgaataagtacrttgtgcccatcactaaatgtataatatttctttcattgtgcatgcatgggttgtagaagcatcctcaaagctgagaaaaacgtatgcagcgatgtcccaattctgttgtaaaaaaggactgtcacacagaagtctgagctggagttgcagagaagcaccaagctacttcctttctaatgctgggttatgcctagtgaagccaagatctcaaagctgtgtaatacacctgactcaaatgccaccgaaagacaagagcaataaatcccaaaaataaatccacataatccacctcatttaggttatattttctccttatagtagttaaagatggcgatgttcatcactttcaagaaaaccatggaactcacattaagatacgtttgttaactacgtgctcataggagtcattggagaattctaccaaattccattaaattcyggtactctgctcagtaaatagccacgaaaacaccaaggtgcttagagcaaatcctcaatcccctgctaacaccttatattacaaccgtctaattaccatgttttgcagtaaccttgtgggacttccacaagtaattagaactccagagcttttctgcagtaatccggtaaggacctcttaactacaaatgattatgcactgctaatattgtcgtgcccacgtgttttctacagttaattgtttcaattaatatttggctgcactacagaatttcatgcagtttcttatactatgacagttcatgagtcaactctgaagtcaatacatttycttcatctcatcctctctctctctttctctgcaatttgtttaaaataatcagttttctgatgagaaaaaaaaaaaagagaaacatatcacttccattaccttggtttatgtgaattcaggacaatttctctttagtttctctttaggcaagtaggttgatatctaaagtgattataattttcattaccctgtcacagaaatctccaaagagaggaaggaggcattgatgacaatttctccttggcatggtttttaaaactccattccaagcaataggttatattataggacaggggccwtgttttttaaattttcagtcttcaaagaccagcacataatacatgctcaataaatgcccgttgactcaacaagcatttgtattctgccagtgctttacagaccgcagtctctcagccaatgcttatgaatgcttgaaaatcaatcgaaaacgtttctacaataagatgatcatgagctgatatctcaacagataattgggcatttataattataattatatttgtggataagatctttgctagggtagtcacatgacagcttcagtattatacatacatacatagatatatagatatagatatatacrtagatatatagatacatacatatagatatatacatatatagacatatacatagatatatatgtctgtgcatatctagattctagatatagacatatatatctatatagatatatatgtgcatatctagaatctagatatagacatatatatctatatatacatatatacatatacctatatagatatatctatagatatacatatatatctatatagatatatacatatatacatatatgtgtatatatctatgtatgtgtgtgtataatgtgtgtgtgtatatatatatatataaatatatatatataaaaaaatagataaatgtaccttacccaactattacagctttttttgttttctgggttgatttttctccgttcttgttgacttgtctttttttgtatgtgtctgtttgagcattaggcttggggataacagctggggggattctggactyagacccagccaattagcccctacttataaaataagagtttgcctctttagcccagggtctccatctgcggatagtcccccacagctgggtctctgggaagtcttactcaattttcagttccatcttgaagaacacctacaaaagctcttcatcagagcacacacagaaggcagtgtggcacaatgaaaaggtcctgggttttggcaacagagagacttgtatttacatcttagtttcactttaggaaattactcgggcacccaggcccttatttcattagtgcaagggggataattttgcctaattcatggagagacttgtgctgtacccacaaacctgcctggatcataggaggttcctaacgaatgtgagcattttgttttggcatttcagccctgaaaatgccacgatgaggcctcgtctcccctcctggccacaggcccccacagagagctgtcacccaggatcctctgagcaagctctcaggcacagacacaagaaagtctgcaaaataatctgttcttagcttcatcatattacagtcctaattgaatacacaccaggctgcaacaatcatgctttgtgtctaattgactggaaaatactgrtcacttgttcttccagtcgggctgttagagacatcagacatttgctcagctttgatcccacctggaatcctccccttgccgtctgccttcccagggtctcctctcttatctggaaagtctactggatttcagatcctccttttcctatattctagcctttaaatagggtgttaattgtttgctgtccttaggggtcaactggagagtatacaaactgcctacaagatattcacgttccaacagcaagagaaagcatgcatcctgaccccaggttgcttggtgcccctggtcgcaggtgtggcatgcttgctcttggccataaagctgaacactttgtatcctgcttttcttcttgcatctctccttgtcgcctggttaggtcagcatcctctgaaaagactccctttccatgaccccatgactcctgggttcccctgttaggaaatgctttcagccttgctcagaactactccaaggctctggcaaggccaccacctccaggaagcctgccctgacttcacctgtccacactgagggccccctctggaaacatgtacagagtaatatcttattttattttatgttattatttcatgcctccctgattagatcagaaactcttttaagggaagaaccagatctaatgtaacttctatattataggtaatgkcttcatagtcctgtaagttttaaaatcagagctcagcattaaaaatctgagctctagagtaaaactgcctacgttccaatcctgctccattgcttacagctgtgaaaacataggcacattttaaagcttttctgtacctctgctttctcatctaccaagtggacataacgctaatattgaccttttagagccatttaagacaattgagtgcttcgagtagtgtctggcaatggtaagcatgtggtaataatgggagctgctgctggcatctatcaccgtaattaaatgagtgattccaaatgccgttgatgtggcttttgttaatctctgagccagcatctctggtggaaggtgccttcttgaacttatgtttcatttagtcacttgacaaaacgttaatggaacaggcctgcccatgcatcattctcgaagctaggagcgtcagtacagtgaaggaatagaccacgagtcaatgctgcctgggggatcttccagctttgggtccttgaccatgttaatccacctcctagtcatcatctcctattattaggaatgttaatgttattcctaattcattaatatagtctctagggcagggatctcgaagccctgggccatggagcaaccggtgctggttcatggcctgttgggaaccagcccgcacagcaggaggcacacatctcccatagcaagcattcagtgaggggtcatgcttattacagaaatggactctgttgcttctctgtgccatgtrcaacatggcctctggcttttattgtttttgaaagcgaagtgattcatcgtgtggcttaatctaaggtgcttattttggacccactgttcacatctgtgctgcatgtatggttatttggaaactgtaatttggagatctgaaagtttcccaatttgaggagcattatacccagtttgaaaaaaaaaagaaaaaaaaacagtaaataattagcaaaatagacttttgttaagctgagttatagagtgaatatttatagttggcttttaaaaaacatattcatacatataaaaatccatgagctctactcttctatgakctctgaagcagaaaccacatatacccaagtggatgaatcaggtgctgccctagctgtccctctcagaggcccccgaagtcacgagaaaaaccccagggctccgtggaacagtttggtaatcacttgtttctagcaaagacgcagccctgaaaagcacaggcacgtaagaattatattcagggaccatagggcaagcctccaacagaattgaccagacttctcgatgatttattttgtcagaattggtgcccagaatgtatacaatatagaatgatactgttggctatactcattaacatatgcatgtacttcccctcaaaagttccctttgttgtaagttatcagagtgaggccttcytcggggctcacggtgtgcccggcagtgttctagggagagctcactcccggccttgcagggacttacgcaagtgggggyggaggacaaagggatggacgtgaattatatgttgggttggagggtggtgatcattgygagataagatagaaaccaagtccaggcgcagtggctcgtgcctgtaatcccagcactttgggaggccgaggcaggcggatcacaaggtcaggagatcgagaccattctggctaacgtggtgaaaccccatctctactaaaaatacaaaataaataaataaataaataaataaataaataaaaaagctggatgtggtggcgggcgcctgtagtcccagctgctcgggaggctgaggcaggagaatggcatgaacccgggaggcggagcttgcagtgagccgagattgcaccactgcactccagcctgggcgacagagagactccgtctcaaaaaaaaaaaaaaaaaaaaaaaaaaggtagaaaccagtatagacaggcaaggagaggttgggagtgccagggcagaacagcaggaagaataatttccacattgtaaaatattcattccaaatctaatctgtggggaaaaaaaaattcatttcagccaataagttgaaacttagggaaaacaagttttattatgaaggcaatgagggactgatgcttcttagagtattacagtcttcagatatagcttagagaatcttaaactaaatattctctatcagaagcaggaaagaccaggaaccaggttggattggaaacctggactcttctctctcaacctctgcggccttcagagaaagggtgggcctggttgtcagatgagggggcgccacccctctgtgggcattcaccagctgtgtggtccaggttttgcctcctcctctgtcaaaatgccatggtgctactctgcgcggctgtgagaatccaatgagctaacttgtgaaaatgcctggcgtgattagagaggctccataaaaactagctttctttatcacttctgttttctcttcaaaaaagtgaaggggatgagcaaggcaataactgtggacactttgagcctgaaatgtccttgcatatgtgagagcttcatcaaggagagcaaccagttcttgctttccacaatgcacatgggaagaccctggaggtgtttcagggcagatgactaaaatattgttttgaaagcgtcatgaagattctcaaatattccagtgtattagtctgttctcatgctgctaataaagacatacccaggattttcccttatttataaaggaaagaggtttaattgactcaccgttccacatggctggagaagcctcacaatcatggcagaaagcaaaggggaagcaagacgcatcttacatgacagctggcaagagagagcttgtgcaggggaactcccaaaaccatcagggctgggcgcagtggctcatgcctgtaatcccagcactttgggaggctgagatgggtgaatcacctgaggtcaggagttcgagaccagcctggccaacatggtaaaatcccgtctctactaaaaatacaaaaattagctgggaatggtggtgcacgcctgtaatcccgggtactcaggaggctgaggcaggagaatcacttgagcctcggaggcggaggttgcagcgtgccaagatcgtgccactgcactccagcctcggtgacaagagcaagactccgtctcaaaataaataaataaataaataaataaataaataaataaatcccatcagatctcatgagacttattcactaccatgagaacagtatgggggaaaccacccccatgattcaattatctccactgggcccgcccttaacatgtggggattattacaattcacaatgagatttgggtggggacacagccaaaccatatcacatgggagttatttggaggatagttcttattaatttgggatggtgtaagtaacgtccttcccgagacaaagaggttgaatgcaatcaatctgcttgtgtattcaacagaggatcaccccagaccagtttgaaccctcgtggtgtgtttactgcccaggcctcatccatggggctgatactgggacaagcatttctcccaggtcagtggggatcgtgtctgaaggatgaagaacctgactgcctttctggaaaracagaggccccctgatgtgatgctctagggcacacagacactatccccagggagactttgccacaagatactttgatcctcggattccccgtccggtacaaggcagccaccttcggccttggtgtcaactcygttcagtttccttgccctgcctctgagatttgtctcatcgagtgtcttgttactcttatgcttctgttcccacacttcaattttgagggctttgaatcaggtcctcggagaaactattagatggcatgaccactgaataaatccacggaattaccctcacatgagtaccagctgttggagaaattgtctcattagctgacagatgcccttcagctttttagagtagatagacagagttgcatgaatgactgcaaggacgatgtcaaaagttggactcagcgtgaacccaggagaataggctgaattaagaatgcaaatgtatggctgtggacacactagcaaatgtgtttctttgggttaattctggcccttacagagtagttgtcaattatttgtaaatttacccagttattcttaagctaggtccgtgagtattttaaagcctctggaccatcaattcagtccagggagtgagacaattttgtgcatagggaaagcccacctgttccttggatcagaatgaaacctagcttgtggtttctccaccacacgggcctactgtttgttttttgatagactttcttcttcactgttttactaaaagttattgccctgataaattccttaatgaccaacaagtcaaaggtcttgatgtgagactctgcactgaatcagctgcaaagcttgggctcactgcctgttccacacctgtctatggcaaagctgcctgcccaagtgtcagccgttcattacagttgtaaaacccraacttgattcaactaccacatccggtttctaaatgtgttcatcaatrttgcaaacggcccattcagaattatcactggaggacgtgggaccgagggaggccacctacatgggagcagtgctggcccagaggcatatctgtctggatcaagtgattagagactgcctggggtaaactgaggcaggaagtcacaggtaaaagagccctgcagtcccagtgaaacaggtagggcaagtagcagtaacgagctgtggaaatggggtccaggcctcaggaaatgcaggggtgaacytttgtgtacgtagttgatatagacgaggacaataacatccttaggttcaaagggacaaagtgcrtatgcatagctcccattcgaggatccataaaattaatcatgggcatccaggtgctatttttaatatttcaaaagcacttaaaggaaagtatatcttttcctttgaaaaggctgcacaatttaattgaaatgtcaagtcgctttgggcagaaattgtatcaactcgtttgataacattggttaactcaggctgatctgaagtcctcattaatagttacatgtgttggccgggcgcagtggctcaggcctgtaatcccagcactttgggaggacgagctgggcagatcacctgaggtcaggagttcgagaccagccgggccaacatggagaaaccctgtctttactaaaaatacaaaaactagctgggcgtggtggtgtgcacctgtaatctcagctactcaggaggctgaggtaggaaaatcgcttgaacccgggaggtggaggttggagtgagtagaaatcgtgccactgcacwccagcctgcaggacagagcaagactccgtctcaaaaaaaagaaaagaaacaagaaaaaaaattgttacatgtgtctttgagttaaaaaaagacagaggtacagagagaaaggaaaggaaaaaaggaagaaaaagaaaattgctgaaatacggtttatttggcaaacatctttcaagtgtagcagtttggaaaagtagtgaaaggaaatgttgatggtgagagaatttaaacacctcatgccgactcttcccgactaatccgattatacacgtaagtatgaatagctattacacctcttcagtttttatattgcaaatacgttttttaaattttatgaataaaaggcacttaaaatagtgcatctcctgcttgttttaatttaattaatttatttatttttaggcatagtctcgctgtcgcccaggctggagtgcagtggtgcaatttcagctcaccgcaacctccatctcccaggttccagcgattctcccacctcagccaccctggtagctgggattacatgcatacgccaccatacctggtgaatttttatgtttttggtagagatgggatcttgccatgttggccagactggtcttgaactcctgacctcaagtgatcctcccaccttggcctccccaagtgctgggattacaggtgtgagccactgcacctggccgccctgcccctctccacttaatatacaatggagaaaatacggatccagtgaagtcaaatgagttagcttaaatcacgttaagaggatcctggcatatcaatatcttcttatttccagtaggggctttgaccagtaacccacatcatcttatctcacaaaaactgtatacctgtttcccacagtttgccttattattattttttgtcagttctctaacacttagtgaaattattagatgctctagtgtagatgcctgtgtaggcctcagcaggatgaacctcaggcagatttatggtcaatagaatatcactgtggccagcactcacatttgacttctgatttaagtaggtggttgcaggctccagccagcctgatgctggacccccacctgcaggtctaagacggatgtagaacccatcagtggtgactgcacccagggtttcggggagcagcctctacacctggtgaccacacacactagttgtcatctaccctacttggtaccaggttcaaagccatgcctctccagcatctgcrtgtgtgggagctggtggcacggggagcctgtggtgcctgtgctttgattactcagggacacattttaccctttgctatgttaccttaaagacaataatgtcaygttacttcctttccttcaatattaggtccatttcagtgacttttcacgtttataaaagctaagcctctcaccactaagatagaggacatgaaatgtgaattcagaagatggagggcagaatggaagattttaaagatgacgggagcacccctggtccttcctgacatccgatgctagaatcgtctgttggcttgaatacaccttcgagtgacaaaggtgttttcccctggattaaattcctgagaaagacaccaattcagtaataagttattcttataggtgaagctttggtgttacttttcagagaaatgaaagtatattttactatttatagaaaaatagtaaaataaagaagaggaaatcatctgcatttttaagaaaaatctacttttgaaactcacttttgaacgagagtcaaaactcaaggctgctacatttgatattgaagtcttatcaatcaaggcaggccaggttcaaataggagggctcgttaaatgaacttttccraactattattttggaggaatgcagatagaatctttccaaatggtaatagtggttcagtgagttaaacgggatgtaatatgtgatacgctggatgtaatgcagagtgttctgaaacttgagcccacttcttcttgatcagccttatgtaactagccagaaatcgcatcctgccctgaacagcgattgctttttgagtgccatctcgcyctggcttctgtgtttcctgccatgtttatggagtcatctggtatggtcatggctttgttctaggcagttttkctttacagtccaaggccctgccactcagtagctctgtaatcttgctgggcttcacttaccacagttttcaaatgggaataataacagagcctacttcaaagggttagtgtraggttttattgagttaatatatttcaggcacatacagcatygaatgccataatgtgaagctcaaaaatgtgatcatattagatcttataattcttttcgtacttatttctatccacactttatttcccttgttaaagctgctttaaagtcttatatatccttagatagttttcagattgttctcccctctccatccctgcctctgctcttcattcatgttctgtccctcatgtgaacctcagccttcgcaagggcgcccgctgtcctcatcgctccatcctaattccctcttaagggacattgttctggtcaagcagtcccctgatttagttcattcccctttaagtggattycccttgccttcctggtgaaggccagatgacttcaccaggtgtgcctggacctcgccgtcagcccctcctcttcctgtgcacctgcactcgggcctttgtctcccatttccagtatgctcttgcagaattgacacatcccattgcctgattgcaccatgccctctctcatctctgcatctctttcttctgcctgtgaatgcctccgcctccccttcactgtactccttcctgcatgagcagaacgctgagctatgcttggtcagactgtgagctccgactcacacaaaccagagactttacacagtgttgagcttcactaaaccatgtcagagactcaggccattgaagcctcagacaaaacacaaatttggagctgtgagaacaggacctttcttcccackttgggcytacccttctgacccagaatagatgaggtcttggggtttctcagacagcagggaacattcaaaatataaaacatttctaatttgtacccccagaaagttgtatatcttacatgacattctctgggaagtcatgtcttaggratcttgggttctgtttactaacagattattcctagctggatgtcctgctaaggacttcagagayaaggcttcttccttccaacaatcctggttgacaaggagattagaccaggtctcagcctccttttctttgccctggggatggccyccggtaaggggagggagtgaatggcaggytggttgcaactccctcttctcagacatgtgttgtcacagtgtttatccagggcttccacaaccgattagccactgaacaactgcagtcctaagtatgtgttctacatgtatgatctcttctcacctttactgctgctcagaaaggtagatatgattttctacattttacagacaattaaaggagtacagagaggttacataatttgccaagagtataaacagctgcaagcaggacagggaggatctccacagaagtctgtgttattcaaaagccctttctctttgataattcatgtgaacatcagccttgccatgagattttgagttctttgacaggtggtgttttgtacgtcccttacacattgtacaggcttagacttcagtgaacagcaaatgaatgaatggatgaatgagtgaaagaatgaatgaacagagacatttgttttcttcccgtgattccagggaaggatgtgctgtgttatacatagcaggtaacaggtattgattgggacttattttctgtaaaaggaagaattttttaagaagaaggatgcaaaatagatttttatagtctcacttttttttttgttttttctgagacagagtctcgctctgttgcccaggctggagtacaatggagcaatctcggctcaccacaacctctgcctcccgggttcaagcaattctyctgcctcagcctcccgagtagctgggactacaggcgccctccatcacacccagctaatttttgtatttttagtagagatggagtttcaccatgttggccagactggtctcgaattcctgacctcgtgatccaccctcctcagtctcccgaggtgctgggattacaggcgtgagccaccatgcctggccttacagtctcacttttaaaaatacagttgatccttgagcaacacaggcgttaggtgttctgagcccctgcacagttgcaaatctgtgtacaacttttgactctccaaaaaacttaacaactaatagttgattcttcattgaaaaccttactgatgacgaaaatagtcgactaacacctattgtggatgctatttgtattatataaatatcctcaagtaagctagagaaaggaaaatgttaagaaaatcatagggaagagaaaatatatttactcttcattaagtggaagtggatcatcataaaggtcttcatccttatcgtctttatgttgggtaggctgaggaggaagaaggggagaggttagtcttgctgtctcaggggtggcagaggtggaagaaaatccacatgagggggacttgtgtgtacagctcaaacttgtgtcatccaagggtcaactgtacccttcaccatgttggccagactggtctcaaactcttgaccttgtgatccaccctcctcagcctctctctacaaggggaacagaggctggagaagacacctaacaggaaggcagcaactaacactggagggggcatgtgcttttttttttttttttgcttgtttataatccctaaaattctcttgtgttggaaaaagaaaatatttttctaaggaaattgtgtttgtaagcatgtgtttaattaaaaggaaattattagtggtgatatccacattcagactattaatatttatttctgttaggtgcgtcatcattgtgatataggcaaatgggaaagggacacatgaaacttggtaaaactatgaaaaatattcagttcagtacagagtgtacataccttattcactcaggtcccactcaatagcattggcttggaagatttattcaattcactggaatttgtaaaacatcaagtgaaaaaagcaactgttttaaattttagcattaaaaactcacctatgccaagaaatttcctctaaatgtttagggaaattagtcactgtattcattttctmttgccgcagctcaacaaattaccacacacttaacacaaatgtattacccctcagtttccacaagtccaggcctgagtaccaaggtcctctgctgatcagagagggtcttgaccatcacaagactttgcgatctgcctttcataatcctgtacaggtggctccacacaatactaatctcagtatgaaaacagaaattctcactgtgtttgatgaacatattgaatgaacgtattttgggatggagatattacagctagggaagatgtcagcctaattcgcaggcctggagtgaaagcattcattgtatggaataccgtgggttgaaacatgatttttggttatcttatgactttgtatgggctggaaaatgttagcaatgtaagctgcagttcattttcagttgctttaaaatttgcaggaaaaccgaggtacagtactttataaattaacaaacatggcttgcacatgtcttcacatctgtgtgttcactggctggaaggatgatgtaaaaccacatccagatgaactttagggaaactttccttatgatacacttctttgttgtgttgtgttcttttttccattagcaaatatgtgtgtgtgtgtgtgtgtgtgtgtgtgtgtgtgtgtgtgtgtgtgtaaatgaattttcaataaaagagaggtcatttaaaaagtatttattagaagagaaaagatgaaagttattttttggagacagacttgtagtttaaaaatataagcacttacacattctgtgtcattcactttggaatacwtatatatatatatatatatatacatatatatatatatwttttttttttttcaccccctgggaattttcaacaatactaagcagggatattaaatgatccactgaccccaagtcactatttttggaaagaaatggtcagcagtcttggcaaggactgaaaattttctctctttgggatcaagctttgtttcagttaagcaaagtgaattacctcgagtcttatattctgggcaattatgtcatgacaaatcttgagaataaggcatcagctggaagctaagggagttttatctcctaggtggtttggtaatcactcccaaagtttactacctgtagtattctggctgttatcccaagaaatgcgaatgcagttgcctttcgtatctgaagatgattatacccgggtgttgtttattcaacagggctattacaggaggattctaagttaaggttcataaaccatgggcattttaacaataaaaaattaaattataaacctgcaaagggtttcatgagattatcttactcagttcttttaattctggcttattttcatacttttccatataaggagattccatagactttcccatcagttttaagacttaaaaatccatattgtcctaaattagataaaatttggacatatttttcctaggtagctagtagaggtgaagtttaactgtttgatatctttctgataataatacctcatatacccagtagcatgaaataagtgtttcattaccaatttgataaaaatccgtttttctttttgtttttgtttttttctgttagcagcattttctgaagtagaaaggcaatctttactgagaggttcctacgccctcattatggtgctgttgctccaaagggggaatatgagggcaacattagagatctccatttgtccctagaaaattctcctgaggcaaactcaatctgctcactgctaacaagtgagggtgagtccagacattgtttgcatgagaccaggtcatcgagacaatgcaaagaaccctggatgctaactgaagctcaaatagccccataaaactctgacatctttaatgtaatggctgattaaaaagaatgagatcatggcctttgcagcagcatggatggaggtgacggccattatcctaagcaaactaacacagcaacagaaaaccaaatgttgcatgttctcacttttaaaataagagtatatattttgagtaggtatttctttgcatcgtgtacactgtatgcatcttgaatgtttgtttatctaataaaagttttaaaggctttcggaaatataaaagtgaattatctccacacacacacacacacamaaaaaaaaaacctctgaagaaatgcaagctgaacaatgagaacacattgacacaaagacaggaacagcagacactggagcctacctgagcatggagggtgggatgagggagaggaccagaaaaagtacctgttagtttaggaggctgaggtggatggatcacctgaggtcaggagtttaagaccagcctggccaacatggtgaaaccctgtctgtactaaacatacaaaaattagccaggcatggtggcacacacctgtaatcccagctactcagggagctgaggcaggagaatcgcttgaacccaggaggcggaggttccagcgtgctgagattgcaccattacactccagcgtgggtgacagagcaagactccatctcaaaaaaaaaaaaatagaacaagaaaaagtacctgttgggtattaggcttagtacttgggtgatgaaattatctgtacaccaaacccccgtgacatgcagtttacctgtgtaacaaacctgcacatgtacttctgaatctaaaacaaaagttaaaaaaaaataccaaaaaaagtaaatgtaatggctatacctactgaaacatacacctttctaccaagtcgtcacagttattaacataatatttatatttggtgtgtgtatattcacaatgcagttgtgctcacaatttgtcttccatgttaattgtagcttgctgcttagacatatttagtgcttttgtttaattagccttcatttccaattgcatttctctgtcttcttcagtctctgtttatctttatagagtttaatttctgacttgtaatccatcccattcatcctataatttgccattcacatttcttcagaaatgtgggggatcattcagttttatatttccaaaagcctttacaacttttattagataaacaaacattcaaaatgcatacacggtgtacacaatgtaaggaaatacctactcaaaatacatacttttacttttaaatcttttatgctttatgttaaattcaaaataagtaaatttatttaatgatacatgtaaaaaatcttagcctgcttccaaaaaactattggttgtgtagaaatgcctacagttattatagacagtcacagagagttcagagtagcaggaaagatatcaaccatgagatgggcctaggcaatagttcacagtgttttttcagtcatgacccaccaggtgggttctggccgcacatgtgcttcacacccatggatgggtccattgtttgtgccttattcctgtaaccctgcatacagctccatcttttaaactcaacaagaaaacatatcagaatgcaacacatcagagtgcaacatatcaggattcaacacatcagaatacaacataacagaaagaatgcaacacatcagaaagaatgcaacatatcagaaagaatgcaacacttcagaatgcaacatatcagactgcaagatatcagaacgaatgcagcacttcagaatgcaacacatcaggctgcaacatatcagaaagaatgcaacacatcagaatgcaacacatcagaaagaatgcaacacgtcagaatgcaacatatctgaaagaatgcaacacgccagaatgcaacatatcagaaagaatgcaacacttcagaatgcaacacaccagaaagaatgcaacacatcagaatgcaacatatctgaaagaatgcaacacttcagaatgcaacacaccagaaagaatacaacacatcagaatgcaatatatcagaaagaatgcaacacttcagaatgcaacacaccagaaagaatacaacacatcagaatgccacatatctgaaagaatgcaacatatcggagggcaacacatcagaaagaatgcaacacatcagaatgtgatgtatcagaaagaatgcaacacatcagaatgcaacacatcagaaagaatgcaacatatcagaatgcaacacatcagaaagaatgcaacacttcagaatgcaacacatcagactgcaacatatcagaaagaatgcaacacatcagaatggaacacatcaaaaagaatgcaacacatcagaatgcaacatatcagaaagaatgcagcacgtcagaatgcaacatatctgaaagaatgcaacacatcagaatgcaacatatcagaaagaatgcaacacttcagaatgcaacacaccagaaagaatacaacacatcagaatgcaacatatctgaaagaatgcaacatatcagagggcaacacatcagactgcaacatatcagaaagaatgcaacacatcagaatgcaacacagaaagaatgcaacacatyagaatgcaacacatcagaaagaatgcaacacatcagaaagaatccaacacatcagaatgcaacacatcagaaagaatgcaacacatcagagtgcaacatatcagaaagaatgcaacacatcagaatgcaacacaccagaaagaatacaacacatcagaatgcaacacatcagaaagaatgcaacatatcagaatgcaacacatcagcaagaatgcaacacatcagaatgcaacacatcagaaagaatgcaacatgtcagaatgcagcacatcagaaagaatgcaacatgccagaatatgcaacacatcagaaagaatgcaacatgtcagaatgcagcacatcagaaagaatgcaacatgtcagaatatgcaacatatcaggaagaatgcagcatgtcagaatgcaacacctcagaatgtaacacatcagaaagcaaaagccttagaatgaagtcctcacaagtttcatcttgaacatattcttgaactatatatttttaatttgccaattttagtgctccctcagtaatcacagactccttttgacacacatcacatctgagtcagacatctcaatgagtcaggtaaaactgggttttttaactggcttaagtgaaataaggaatgagaaattgccttgaactgtaaaatggtctacaaatgtaaagttggaagacattttttgaattgattattcctctacctgaagacatttttccaacctataataatcaaatgtaataatatcttcacttaaaaatagagttgacttaactgttactttacacacatgcgcaaaaaaaaactgtcatttttaatttttaagaattccatccaaagaatttcttaaaaagttgacttttttccccttaattatttttgaccttgggttttatgtaaagcttggtgtccttttagtgttacctagtggtgttattagagttgaagtgtctaagcatataggagagtataatagtcaatgtgaataatattaaaccttcttcattaaagagcagtgatacacattctcagctgcctaagctgaatttgagaattacaatagtaaaagaaattatacttcatgggaagagttgaacaaaggaagaataattgttgtatgttaattccttctgtttatctcattcatctttttcaactgttagaattatttcagaggctttagatgtacatctaggcacatttgagtttgattttatgttggttgaatgcaggcaaactctagaatgccatgattacttttcctgcaggagaggggtcactgcgtaagaagatttgttaagtatatgctactgtgtatttttataatacaaaatatgttcctgctattaggctcctgcctggtttggcctgtttatgttttgaagaatagtggagctgggaactcatacggtggttttgccttgtgccccaggagcctacatgccatcatcatggggagcaaaatgcccctcacccctcgctcctgagggcattgctgggttcaaaagcccaaaaagaatattccatcagaagataaataaatacacacttgaagaaagcctctcctttttttcctgtgtttgtttttaaccatgagcatctattatgtgattgtgtaaaacaatattttccccccaaatttgtacagtacgtgtgcagcctggttctcctgctatatrttctactttcaatcaggtggggggcggtgacaagcccctcttcctctcaaccttggcaggtgcagtgcgagtctggtgggatccctcacacggggttttggagggcagtgtaggctaatgtgactggttgttcttgaaaattaaaagcaaaatagagaggcaagatttgctagctaaagaagacactattattggtttcattttgagaatcactcattttctgtgattaaaatttctataggtgtggaatgtttttttttttctcacattttggtaggagaaaaacaatcattctcctagctccacctgctgagaactgagagaactttaaacagatagacatcttttcaaattgtcaaaaactttcccagcatcttttagcccatgcaaagtattgtcaaagcgctaatttttacactgaaatgatgagacaaacctttcgctcttggaaattcccatcagtgaagcgaaaatgggtgatgacgggcatcttccactggaataccagaggccccagttctcaattaatttattaatttttaaaatctgtttttaataagatgatatgttcaggatcattttctggggtatggaattgggttttcttttcattaaattaatcttgttattcagagaaaagtaagtaggaatacacggcaataaataagccagtcttactgaaacagaacaaaaaagcaaaacctttttgtaagttgcatagtgacagcctttactggcctcctttattgacatcatgaagtctggtaggaataacagctaatgcaatgtcctgtgttctgatgcctgtgtgttaagttgctaaaggcagacacagaaggcttaaagggggacttagactgtccctccctgtgaagtagatccatcaacacaggatgatcacagcaagcattttaaaaagaccatacattgagcgaatccaggaagtcatgctgcagactttctctacaatcaattggatcatcttttattgatccataattaatcatttgcaagtttcttcatttgaggctgcttccattacatccttgttatctaaaagcaatcccctctcatgagcacattaggccctgttatttatgggaaggatccatcactgagttgcactgtgagttgcaggagaggaggaaggttggggacccggctcactgtgtgctctgagcactccctcttctgtccctctgcagagaaacagtcctcaggataacagcgggaactaatgcatttgccctgcaggggttggttggacggctgagaggtgtgagattgttcctccccactgcctttgtccaggacaagaaaataggactcccattgtgaagaaacgacagctagccagcagctccctgggagttatggagcccatcgccacccttggtttctcctgtgtgtgtctcctgttctcttaggatccatgacaagatccttgtgaatgaaaagatccgcctcgtccagacactacaggcaggggaagaggggaaccgagaagtcagggtctttcccctgtttctgacctagtgacaacatccaggacagaagcagcctactttcagatgtgactggccagtatcactattttggaagagccaaacaaagatctagaacaagaagaacttccttaaattgaaagaatacaagcctagattttattttcatagtttcagaaaatgagttgtgattcctgattgggagggcctatagggtcctctagggcatctctctatctgacctatcaggcatctatctctttttttcttccatgtttattatcattatctttgtttttgcctctctcatcaaatttgtatgtcatggtttttcagttttggcatattttcattttgtaaatgtcacttatgtaaatctactaagtagaggatcatttagcaaatcaattactcataaatgatgaatttatttttcttcttaccaactgtattcaaatgatggtcctagagggacattcttggattcaagatcaagatgactccatggatcactccttaggaaaaggaaatgaaagggaaacccacacttactaagcacctgccatgtgccggataacacattaagtgctttcacgacataggttactttggcagattttttttccacgtgcaacaactgaatgatctgtcttgttatagatttactctgtttacatagaataaatgccatttttactacagcaagtggtcctcagaattcttaacagtaacagagtttccagaaacacattgaatgatatgacacatctttgaatccactggaatgctatttttacatagaaaaactgtcatttctactacagaaagtgaactaaattttatttcagtccctctctgcaggaatgagtgtctcatagcagggccgcagatttacaaggtgcacattgacgagagcctcagactaactttatgccttttgatttgtgaagtgaagtcagtgccctcatttccagctgcatacgacactgccttctcctggtataatggtcattgaatgtgctgaaataaatgtgggacatatttcatttgaagggacaaaactcagagctgctgtagttaacctcctgctctgacagtatatggaagatcaaaaactcaagagcaatgaccgaggatgggagaagagggactggtccctgagaatcacagcatgtgccaggcatggtactgggatctttgccaaaatcatctcatttaatgctcatttcaaccctgcaaacaaagaattttctttattttgtggatgaggaagctaagtattaaagttaattgatcttcctgagactttggggctcagggctccaggtacctccaaaacccagcaggctctttttagtgttggcaataatgactgccacaaactgcggaaatgggtagggtgagccatgcggttagccagtgactagaagggatgctttgtgaatacctgtgctgtctttgaaatttgtaccttaaaagattcaggctcttccctgcctgtgcctttagcaaatcacttctgcatctatcatccatgaacccttctggaatctaatgaaatatttaggtggtactatctttgaagataaatgattccccacttcatcaggcaccaagtaatgtagttcttacttttatttgtcctgagtctactgccttcaatcaatttatgatctagtgaactggtctgaggttaccctrcccattgtctttataattccagagacctggtttgttgaattatttaaatgtttgcattaaacaaaatttttaatcatttgaacatttatccaccgtgttaggccgtcctgcattactataaagaaatacctgaggctgggtcatttataaaggaaagaggtttcattggctcatggttctgcaggttgtacaggaagcatggcgccagcgtctgctaggctcctacggaggcctcaaggaactttgactcatggcaggaggaaaagcaaaagtggtatctcacatgggagagcaagagcaagacagtggggcgaaggggaggtgccacacactttgaaataaccagatcttatgagaactcactcactatttgtgaagacagcaccaagccatgagggtttcacccctatgacccaaacacctcctaccaggccccatctccagcattggggattacaattcaacatgagatttggttagggacatatatccaaattatatcacccacaattaaactttagttattgatattatcattctaataattggtggggaattctagtaattgccagacctccgggtatataactggtcccagaattataaaaatgtgttcatatttttcaccctgcatgataaaatacaaagaaaaacaaaatgtagcattttagtacagaggctatgaaaattattacagcctcagcatccagaaactaaatgatattagatggctagataaaatgtatcaggctttggacaaatcaaaatttgagcagaaattgcaaatgtaaccagcagtactgagagtataatttttcagctttccaattcacactatcatcagaggcaccatccctgagagagaagcaattcctgaaagtatgaacgcttaccatatttttcaaccaggtctcttttacaaatgcagaatatgactgtcacttgtagtatgtccatacataagcttttctgcattagcacatgtatatcctttcaaatttagaaagttgcaatatccttgtatcaaaatatgctattcacgatcactttgaatcatttaacatgaaagggagctattagctcttcagccgttcccctctgcagtagcattactaggacttggcagataaggactcttattccatgtgcccgtcctttcagggacagtagatggggacccttaaatctagacattgcagactcaccaggcaagaagctctacttcccccagcatcactgaatggagaaatgttgctgaaacatctaccttcccacattttctaaaacacactcacaatggaaggagctgcttccacgcactcacagtggaaggagctgtaggtgagtgcgcagtggagagggtggtggagacaggtgtcttgaagaccgagccccctactgttctctgtcttccctgttgaggccgtgagggcagaacaggtctgctgaaccagcttgagggaagcatccacaggaaacacccatgagaggagaaagaagggagcggcaaaggcagcctgcgtggattctcagagcatggggaggactgtgcccagatctgtggctccactttcttttttcagagagtgtgtgattcagtttccaaggtgactagtggccctgggtgtaaagtgatagactcatttttgtgcaggccattgatcatgtctacagtcgtgaaagaaagtgtctgtctttctttctttcatccctgagtttgaacttcaacctctagggctgcccatggaccctgcataggtcatttctcccagccgccaacaacaggagccagaaagccaaaatatgcaagatggggaccccagcagaaactgtaggtttcccctcccacaccaatgctttccaatgcaaagatccttgctctaagtagtggtgggaataggagaggaacagagactttgggttaaaacataaacatattaccatgaactttaaaagacatgaggatttgtaataaacagtgatctgttgtgtgtcactttaatcatgtagacatgcacttttttttttttttgagagggagtcttgctctgttgcccaggctggagtgcagtggtgcaatctcggctcactgcaaactctgcctcctggggttcaagcgattctcctgcctcaccttctcaagaagctgggattacaggcactcacctccacactcagctaatttttgtattttagtagagatggggtttcactatgtaggtcaagctggtctcgaactcttgacctcaagtgatccacccgccttggcctcccaaagtgctgggattacaggcatgagccaccgtgcccagccagcgtgcactgtttaactcctaaatgaggactctttttaggagaatgggagaacttaaaggtctaagggagatgtttcaagagctaaaagtagagggaaatctttaaaggttaaagtcaggagagaaaacccaatgacctcaaaaagaaaaacttcttagagaatttttaaagaaaaattgtaaaaatgcaagaccaaacaattccttaaataagaggcatagacaaattaatgtcaaattaaaagaagaataaaacaccatttttatctcattataaaatatttttaaatgcattcaatgttccattttgccctggattcatggaatcacaaaaaatactgacaggagtataaattggatcaacttcgtggggcagaaatttgctgatatatcaaaatattgaaaatgtttacacgtttggaccagaaaatagactgttagaaatttatcctaagaaaattaccagatatgtagccagggttatgttcattgttctgtagagcgttgcttatagctgtgacaaagtggaaacaagtcagagttcaacaacaggtgctgagctaactaaattataatacagtgttaggaggagaactctgtgctaccaaaacccttcttgtagataagtatttactaatatgaaatatactaagtacaatgatattgtaaaataatgtatacattatgaatccagttacgtaaaaatcaatgcacacaaaaatattatgatatttgtatgctgggggcattatggggatttgtgctttcctgcttttcccccygaattttctatatactcagaaaatagttttttggtttggttgtggtttgtgtgcatgttgggagcagaggcaggtgttaaggtgtttaactcaagcctaaggagggttgctgagcctgacttaccagtaaaggcggagatttagaggccagtttcccagactatgaaagaaggagtaattggtgctttcaatggattccctccctgtgagtctgagtggaaaaaattagcttccaaaccaagtgcttctaaggtctttttctaatccccttttcaaaaacttctcattttatccggacctgaaagctggggtcaaacagttccacttaatctgtaaaaactgagattcacatggaatctgccacttacccaagcagaactgtgtttgggagcagtgatttttaagtgtttgaacttttttctgttcaccgagtaggggtgacaccatgacccagggaggcagcagccctctgaaggcagcagatcacggtgggtggcgtggctgacgggccatccacgcagccccagcacgggggggacccagagcccaccaaagagggccctgaacaggtgcgtccataaaatccatttaygttttctggtgtgatgggactgcataaacaactggccttagaagcctttttaaattttattttttattactttttattattttatcaagaagtaaataatcactacttagccttaaagctctagtgtcctctatgtagatctggcatctccgtttttagtcaggagggctggcccttgagcagatgcaggcacgaggaaagccatgggcaaggcagggatgctgccctgctagagaaactatgtatcccaccctcacatcggtcctaaatgcactagcaaagtgaattttgaaataaaaatgctcaaatgttctctctattctgcatattctaatgaaattgacttttacaaatcagttggtcatatttcaagggacagctttattttatacttttatacattttatacatacacagttggatcaaaatcacattttaatttgacttttctgtttagttaaaaataacaacaataacaatttatctttcccaaacgacaaactttataaacttgagggacctctgcccatggatcggatgttatgtcgcaccttcatcttattcatatcaaatgtgattaccaaccattgggaaagtttttccatgatattcctctagaaaatccagcctaagtccaaaagctttaattaaaaacagtctgtctgcattatgaacgggaagtaatgcatacttctgaaatgataaggttcacttaatctctctttactcttttggagtagaactgatygagaacaacatttgctaatttgtaaggtcaagatatctttatttgcaggatgaatgaagaaatatacaggacttaaaaatagttaaaaaaaaaaaaatagttttaaaagtacctatgagaatatactaacttcttgtagaattttctattttgaaagcaaagkgcattttcattgatgacagatatttttcttaatcatcctggttaggaaactgtacatttaaaccttcaatattattgatgaagacagttgcacattgtctgtaggatggagagccccttctcagatgaatgccaggcctcctctctgcagggggtgactttcttctgcccacctgcccccccccacctgtgcccatcagtgccctctgaaatgtggggcagatgagtttgcggtgcctccagatgtgcttccagagcagaccctgcagtgtcggggcacaggaggattgacagcattgagtcccaattcaggatgcataagttcagatttctccaggtaccagctgtgagttaccctcctgcataaggtagggagatagtagttacctgtggtagggctgctatgagataatgcacatgaagaccttcacgtcatacctggtgggtgattagctcttaatgactgctgctactcttttgaactttttaattgttgataatgttttttattattgttagtatggttaataattatcaggtggcagcacttcaggcttgtgattattcttatactttagccttaattatttttttcgactttccagtggaatccaatggttttctctgttggtttgttgtgcyrtaatcctagtaagaccaggaagcagaaccacggaaaactggagcatagtgcaaacggggaggcaaaactggagttacacgagaaagactgcagagccacggacycagtgaagtgggttagaacagcgggctgggtgcagtggcctatgcctataatcccagcactttgggaggccaaggctggaggatcgcttgaggccaggagttcaagaccagcttgggcaccatagcgagaaaccgtctctacaaaatatttaaaaaacaaaatagccatacatggtggtgcatgtctgtagtcccaggtactcagcaggctaaggcaggaggatggcttgaacgcaggagttggattagcaagggtcatcaggcagtattacatgagcttctcttatcatgataggagaacraaagacttatataagagggacaccctatgaaagatacaggctaaatagtattatattcaattcattttattcctgatttttaaatgtgcacacagagatgacttaaattatatcatgatgtccataatcacacatgatagccctagtcacatatctgaaagcagtgttgcagacaagaaagcttttgtggtacaaaggtgttgttgggtagttgctatagagactgcaagccccacaaagcctgtaatgttggttagctggtccttcacagaaaacatttgcccaccctacactagatgcctggcaaggtagtcttctgaaactttgcttgccctctcttctcctttttccttcctctcttctctctttactttctttatttctcctgcaactcttgagaaatacttaaaaatacttaaaaaaaaaaaactccattaatgaagactgtcagcacaacagggaaatctctggaaggagagactcgagaatgttggcaatccgtacccttcgctaggcgatgaggggtgatttttttcccctttcttattttgtttatctccattttctagtttttcttcaaggaacatttaaaagctgagtaattaaacagcgagcaaataagaaagtctttgtaatcagcaataatgtcaggcttattgataacagtcttagttatgagtgaagggattggaatgtaattagcctgctccatgagattatctataattgtgagatgccgctaaagccccttcactggccctctaatcatgagactcagaagatgttctggagcagttattcttaaattttttttctgcaggataacacacttgaaggatagaagacctcttgagtcactgaacgggaggaagatttaaaagccagttgcacccatcatttccagaaagagtgatatttacaatatctaataacctgtttacaacaggtatcaggccatcagagggtttgtctattatgggtgcagccttactggcaggtgcctgctagggatagtcccgaggccactgggctgtttctctcggggtgcccaccctagggaatgagaatgaccctgagaaggccacacctttgcccagcacatctctagccccctgaaattgggtggactcatttatttttttcattgactagtttccttggttcccaaggcaccatcattcatgcctccaaagaatatttgtcaattaccttctacatgcactctctagtgtgggatataaagaagtagcacccatgtcctccacactggatcagtctcagtagggaaactgagtcatatgggaattattaggcgaatgatgtttagtgcccatctcagtcttcctgcagttgcaccctggatgccagggtttgaggtgcctcttggtgattgctatggacgctccttgagaatgtgtgaaacctctcttcccagtacacaacactttgcctggctttcaaatccgttttctcatttaagaaagttaccttaattattaataggctcaactaagggcagtgaaaaaagaccatcttgaaaaatgtatcttccaaccatcgcaaggcacattgtatgaatataaaatatttataaaacggctcaattttagtgatacgtagtagctagctctggtcgatgtgtttctccccacgttctgccatgcgtctgttttgctggaaacacacacagctgagcgcttttccctctgggcatcctcttcactctcatgcacaatgacactgaggacctgagcaggctccactcaccatggaaggggaaagctgcctgcatgagcacagcgggatggaagcgggcctgggccaaaactctcaggcaggatccaagtcccacccctcgcgggcgtgacacacaggcacccccttcctctcttagaaggtcttgtgtaaagagtttctgtgtctacttcacagagttatcatggctactacaaagtataattcaaatgtgagatgttatgattgatacaaatactaatattgatttgctgaccagaagatatgaataagaatcaaagtattcacgaattaggaacaccggaagacatttccctctaccgccccaccatctccgcaatctgcttcttcctcctcatattcctgctccccacagtctcgtagacagaccagcccttggtgcgatgtcagaacacagatgtgtcttgaagcaggacccccaccctttgactctctcatggtgttctagtgtcttcacrgcmcttattatggtgtaaagttatcctgtgctatggtttgaatgtgctcctcaaagttcaagtgtggaaatgcaccagtgttgggaggtgggtgggacctttgggaggtgaagggggattcatgccattctcagtcctcttgcccgtccgcattccatcatgggctggtacagcaagaaggcccgcactggatggcctcctctcgatgttggacttcccagtctagaactgtaagaaagaaatgtctgttctttataaattatccatctcagttagcctgttacaggaccacaaatggactaacacatcctgtgtgtttcttgccatggttgtttcacatctgtccctagtagaacataagacctctgacagctgggtgttggccagcccagcctacatgacatgctctgcacacagcaattagaacacatgcccgtgttaccctccgataaccagcccacacttcagtgtgatgcttctctaattatggttaccaggctcatcttgtctttccctcgctcaagaactccaagtggttccctgttgcttattgtttctaagctgaaggcctcttcccagccgcctggtctctcatcacattctgctctggccatgccaccttgggggccacttcacctcccacgctgcccccactgcattgccgctgccttccagcgtccacttggcactgttttgtttcaccattgttggtctaatagatttcctgataattgttctcaagccttgtctgcccaacctcagtgaaaatatcttaagtacatagcctttgtttcttttccccccctcttgagacaccttgcacataaaatcccttaaacacaataggtactcagtaaatgcctgttgacagatgggcttagacatagcgtttaggtttatttgtttgtttgggagaaagaggttaacagggctgagacggtaagagcattttttttgttcatagtgcagccatggttttgaagctaccagcagcaaattgccacccacgcataaggaaaacagatttctatacatttagggggaaaaaagcactgctactttcaatgcagccagctatatttcatgccagtggcatgttggaaataaagagaaacagcagaggcccagaaaatgcctctagttcctcctcatttctgaattctttatcagcactgacatctggcaatagaatattactccaacagcaataatatgaaaagagcatcagatacaaggttgctgtgagcatcaaattaacccagtctcctctgtattctatttgaccaggaactggagacacagtggtgcttagaggagctctggggggattcaggagaggagtcggtaagatgggcccagcacagcatggtggctgtgtcgctaaaccagatccaattccccagaagagcttgttaaatatagatcacagggccccaccccagcgcttctcacccagtctgtctagggtggagtatcataatttgagtttctaacaaattcatagatgttgctgatggtgctggtgtggagtccctgagagctactgctctggcaaacagcagagcagagggtcctagtggatggtaggggagcttgtgaggactgagaagcttcccgtcattccccccagtgactggggttctgcatcagctctagaaacactggatcctctcagccacagctggctatgtaacgtcctctgtcagctgagatttaactgagcaacatcctaactcaactggatggaaactggggcctgggcaacagtggtgaacctctagttttcaccgcatgtttaagaaggaacaatgtcagtttttatttagaactagccagccaccctaaatctataaaagctgttaggaggacacatctttaaatgaacataaaactatcatgactaacctaatctcctttatttttaatgaacacatatatttgtcttgaagagggatacatattcactgagtaaaaataacatacagataaacaaaaataagagaactaagaaatacgcataatcccaccaccaagaaaaggctgctatggcgttccagatattcagaggtaattcagatcatcaccgaaagtcaggaagacaacgggattttttctgttgagtcttccagtcctgccattctctgattcaaattatatttgccttttgttatctgctacattgggttctgtgttaccacaggcagccttctaatatcagtgaatgatggacctcagagctactccgcctccaggaaggcaaaaccataaaaaagtctaatgtgcacattttcgttataaaaacccagcaatgtggactgagcggaggtgcagctgcttgtgtctttggcatgcagctgccttgtagacgaggaatgttattatctctggttatgaaagtgttttaggaagcaggcgggaaggataatggtaagaataccgttcaaatatggcatccttaagatgccgtatttgaaagatgtgcaggcatctggaagtttattgtggggatattccaatcctgaaaatgccaatttcaaggaagtaaacactgatatgtgtctttgtggggtggcggtggggaacaaaagcgaacacatctctcaccggttctgtcctgggaataagaacaagtgtcttaccatcttcattctttcataatgcattcactaatctctgtgtgttcatttgagaactgttttgtaagtgtgaaagtaaatgagaaagttgtctttgtttttctcttttctgtgtttacggtcttaaatggccatttaaaaaaagtgttttacatggagtacatggacactccctgtcttagtctgtttgtgctgctacaacaaaatgccacagactgggtcatttataaagaacagaaatttatcaccctgagctctggaggccgggaagtccaagataaagacttcagcactggtgtctggtgagggctgctctctgcttgcacgatgacacctccttgctgtgtcttcacatggcaaaaggcaagagagcctaatgcggagtaaagcctcttttataagtatctaaatcccattcatgggggaggagccctcgtggcctaatcacatcttaaagaagccatttcttaataatactgcattggcaacacctgatttttggaggggacacattcaaaccatagcactcccttctaagccttatggtgagggctggggctctctttcttcccctcttttcagcatctgagattcaccatggccatagttgcttgtcatctattgctaatattgaattacagtgtattttgctcagatcaagccactgtgaatcaccgtgtgtatccgtcgttctcacgttgccaataaagacatacctgaggctggataatttataaagaaaaagaagtttaatggactgacagttccacatggctggggaggcctcacaatcatggcagaaggggaaggaggagcaaagrcatatctttcatggtgacaggcaagagagcgtgtgcaggggaactgccctttatagaaccatcagatctcatgagacttattcactcccacgagaacagcatggcaaaaacccggccccatgattcaattacctcccgccaggttcctcctacagcaggtggggattatggagctacaattcaagatgagatttgggtggggacagagtcaaaccataccacggtgttacaaacctggagcaccctttttagagcagcataaatgtgaacaagtgagtatgagccagagtgatggacagtgaggtcgtacaaggaacagttgaaaaatgtgtgagtctagtctgaagaagagctgtggtgtaataggaactatatttggtctttgtccccagttactgtcatagaggtcctaaaaacctctggaaattttggagtgatagtagtatattttgttattcataattagccccttggataactcttatgtttatgctaatgcatttactcagggtgcaccccctagagagcctccagattggcccagaaagaccaagtaatttgaagattagagggctggaactttcagccccacccattgacctctgggaagggggtactagagaccaagctccctataaactcttgaacaacaagatttgatgagcttctggggtactgaacatgtagagatgctgcaagggtggcagctccagcaagggcatggaagctgcatccccccacctcaccctattcatctcttcgtctggtgttcatcagcatcctttataatgccttagaataaaccaataaatataagtgttttcatgagttctgtgagttctgtgaactgttccagcaaattaatcttacccattgaggaaattgtgggaaccttggtttgtagcccatcggtctgaggtacaggtggccccaacttgtgattgaggtctctagtcttgtggggctgagccctcaatctgtgggatctgatgctatttccaggtaggtagaatcagaatcgagttgaattataggatacccagttggtgtccactggagaactgcttggtatatgtggcaagtcccccccaccacyatctggtcatagaagtgttctgtgttgagtgtctgagtgcaaggacaaaaacagtttgtttttgtttttgtttttgttttccttattccagaacagatatggtggagattggggagaatctgtgagatagtcatgacatttatatacgtatatgtttttagatatttgagtcctatcaagtgaaaaagagagtagagttcatctgtgttgtttcttacagaagaacttagatccatatggaagtaaatttaataaggaacagatttatattcaaaataaaaacaaattttagaattagtgctattgaaaaatggaatgagactcctagagaaatcataagctcccaggtattggaaggtttttttgagagtctgaatggactagtttcagaagtatcgtaaaatggattctaatactggatggaaaggtgtcatagatgttctttgaggagtattaagagctaagatacggaatgtatccttatgtgttacagagtcagtatagcaacatcctaacccagcttcctgcccacatttcatccagttgaccccattgtttctattagaataacctatttgctaataacctaactttaagccattttaagtgtcagtagtgactccattactgcttgttatgtgaaattcatttacttgaggcccacatttgaatattctcccaagtgatttcccactttcaatatctggtctctgttaccataatgctaactgagttgttacctcmcctcatgtattagtcagggttctctagagggacagaactaataggataggtgttgtatatatgaaagggagtttattaaagataattgactcacatgatcacaagataaagtcccacggtaggccttctgcaagttgaggagcaaaaaagccagtggtgatcaggccaagtcccaaaacctcaaaagtaggaaagccgatagtgcaaccttcagtctgtggctgaaggcccaatagcccctggcaaaccactggtttaagtccaagagtcaaaagctgaagaactaggagcctgatgtttgagggcaaaaggcatccagcatgggagaaagatgaaggctggaasactcagccagtctgctctttccatcttctgctgctgccttattctagctgtgctggcagctgattagatggtgcccacccagrttgagggtgtctgcttctcccagctcactgactcaaatgttaatctcctttggcaacaccctcacagaaacacccaggaaaaatactttgcatccttcaatccaatcaaattaacactcagtattaaccatcactcctctcaactttgttcttctaaatttctcctttctgccaatctaaatgtatttattattattcaaatttagacaaatcttgaattctgaagcagttaaacctcttttccacatatgacgacttctcttctgacacattctgtatacacacagtcatagacatacaatgcatatatgtacctttctatatgtattaattcatgtataatgtatacatgcatcagtgtgtatttttactgtagtaacaatgcttcctccatttrcattaccatcgtgctgctttctcatcgttatatgtatttccctttcttccattctaacagtaaaactatcaaaggcaggaaccagacctgtaatgtcttttgtccttggaatgcttttcatgtttttcaacccaaacaatgatacataatgaaaatgatcagatgatatgacccctctccttgtgcctatttttttaagtgtctgaaaagataggtttttagatttcttatctagtttgtctttcagatcaacgggaataagaaatatcctttctccatgtctacaatcaaatggaagaaaggaaggaaaggggaaaagagggtaggagggagaagggagggagggagtggggaaggaaggaaggaaggggtgaggaaggaaggaaagggaggaggaaggaaagggagggagagaaggaaggaaggaaggaaagggaagggaagggaagaaggaaagggggaaggaaggaaggaaagagggagggagggaaggaaggaagaaagaaaagaaggaaggaagttaagcaggcaggcacattcaagattcaagaagcaagaaaatgtcttatttcttgctgtgactcctgcggacagagcccggtggtgagcagctagctttggcttgttggcagatggcctagaacagttctctagaagtgtagaagtggaatatgtctagacctctaacagaagactggatcatcaaatcattcttatgatgtttaaatgcctgtagaacagtgagcagtcatatacacatgcacacagatatgcacacactccatgcctatgttcttagcttaaaactgaggatatgaagaagaagaagaagaaaaaacatacaacagatactccttgacttatgatggtgtcatgttccagtaaacccatcctaaattgaaaatatcattaagtcacaaatggtattttcaacttaggacgggtttacgtggatgtaaccccatgggaagtgaatgagcgtgctgaaagcattacaccatcataaggctgaaccatcctgaggcataccatagtaagtcagggaccatctatatagctattgttttaaggatgacataagattatctaggttctttttttttaaggatgaaggaattgaacaattgacaaagcttcatggggaatttttccctctcttttctgtaggtttttttttttaattggaattattccaatgcttgtcatttttggttgtcaaatatatgcaaataccaattttctgagctgagttacacttaatcatggaagccatttaattagaagttcacccagaaagctcactgaaatctccatgaagcactgactgttgaggaagagtgataattttgcttatgaggaataacttttctaatatatttgcgtttctacaaaaatatttatttatattgtgctatattccaaagacatttaaggtatcttggtaatttgtatgttttggggtaattttattcatccttaaactttrtcttagatgttttacatatagaattcttatataatgcttaaagcttaatacatggaaactctgaggttatttgggatttgagatttaatggagacagcaaatcaaatacaataaataaagggaaataacaggtgaagtgtttggcttttaacagtctctgctctttattcagattattgagtctcatgatctgctattaaccaaactaaatacatacccagttggcccacaattcttctttcaaaatgtagtatttgtatgcttagaacaaaggttagaattgtactcctagaggttaaattaatatcaaaatttccacgtgaattatttgttcagactttggtactttacaaagtatgtgttmtgagagaaaagcaagaaatgtttctactttttctctgaaaaaagagctctcatgcacaatcatataaaattaattgagtctgataaattcatgttagagtagaaataaaaatatatgccatctaacaagttgaatgccagttattttcatttaaagtaattaaaattgtattttcagttgaagtgagaaactttaaattattctcagaaagcagcatatatacattgcaattgtagcagagatctcctttcccaagagtatttggattactattttatttttaaaacatattagctcctgcagtgttttataaatgcctctttatatcttcctcaacctttaaaactaagatgtccaatcatttatccactagtcatatttaactctttaaagttaagtagaaattaattaaaattaaacacaatttaaaattcacgtttcaagtgctcagttgtcataggtggctagtggctgtcatgctgtacagcacagatgtgtaacctttccttcactaaaagtgttgctgcaaagytttgcttagattcttcactttcttgaggacagagactgggttttcttcacctgggatttccagcttccctcgttgcatygggcaacattattcgtagccatgtgggctctagaaaccagctccactgcttacaggcaacctggggcacgtcgctgcatcgttctaggcttgattttctcttttataataaaattaatattttcctcacaaagttgctctaatgatatatgagataatctagggcataaaatgcagaacatagaaggagctctttatatactagctgttactgttgcttgtttaattattttgaaaatatagtaagtatctgttgaaagaacggttaagtgaatgacgttcctgttgcaatgtcactaagtccagaaatacctcccccccatacacagaatcctccaattttctataatgtttctcctttttttttttttttttctgaaatcaaccaaatctacagaaccttaaagaaaagaaaaaggtaattggggcagtggtaaaatgcaaagagaaagagtagtaatatttacaatattttggatgtttaaattcacattaaagttttataattccataaaagaaaattattgaaacactagagtagacattataaaataaatgttccctaagttcaaccatcagacagtcatttttaaggattttttaaaaaattcacaagcttctaaaaacatagtgtttcaatgccgtatgcacaatttcatattctggtcttctcactaaacttagtatycactaattctatcattataattttttatattattgagaagaatcatattcatagttagaatcagacacttaattccagatgctaggtatgattctagacactaaaactattatatcattaaatgagggcaacatactccaaaaatgaaatgtgagttttgagatagtcattttcttgtttttgaatatttagatcatttttagactttcagagaagggcattattaaggagaatttctaatctataaatgttaagagccagtaaccaacagagtccttttggattcattgtatgtttgaagccctaggaagcttccttgcctggataaaaaaagcagcaggcagtgacggaggtgtaggatgaggactggtctgctgtcaaattgcacaggaattagagcactgaattggaaagtctgatcttaaaagagagtacaaaaattaaatttgttaaaatcgaaaactgcctttgaatatatagttgaagcatatcccaaataaaacatctctatcccactaatatttcaatgatactactaagaattttttatgctgattaaattactgctgttcaaagtgggacatttaaaacacctgtttagtgtgtttgttgtgtcgaaaatgtaaaaataacactttgatgtagagcatttatgagccatccatatgtgtgggtgtccatatggtattataaattttagaaagcatttctttcctattggagaaagagattcttcattaactcccaagggaccactcatttgatgactattgttcttttgccttagcataccggcgtttcctcaacgcacaattatgatgtactctattgattatagcagcaacgacctactcagaattaatctgtctttctcttataactgtacagattcattaaatgtaaccaaccttccattttattgctaacattaaaatgtgtaaataacacaagtaaccacatttccaagggttatttttaactagatggtataatatccccttggaaattagctataatgttgaagtcaatattttttaaactgaactagcattgcttcaaatctaccaaacacatgtataaaaccgacaatgagacaggaaaaattgaaagctttatgagaaatatgtgactatcagaatttggaccatgaaaaattctataaagtttttcgatatcgcttttcctaaaaatacagttttcttgcctttcctaattattgttaaacagcattaaaaatttctctttctggctgtttaatatttctttaatgtttaagaacagaataaatgagtcagtccgggtgtggtggctcacgcctgtaatcccagcactttaggaggccgaggcggttagatcacctgaggccaggagttcgagaccagcctggccaacatggcaaaaccccatccctactaaaaatacaaaaattagctgtgtgtggtggtacacgcctgtaatcccagctcctcaggaggctgagacaggagaattgcttcaaccgagattgcgccaccgcactccagcctgcgtgacagagagagactgtaaaaaaaaagtcacctggaatactgcaagcacaggttccaatgctgcttttctctccttgtctttcgtttatcgattccttcctgcgtgccagttgcatcctagaacagatgagtaaggcaccmttgctgctgtcaagaagcaaatgacagtgaagcaaagcttgacagtgtgtccgagatgcattttgagaggcrtgaacccggggtgttatgggrgcaccttggtgggcacaagacccactgaggccagtcagcgacagtttccttcagaaaggtgactcctgagctaggtcctgaaaagcgggtgggatcttgcatgggcaaagctatgctggtgagagagggcacagaggtgtgaattggtctgtggggcttcttcagatgatatcccccagggatcccgtgaaagccatgacagcatccagttgatgttgagtgcattaggacaggatgaatcgaaatgggtagagatttgttaggtagaattgaggatgtggggggaaaggaggggaatgaaagtgggctgcaatgtgtggaacagcgaagggccacattatctggtatgcaggggaaagagtggggctactggaagcaaggctagaaggactgatttgttccattccagtgacagcaggaggagcatatgattagtgtggtggtcagtgaagagccattgaagagttttaataatgacacggttggagctctgcattagtaatgtgaatctgacaatggagtagaagctaagaaggtacaacaacataggggtatgcaccagtagaaccacagaaatgcagagaatgagaatggacaaagaagcaaggtttacaaagaaacctttgtctaacctggtaaagcgtcttccatctgtccctttagcttggtacggtatagttagggacaggtgcctcactgggaactttactttcattcaatgcagccagtgaacttagtacttttattcccattttacagatgggaaaactgaagagacagagaattattatatatcaaggacctaccgtttatcattagaaatttcaaatatttatctctattaatctacatagtaaccctttgaggctgatgttagaatccctacacagacagtccccaatatatgattatttgactttatgatggtgcaaaagtgatacacaatggttgaaaccatacttcaagtaccartccaaccttgtttttcactttttgtacagtattcaataaattgcataagataatcaacacgttattataaaacttgtttcatgtcagattgttttgcccaacttcaaggcagagtaagtgttctgagcacatttaaggtaggctaggctaagctgtgatgttcggtgggttaggtgtattaaacgcatttttgacttatgatattttcaagttacaatgggcttattgggaggtaatcccattgtaagtcgaggagcctctatatatagttgaggatctgaggctccagcatatcaaacagtcatgcccacaataatttggataaggggatgcatgactccaaagctcatagtcatcaccagtgaattccatcctgtgttgcatgctggcatcacccagagaacctttaagaaacgccagtgcctattctcaaccccaaaccaattaaatcaggatatttgggatggagcccaatcatccacattctttgaaaagtcccctgtagattctaaagcacatatgtaactgagaaacgtggtactgctgagggaccctgaacaaccctctttatagctgagcagatgtgaagtatgatggaggaggaagcatagatcattgcaacgtttgarccctgggtgatgggaagaatcatttggatacagagaaagggatacagtcgggaagtcagaccagaggactggtcagaaatgaccggatgaggcacttttgggcttggtgtggtactgcacaggctcagggagatgaccatgaggcagctctaacctaggtggggaaccggaggacctgggtgtgcagattttctgcttatatttgacagtttgtaaagcccttgatttagatgagacctgtgggacaagactgtaaaaagggcacgaaacgaatcccagagtaaccagattcagcgggtgagataaagaagaaaaaccaagaaagctaattttcagggagtggataaaatctaaggtgaggtttaagtagagaacacaggtaaactgacgaaagatggcagcacgagtcagagtatgaggggaaattaggttagttagctgagcggatgaccaaaccagtggtggggtattttagtctgattcatggggggaaaatagtccaacagctggagagaatacaacctgagactgccttcatgcactcagcaagtatgtactgggagtgttccgtcttctagatgccacacaggctctgctttccatccctgaactaaacaaagatgcatgtcctcggccgggcgtggtggctaacacctgcaatcccagcactttgggaggccaaggctggtggatcacttgaggccaggagctcaagaccagcctggccaacatggtgaaaccctgtcttaactaaaaacacaaaaattagccaggtgtggtggtgcatgcctgtaatcctagattcgtgggaggctgaggcagcagattcacttgaacctggaaggtggaggttgcagtgagctgagattgtgccactgcactctagcctaagtgacagagcaagactctgtaaaaaaaaaaaaaaaaaaaaaaaagagagagagagagagagagatgtgtgtcctcatgtggtttacattccagctggtagaaactgactagacacatacaaattatgtaaataggactttagtttcatatgctaaggttgtagaggggagataaagtacctaggattgagagaatggattggagaggcattacaatgtttattaaacaaggtggtggttggagatttccctgaaaagtcaacatgagagctaagcctggcagaggtgaggtgggaatcgtgtggctgtcagggaatcactctaatgctttgtatgattttggattttctatgtatacaatcttgtcatttggagtctttagtgctctgcatctttgccagccctggtgttatctggcctttattttatccattctaatgggcatgtagtgatacctggtcaggactttaacttatgtttcactaatgactagtgatgttgattgtctttccatgggcttatttgccatttatatatctcctttggcaaaatgtctgttttatcctttgtttgttttttgtttgttagagacaaggtcttgctctgtccattgccctggctggagtgatcatggctcactgtagcctcaaactcctaggctcaagaaatcctcctgcctcagcctcccatgtaactagaattacaggtgctaccatgcctggctaattttttaaaaattatttttgtagcaataggtctcactagtttgccaaggctggtctcaaactcctgtcctcaagctatcctcctgctttttatccatttttaaattgttttcttttttttttttttttactgttgaatcttcagaggttttcattgtttatatatttaaattctttggtaggtacatgatttgtacatattttcttccagcctacagttagtcttttaattcttttaatagtgcctcttgcagatcaaaattggtttattataataaaatacaatttatcaaattatttctatggctcatgcttttggtatcaggcctcagaattatttgcctaactccaggtcatgaagatttttctcctgtgttttcttttaacacttttacatgttttacattttacacttatatcttctaattattgttttattgtggtaaaatatacatagcctaaaattaccattttaaccacttcaaatgtacagttcagtggcactgagtaaattcacattgttggcaaccatcaccaccacccatctctagaacattttccatcttcccagactgacactcagtacccattagacaccaattcccctctcctccccctccccccattctctcatggtcaccatcctactttcttcctctatgcatttgactactccaaggaccttatataggtggaatcatacaatcatacctatttgacctttggtgactggcttatttcacttagcatagtctttaaggtccatttgtgtcataggctgggtcagaatttccctcttttcaaggctggacagtattccattgtatggatgggctgctgcagatccagtcattcatcagtgaacacttggcttgttgcttccaccttgcatttatttttgaagtcctaaaaatttatctttttacctaattttggtagaatttctcttctctcatcttccgatggcatttttactattatagaacctaatcttcttatgtgtctagcagtaaggcatttatattttttaagggatcatgaataactgaaaacatgaaatacatattcatttaaaatgattataaatatagatgactagatcattctgaaacagaaagccagaattaactgttgcaataaatcacaataagctaagtaaaagtgcagtagcatcattggtttggcactacttccgtggctggccctaagtgtatgcggcttgtcaaaaatatacttcccactggcgaccacatgaagtttctggatgcccgccattcaaattcccatagatttttttgggatacatgctatttataaataaaggtatttctgttcccataatatgtttgagacgtagaatgaacataatgacttgtaatgtctcttgaaatactaatttctaaatttatgtgaaatatatacacaacaaccatgtagcatcataattatttaccttggacagaatttggacgtattttgtgtattcaagccacattgatctatactagttaatacatatgcctaaatttttaattgattgtctggcattgattatgacactgaaaagaatatggttcaatgatttattattttgtaataggttaaatgtaaaaactacagatgatgtaactgaaaaatccatttcttatggttacttttaaatttatatgaattggttgtgccctaaataaaatgtttatcagcaattcatatctgaggtataaaaaatcagcaactttcattttacattattgttttacttattccaagaaattcaaagggagtgagagagtaactatgaggacatcacattctaatcactcacattttaatcacccacaaatgaggtcacacataatgggtcacacacaatggaaactgtgtttcaaaattgaaaggcatatcatctctgcttcaggctgagcatgctcctgtttaacccaaggaagaactctttcctgcacagtgagccaagtacagggacaggcagaagatcaagaagagtttgttgtgacattttcctactttggttatttcagttcctatcacctttcttaccatttagtgatcaacgtgtatatttacaggaatgatggactggcacaagactttcctaataaatctcaagggttgtttttctaactctataaaatgaagttgtctttcttagatatgctatatctatacagacaaacaaaataaaacaccaggcagtcagctgctacatactgaccatgtaaccagcctacataatttgaaatataaccttcattacaattccttttgggggtcccaaattggatcagatcttcatttcatatttctttggctagagtgtaataagaccaggtttgagaaaatgacacagtagactgcaatttcaaattccaaatgtccttatcctaaaacactacagggaagaatttctcaggaccaaaatgtcctctcagtaagaagttgcttttggtacaaatggaagtttaataagacagttggtcacctagtttgaatttcttatgttgtgctcacaggcaggaaacaaatgtttggtttggttttagttggacatatccttaaatttactccaggaaatggggaagttgtagcctccaacagctaaccccattacctgatatacatcaggtccctaatcagatctgaattgaggtgaccctgtgccctggaggaatactggtaagtaaacagggcaatgtaattgagtggagaagtgctgatgggaagttcagggtcttctatcagggccactgaagccaaactttggtgggagaaataattggactttcccaagaaaacaacatgcagctgaggcctaaagaataagtaggaattagccaggatcaaagaggttagaaggaaagttttccagaaatagagaacttctaataagaagaccccaaatcaaggtgaagtagggtatgttgaaggaattaagaggaattagtatagccaaggagagctggggaggtaaacgagggccaaacaggcactgcaattggaaaagaagatggaaaagatgttcaaagatggggaacatggtgtcctactagatggcatctagtagtgcagtgattaaagggcttataacagcaacaaaggtgggaaccaaaggaagacaaagcaggtcaaggaagattagaaatacccatgactgcagaccctgcaggccactaatagtgtccaacaaaggcttctaaagctctccaaccaattcaaagttgtagataatggacaggagggaaaaacaaaggattatgtaatttggaaatagttgaagtaactgcacatgttgaaagtgtacagtctgatacatgttgttgtatgtacacatcggtgaaaccaccctcaccatcaggacggtgaacttctctatcacccccaagagtttcctcatcctttgtaatcccttcctctgacacaaccctgtctttccccatccataggcaaccactgtgcttgttgtcaatgcagattactttgcatttcctgaaatttttattatataaatagaataatacaacctgtactcttattaggtctggctttttatactcagcctaattatattgagatacacggtattgagattatagattatattaaggttatccatgttgtaacttatcaatggaatagttcattcctttttattcattcttttggagacatttcacagtttgttatccgtttacctgttggtggacgtttgggtcattccactttggaactattaaaaataaaactgttatgactatttacaactttatgaacatatggtttaatttctattgggtaaatacttaggagtggaataactgggccatttggatagtgtatgtttctattttccaaagtggttgtaccattgtaccttcccactagcagtgaatcagggttccatttcctccacctcattctcaacacttgatatgcttcatgttttaaattttggttttattctaataggtgtggttttaatttgcattctcttaatgactaacgatgttgagcctcttttcatgtgctcatttgccacccttgtatcttcttttgtgaggcatccattcaactcttttgccactacttaattacacttttattattgagtttttagagtgatttctatactctagttacatgtcctttatcagatacatgaaaatattttctcccaaggtaaaggttgctgtttcagtcttttaatagtgtctttcaaggagcagatcttttcactttgatgaagtccagtttgtcagtttgttcttttatggatcatgcttttctcttctgttttctgctagaacttttatagtttagtgttttacctttatatctattattcattttgtgcaaatcagtgggaatcaaagtttatttgcatatgaatatcaaattatgttagcattacttgttaaatatactgttttctcctgacagaattgcctttgtacttctgtcaaaaaatcaattgtccatatatgtgaggttctatctatgaactctctatccttttgtcttgatctattctgtttgtaccaataccacattattctgataattgtacatttctaataagtcttaaaagcagatagtgttagttgttcagatttgtccttttaaaaaaacagtttacatattctaagtcatttgcccttccacataaactttagaatcagttgatcaatttctccaaattaggatttattctaactactgtggtttcttagacaaatttagactctaggcattatcctgaataaatatttgtttcaatggatgaataatttacctttgcttgacttgtatagtatttttatgtgttggtgttattttctccattgtaaattctccaatttgttgatctgtaaggcccattatcctactatatccttctggctacatgtagcctgtctgcatatttgtatttggtgtgattttttttgcatgttgttgacattttaaatatatagatctttaagtgtaacttgaagtttaggccattgttatttaattgattcactccttcaatctaatcacaatttaatttaattagtctcatattagaagcttttgttggattttgacccatgttgtatgttttataagtaagcatgtttctttactaaagtgttaggtgtgaaattatggcccattaatccaagacatgaaaagaaacacttggaaccttttataagggtaattgttgggagtaatgaatctataaatacagaattgagggaaaactaataaaaatgaaaaataaaaatgtaaaatggcctacatgaacatggaccctgacatttaaaaaattgttccacaattagaaaatgccagggattgattttcagtaattgtccctccttgatgtttaattaaagagtattttcaacttaaaggtcatggtgaattgagttttcctggataatggtcaatgacaatgtgtttgaaacagatattgaacttaccaatggcttacaagattagagaagagaggcagggagacattctaattctgctattcagtcctggggagagaaagaatactgttttacatactatcagttcagaggagcaaattaaccaacaacaaagataaagaacgttgagactagagactgaatttgttggactttatgagagggcaagcttacatttggaatattttattgtaggagcccaggttgtacaggggctgtgagtaaagagtgctcttactgaagcaacagcctgctagagcacagttgctacatagagaaagagatgccttcatctttgtagcttttcataggaagcacgtaattcacagcaaatattataatgtgtgcattccatgatatcattgtctttccttctctcctaaaagttagagattacaaatatcagctcttcaaattccacattaccagaggatgagtttcaagaaaggtgtcatcccaagtggagaatcacttatagtttccttatttcagatactatattatgatccactcatactttgctgctaagggactaacaggctacttcacacggagccacacagacagaaagtgcaggatccttgaaaagtttgtgtagtttaaatgaccctgaggtgctgccagatccagggaacactgagaacagggaagctacattatgtgcaatgaatactggctctgtgcatgtgatccaggcaatcaccatttcaatgaaagaatgtagggcttacatgttctctttagtttctgagtcatgcacagttctacctacaaaaaatcagcaaatcgggaagttggatgcttagtactgaggctgactgagcatgcaaatatcattttttacaataaaatcacaaagtagtagtgcatttgtgtgaatagcatgaattagctaaatttaacatacatattcctatctatggtgcttctgaaataatcttaacaataaataaaactttgtaagagggtagaattagatacttgaaatgcactgattgggttatatatgtctagatctacatctagactcacatgtatgcctgcatgatactgtgcaagctgttacagaaatagaaagaccaacgttagcctccaagttgaccactaaatatatgttattaccaatagccttgaaactttgcagaagaatttaggaatatccttagatttagatacgttcctcaactggacatctggcatgttgaaaacctgagggcatgaagtgaatggtctagtctacttttacactgtagtggggcatttaagtaaattacatggtacaaaacagagttcttccctttatttgttcagcagattttagttcagcagagtttagaaacttccaaatatcccgtccaaatattttaagtcataaaaatagggtgtcaaccctgaaaggacatttattcaggatcaaggccttgaagaatggggtctcttaactatgggaaaaaaatggttttccaaaattctataatgcttaccatttccaagccctttttatctactgattgtcatctgactctctgctagctatttaatatcttctctttcatgctgtatcctggactgggtcttgtgtcctatagcttcatcgctcttctaaggagagatgtatgtaatgctttggaataatgagagacgtatgtaatgcttggatgttctatgcagatatgagaatgcatggcctgtttttaaacacttcttcagcctctgtccgccacccagtccactatgtaatcagaaaagtatttctcatcgtctatttgcttaaaattgatcacgctatgatctaagctcactcttcctattttctattttatggaattgaaaaacacctcctcactcttttctctgtaaatgtcctgtgctctcatgattgactgtaccgtttccaactttctcttccagggttttgtccccattaatcctcaccctgtctctcatctttccctctagcagccgcttctatggaaagatctcagacttacaggaaaagacttctgctctacaaagatgtccttgccttctcagttgtctttaggttcctttcaaaatggttcagactcttcattttgtggagttaaggctcaaaatgcaacacttttgagtgaggttaccaggtaaacttgcattcactttgctggtgtaaataactgagatcaggcctttgctgagaacacatgtggatttgggaagacactgagtgcccaatagggtggttactagtacaccaagaagtgggcaaagagcaacaaaagtgttaggagcggaagaaccccatttacccctggactggacattattagatcaaaactgctttctctgtcatttgttcatcattatagaggaacctctctcatttcaggtagttgaaaacaattttcttggctcccggtatattctacctccatggttcttcctttgagcttttccattccttttgtagccagttgggggcagtgctaatcttctcaattctattgcccttaaccaaggcaggatataatcagtcattaggcaaaaccgtgtcctagtccacagtcctggggctggtagggatgtcagaggccacctgggttgacctgggagcctgtagcctgtgactacacagggattggcaggcttcaatgtagattggaattgcctggggaggtttttaagaaatgccgatgcctgggtcccaccgaggacaattaatgatgaggtctgggcatctgagtttagtgaatgcccaccaggagattctgatcccgcagtgagtgtcaagccacwgttcgggacttctaagtactgggagcccccacttcacaaagctgccaattctgttttctacacagcacaactcagctgagaattcttccttagtttgcattgaaatctgyaactgtcatcctcatgttagcaaacagggagtctgtcacccatacggtccasgtgaaaaagtgggaactttaaccactgattccaagaagattcactatttgagaatccaaaaagggatttggacagttagatagatgtgcatccagttcttagtcaaaaccgagtattgggatgtaatggacatgatgtgattgtctggaatttcttatttaaggaaaggtgggaaattccatccttttctacagttaaaaattaaaaaaaaaatccatagtgacctttgcccaaataaagaggggtagggttatttcatagcagttataaattgcacactgtgtgcctaattgcttaaaaaaaaamcccaaagggtatttacgttatgtatattgtaccacaattcaaaatttaaaaggacaacattatgtgaagtgcatctgattggtattttactgttttgatttttttctagtcagactcagtatacagttgatccmctatgatgggttacatcatagtccatggtcaaaatctttttttcttattattattactattaacaatctctaattcagtgctgtaaactatggatggaagaaataatctggtaaatgaaggatatcaaaagttctctgtaacctttgttgtgttgttgttaaatgcaaaggggctttcgtgtgtcaagcagcaacgtgctgatgcaggtctgattctaagtgctgtgttttagagaatgcttgaggtaacaccattcagagttttcttttctttttcctttctgtcttttgaggatgtccttcactgaagtacaaggacatttacaaggatttctaggcttctccatcactgcttagtgcctgtggccaatctatctgtgatatacggtaaatattttcccttgcaggaaaagggcttagagctatttctctgcattgattgagcacattagactaatatttatccatttgaaactttgggaattggccatacatcatttagtagctgtgyacccattatgaaaagtaattgtatattagtatttccaaaaatttacatctggggtagaaaacctgtcaatcacaaatgttttcgtgatgattacattgggggaaattagaattgctcatgataatgtggttgttaattttaaaagacatgtgacttttccaatattagaaagaaatgagagggtttctaatactttatttcaggatcattttgaaccccagagctatggcctccacaactcctattgctggtcataattgtatgtattgttcagcagagacacataattttgggtatctctttcctgagaattgaatataaaaaaagtgcccaaacttgccaactttcattccttggtccacctgtagtcaaccatcacctggctgggtgactaagtcacatacattttccccatgaaggaaatctgataagataaaacacccatactcctgtaaagaatggagggaaaaaaatacaccatgatttatttttagataaattaaaagacagaaaaaatctatctttcgaacaaagagatctatgttggtattgccctgtgtgccatttaaaatgacattatattggttttcagaaatatttagggctagtttttcttctatgttttataagctytttaaattatctcctttttatgtttatgtgtttttttaattctaaagacatctatttttatgatcagaaaaatatttttataatcagaaatatattgtgtttaaaatcaagaacccaaaattaccaggattgctaaattttatttaaaaatatgtggtaatatccatccacttttttcttttttttttttgagacagagtctcactctgttgcccaggttagagtgcagtggtatgatctctgctcactgcaacctcagcctctcaggttcaagcaatcctcatgcctcagcctcccaagtagctgggattacaggtgtgcgctaccatgccagctaatttttgtgggggggttggttttgtttgttcgtttgtttgtttgttttgtttgtttttatagcagacacactttcaacatgttggccaggctggtctcaaattctcgacctcaaatgatccgcccccctcagcctcccagtgctgggattgcaggcgtaagccactgtgcccagcccacccacttttcctatagtagcttcttatctttttctaatcctatagtcattaagatgaaagcttttacttctaaaactgtatttacagtttcccatcacaaagatccccacgaagagcagaatggcaagctcacaaaaaaagactttaaattactgcctacttgttgtctttgaaatcattcaagttttcgaggtaaagagaagaacatgtgcttattttatcaaccaaaagcaatgacgtgctcagtggtcattagaatgggaattatactctgggggtttaattttacttttttgagtgtttctttaaaaacttagtaagaaggagttgggtttttactattttttttcctcttggtatataattttaaaactaaagttattctggttattatttcccttagagcacatatttccatcttaaagtagcgctcccacaacttgagcattcagagtagaggcaaatttggcgtcagtgtttgccatgcaaaacccacaccgatattcaagtttcgcctgcatctttatttccattttcccttatagagtgtaatctgttgacatggagagagaggcaaaacataagcagttggagagagataaaaattgagcacaaattcaggatagtccacaaatcggcaaactcagaaaacattgtattcaaagtgtgtgatgacagtgtcatcacagattctgtctttgctgtttgcccactcgctaagtcttatttgtaaccccaaaatcagtattccagacgcctttaagatcttcatcaacatttgcagagcaacaaagtttgactcacccaacactcttgctgtctgctgtggatgaaagagcaatgctctgccttcttgtttcagctctcatgctatgaacaaggatgtccttttcatggcctatttagtaccgtggtttttacatttttgtgctttttgttggtgatcttactgtttaaaatgccccccaagcatagtgctgtctagtattcctaagtgcaagaaggctatgatgtgccttgtggagaaaatacatgtgttagagaagcctttttcagcatgagcagataacctagacaggctccagataatctctattcaaaaacagagatgcagaaagtcctattccccatgttaagtagattctccttcctagatatttgttaggctttcagccccagcacttcttgatccccaattttagaaaaagtcttggaaagcagaacttatgggttagagatatagtaaaagtagaactgaacctgccatgaagcctggcaaacccgggtgagagctgcctgcaggggccttgcttcggaagaaaagattagacccaagaggctgtttttccaggcactgaactcaggaagtgagaggttagggttgaagcctacaaaagatccaactggtagactgcagtatgtggaagagatggaggtttctaaagcagtatgttaaggctctctggagaaacagaaccaataggaaagatagatggattgaggaataggtggatagatggatagataggaataggataggggtgggtggatggatggatggatggatggatggatggatggatggatggaaaggaaaggaggacggatggatggacggatggttggatggatggatggatggatggatggatggatggatggatggatggattgttcaatcgatcgatacacagatagatagattaatagaaatttattatgagaaattggttcttgcgtttatggaggctgaaaagtcccacaatctgccatctgcaagctggagtcatacgaaagctgctgatgccgtttgaaggcctgggagctggagagccaatggtgtgcattccagtcagagtctgaggcctaagaactaggagtgctgagggcaggagaggattgatgtcccagctcaagaggtcaggcggagggaaaattcagagttcctctgcctttttgttctgttcgggtccttagtgatgggatgctgcccatccattctggggaggccatctgcttttctcaactcaaatgctaatccagaaacaccctcacggacacaaccagaaataatgtttagccagatatctgggcaycccatgattttgtcaagtggatgtataaaattaaccatcacaggaagttaacagtgagtcaggttagaaggctctttaagtccaagccattccagcatcttccagattcttcctcttgtaaggactctgggatgtgtccataatggagctcagcctgctgacattagaggaaagttccaattcaaactctgtgtctgtgggattgtaaatccctgctgtcctttacacaccaaactctcaatggccagagtgtaaggagggtgcgcagcagtgccttccattgccaggacagccctgactgaatggaaaggcaaagacaagacagtaaaaagtctggtagagagagtgggggactcacaccaaggcacagagtggtgtctccctataatgacctcatgttttaggatccaccttacagtgtaatcactggtggcatggggaagttagagcatggaatttccatcttcagctgcaaaatttatttttcttaatcatttaattctaaattaaattttaaaattctggccagctgcggtgtgtcatgtctgtaatcccagcactttgggaggccgaggcgggcgtatcccttgaggtcaggagctcgagaccagcctggcctggccaacatggtgaaatcccatctctactaaaaatacaaaattagccaggtgtggtggcacctgtatgtaatcccagctacttgggcrgttgaggtaggagaatcacttgaacctgggaggcagaggttgcagtgagccaagatcgcgccactgtactccagcctgggcaaaaacagcaaaactcttgtctcaaaaaaaaaaatttttctttatagaatgactttcacattttaaagaaccctcggataaatgattaagctgggcgtgaaaactgtttatgtctaaagaggacatctagcatggaaacccctagaaatgcattggccagggacactcagggcatgctggcatgggaagcaagatgcgcccactgttcccaatgacccagcgatttcttggcatggaaaataatcacttttattttaaaaggttttgacagtccctacagggtgctgaacagtctagaaattcataaatttgaccttttccttcagaatgattatataactaaaatggctaagctaaggcaaaattgtgtgtgttaaggttaatcattagaaaataaaagtgttagcaatagaacgaggtggcatatggaatatgacagaagctgttgattaaacctgatatgaaaacaataacttttaggccagccttgagggaaccgggatctgggttcactttgtgtgtgtgtgtgtgtgtgtgtgtgtgtgtgtgtacaatttaattctctctttgatgcaagcaaacaacaaggcaaaacttgaacacacagtgaatgtactttagggattgccaggagactatgaattaaatagaagaaatcagggagtgctatattaaatttctctttgactgagaacagattatcttcataggctttgcactcaaagaaataaagttggaaggcaataagcttccagtttcccttggtgatctcagtcagctctgcagactaacctctgaatgaattggcaatcatttctcggaagcagaggttgaaatttctgtgtttccttccatgtccacgtcaaggacaatattgagccttgggccacacaagggcagctgttgtctgttgggatgcccttgcttcagaacaaggtgcaccagacaaagagacccacagcccacctcagcccatggaccttcactgagtggtgaacaagagcaaaaaggtgggcttgtcattcccttctttattgcctgtttcactaacacaaatgtaaattccttgagtgtaggtgtgtctgactagttgctgttgtatttgcgccgctatactagtacctggccatcacaggcattccacaaagactcactagaagaaaagtcccatggaaacaagagcaatcatgtttttagtagcagcaaatttgaagttcataaaggaatgaaatttatgttttaaaaatgcaatagtctttttatgtaaaagtcttgataagcctagagtttaggacagctttttaatggaacccgttgctaggaatgtccaaacatgagagcataggctcttccccatgttttgggagcccagaatactccctttggtcctgttgcatgctatccacagggaaaggagaaagtcactatgctgccacttcttccggaacagccaaaaggacgactttcccatgatggtcctggcactgggggtgaaaatgacctagccattcactaagtccccactgatggtatttattcatcatttgcagttggtttgtgtctccttcacttaagatccagtctaattcacggaaaagcaatgcagcttaaataagaagatgagttggaagtgacaagaaggctggtttgggagcagagtgttgaattgcagggttgagaattgcgggggaggttgaaagactgacgagggaaggaaataaaattcattctgtgtggattggagatatggaatgaaaagaaaaaaacaaaactaaagaggtagcagggaacctaaggaaagtatgttgggaaacaatttcttattacaattttacctttaacattcttcaaattaagtaagtaattaaagcagagtgtactgcagctgtgtcaaggtttccatttgaaaggacagacacaacaggatatgactctaaagacaggaaaacatgtttaatatatttttaatagatatatcttggcccggcgcggtggctcaaacctgtaatcccagcactttgagaggctgaggcaggcggatcatcaggtctagcagttcgagaccagcctggccaatatggtgacaccccbtctctattaaaaatacaaaaattagccgggcgtggtggttcgcgcctgcagtcccagctactcaggaagctgaggcagaaaaattgcttgaacccaggaggcagaggttgcagtgagccgagatggtgccactgcactccagcctgggtgacagagactctatctcaaaacatacatttttttttaatttaaaaaaaaagatatatcttattttgttaatgttgtattctttttttttttttttttttttttttttgagatggagtctctctctgtctcccaggctggaatgcagtggtgcgatctcggctcactgcaacctccacctccctggttcaagcaattcccctgtctcagcctcccgagtagctgggattacaggcacatgccaccaagcctggccaatttttttgtatttttagtagagacagagtttcaccatgttggccagactagtctcgaactcctgacctcaggcagtctgcccgccttggcctcccaaagtgctgggattacaggcatgagccaccgtgactggccagtgttgtattctttaaaaaagaggattgtccattccatttctactacccaaacatgacttcttgattctattccattcaatggaacactttttcattctctataaagtgcacagcaaggaagaagctataagaaaccttctctgtcttcagtgagtttactttgtcctggaggaaactagccagtaacaaacaactccagctccaaggtcaggcgtggttcctggtactgtagggatgtgtgcagtgtggggccatggaggcacgcccttgtggggaatggagaaagtttcctaaggagatggctgtggtttgctttgaatagggagtctgggctaagtgtgtttgaagtcaaaggaacaaaactagcaaagatacgaaggcagacattccagggtcctctcggagaatataattcctaactcactggagccctgtgtatggataggaagtagtttgaaagaagctggaaaatcttggcaacagactctggggatgtttaattcaaatctaaggagtatgaaatttattccgtagatcatggtaagccactgggtagattggacccataataacaaaacttaataatattttttctgtgatttatggtttttaatatttactaagtgtcaacaaagtgtgaagatttataagagcattatagtgtgtatgtaattyytacgcaaagggtttattggttgatctatgtagataagtaggatgtaaacatatgggaagaatgaggggaaagtcagatgttctgtatcatgccacccacaccatttaccctagccattgacatcacctggagagctatgaaagtattgctgaaatcccaccaagtgctctaggcatccacttataaaaatggagaaccatggctgaaaggtggcattgataattaaatgctaatgacctgaactcaggaacttcaaagctgatctcaaacttcttatgctctcaaatttactattttctacaaaatcatgaccagtcaacaatttacccactcttttttttttttttttgctgttttctactttttactttttatgagtgtgcagtatttttgtcattaaatttaaaaacattgtaaaataatgcttatatttacataagtcactagaagcaaaacccatcggtgatttggaaacatatgatgagccacaggcctgggaccggggtgaggttgctgaggcattggcctggagtacaaaatttaagggggtatcagaaacctcagtgatgaagagaagtaatatatgtattttaagaccttaatttgttacagcagttttgggttcacagcaaagttgagaggaaggtacagagataccccatataccctttgccctcatatccatcatacatgtgtagtctttcccattattagagtccctcgccagtggtatacatcaggggtccccagcccctgagcctcaggctcgtacttggctgtgacctgttaggaaccgggctgcacaattactgcctgagctccaaacactcttttaaatcaatatttaatcgttaggtttttgcactatatagaaagagagaaaccatactagggcccctcatatgtgtaaatttgagcatgataatcacatactcatgacctgttagatgtctgaaaagggcttagccagtgggtcattactaataagaaaacactatctatcaagttttcaagctggggttgaaaataacgtttcttagttgttcagcaggagcagtgcatcctgttggatctgattctggagaaatcatgcgatgggtctcaagtttcttgcaaggcactagggtcatctggtacatgtgagcagaacgtttgtggccgatgagaatttgcacaatcctttctatgcagatcattccagacagggaggagggcagactaacagatgaagtagaaaaaactgccgagcaagagtactggcaaacctgtcaaaatttaaagccttaaaagaattaaaaaatttaaaaaatgaatatttttacattagaacatagaatagaaatattctgtagaagtatttgatgttctaataggaaaaaaaagagtttttcagttgtttccaatagtcaatgatatcatgttaaccaccagtcttgaggacaaactgatttcaagttccaaagctttctgatccctcatctaggaattttaacacaactgctgatgaaatagatggagatgtggtgtaagagatgcatggcctctcctgttctgaaaagaaattcacttctcagttgtttaatgatgctttgaaatctgtaaaatgctgcacaggaatgtttttttttttttccttttaaaaaagcactttctatgacctaaaatatagactttagtgaaataattgttgttttatcattgcaactcttatttgttaaattatctcattttaaaatatgctttaaaactatagatatttacatgtgtctttagaatggtcattatttccaggtcatttctctatacattttctaaatagtggacattttttccctctaataggtgataacagattttattggtgttggaataattagatattatacaaagctttagatataacgtgaatatacttaatttttcttcacttctatcatgtgacataaatttcttagtcaattggggagaaaggctgaatagtgggcagtgattgataggagccaatacatggattttcctcttattaaatatttttttgagattgggcacggtgggtaactcacacgtgtaatcccagcactttgagaggccaaggtgggaggattgcttgagaccagcctgggcaacatggtaagaccctcatctctacaaaaaaaagttgtaataataaataaatttttttaacagccttaaaatgaaaattttttttaaataaatttttttgaaaaatgttttctccaagcagacatgatttgtaaacaatcttagaccactttcaagaataactgtccaacatctttcatctgacatcttatttctttaaaatgagaaacattttaattattttgaatatatctttttaaaatacttagaatatattcacatctttacatttaaatgtgggtgtttccatgctaagattaaaatccaccttctcccttttaccctttgttttatgcagataattcagggatatgaaatttaagtgaagaatttgtgtcacctttgtcagtttttaaatttcagagccctatattctctcatttaaatcatggcagctgtcttctcgctggtgtttttgctgtggctctttgtccacatcaatccttctgtgccactgctatccctgtcttataatgcccgtctcaccacaccccaacagcctgcctacagctatcaatatggccatggtcacagcagtaagccttcttcaatttcaggagtccttagagtatgttttccatgtacccaaggacagattcactccagttcgccccacaccaccctgccaagcagcacaggtgctcctgtcaggtctgacttacaagcgttcaggtgctgccctgtcaagcgctatgggtgcaggtgatgtcagagctgctggagccacctggagctctgagctgaggggagaggaaagggattgagagaaagaggcaatgktcttcccctttgttcgtcttctgttaaaggagtcccagagatgcctagctcttgccacttgttttacaattagaatggaaattgcttctcagacttttggctaagatcgagtgcagattagaatgaaatgattcttccccattttgacactccagtcctcttttcccaggacccagacgcgtctgggaaactggaacaagagagactgagttgcaatcagtgggctgctgtcagcatcccgacccttctctgcaggtgaaagctttattgctgagtcaacaccagggaagccgtccttcttccttcccttctgcctcctcataggcccaaaggacctgctctactacgatgtcagatttcactcagcttgggcccttgccagatgagtaaagggcacgtaggtcgtgccatgcatgctcctccctaaaaactgctgctgctccttgttgcttttaggataaaagaaaaatgtgaggagccctcaccaccgccaggcagaaaacacctgtatcttacagttgtcctttccgtgagctgcccagcagccttgccgggagacagtgcagtctccattgggccaccgaggtaactgaggctcaaagcagctcagggctttgctgggggattggggtgcatccaggcatctgctcaccctctactgtgtggtgcagggatggttcttcatgctgtggccatgttctgctcctctcgcctggcttcccaccaggcctcgcgtcttgcagagcggccctctgctccctcccatgttgccaagtgtttccgaatgaaaggctgagaaaccacagaagacaaaagagaagctgtttgtttcacctccagggcccttctcctgaacgcagtgcctgagaatgccccccatctttctccacccaacccccttgcactctaccctcaagagcctgctccccgcagcccctccacaggaggcctttccccagctccgatctcactcctgcctctgcccagggtagtcttgttcctcagtcctcacaatgcaccctaaccatttctgtacatgttttggtgagttcaaaatttaaaccacaaacttaaatgtgcaagaaatgccatacttctttagtttcttaaaatcaaattaaatctgactcttggctgaccagcaaattccatctcagcattcccggctctcttttcctccccggcatcacccaagcctcagggaggcctctatggaatcygaaaaatctctggatgttgcccttttccacacctgtgtgttcccaagtggttgctccactgctgccatgcccagtggagctgcctcgtggggcccattgggcagccctccctgtggacacctggccacctcccatgggggcttccagggagctgagcccagtgcgtgcagagcgctggtcctttcttcctcttttggtatctgccgtctttaccctgtcctctctcttcycctcacagccactcgtccctgactctctctttcctctcaggagtccaggagacttggggaactgcggctttcacagaacccaggaggcggtccctggtctatctgcaggagccctttgctcttggcattgcagacgtcctctgcacaggtacaaagggctctatgccctttggcatgaagaacgagaacttcaggtgaacacagtgtgacttagtacattatctggccacacatatctgcctaccccttgggactgtgagctccaaagggcagcggcaggtcctgaccacagctgtgtcatcggccatgcactgtctgacacagggtcctccagtgagtgtgtggccagcaaaagctccagcgccacttgagctgcccgtcagaaccaggagcgaagccacctggcgtcaaagcacagtgtggataatggctccctgcaagtctcattttcaaataaatacagaaatgagcattgtaggaaatcagatgctattttaaatttattgttacttgtaaccattgaaatgaagtatttctggatcaatacttccaaagacaatcaggagaaaaaaaaaaaagatttacttggactctttaaaaagagttgcaattrgaaaaaggtaaaaatgataacttaagttatttttcctkatcaagtattttctagagatcatgagaagaaattccaaataatatttagttgctgacaaaartacgtcttttgcattttggccacaaaagcatacccatctttaaaaacctattaacaaggctgggtgcagtcgcttaggcctgtaatcccagcactttgggaggcacaggtgggcaggtcagttgaggtcaggagttcaagatcagcctggccaacatggcaaaaaccctgtctctactcaaaatacaaaaattcactgggcgtggtggcaggtgcctgtaattccagctactggggaggctgaggcaggagaatcacttgagcccaggcggtagaggttacagtgagcagagactgtgccactgcactctagcctgggcaacagagcaagactctgtctcaaaaaataaaaaatttaaaaaattttaaaaactcaaaaacctattaccagacatgaatcacattgcttttcaattctgccctttttccactttgtgactttttgcagttgtattaaagtctttgatttagttttatacatttccacaagtaagctgcttagtacctttccatgttgttttaggaaaagaaaaaaaaaaaaaaatatatatatatatatatatatatatatatatatatatatatatatatatgtatttcaggatgttttcagagcccaagcattgttggccagacacctgcagtggcaaacagagacaggcttgtttctgccccctgagatgaagtaagtcttctcaaaaggtggctctcctttgcactctaatctaatgacaactaagattttaaattagcacatgccattttaatactcactgtaacattcagcagcatgctcattgcattaatcaaaatgttaccttattccatccgtgaagggcacccctcatttaggccactactcaaatggacgctcgaggacggcctcagaactcggccattcacaggatgtcaccaccacacgctgccccgtactgcaaggattcacaattgctttggataatagtccatatggagatatttatttgtttattaaggcgtgttaacctagctagcaattggaaaatagaattgttctgcagatttatgtcctgtaggttaccgagtcagcctaattcatcacaaataccaagtgctctaattaaggagaaagggggaaatgttccttcacatcctttatgatgtgttgtgcatttccatctcttgatcgaaaagtttatttagaacagcacaatgaatcctagtgtctttgcccagcaacaaggccaattgtactggaattgtcccacttaaaaatggctggctctggccagggcacggtggctcatgcctgtaatcccagcactttgggacgctgaggcgggcagatcatgaggtcaggagatcgagaccatcctggctaacacggtgaaaccccgtctctactaaaaataaaaaaaaggtagccaggctggtggcaggcgcctgtagtcccagctcctgggggggctgaggcaggagaatggtgttaacccaggaggcggagcttgcagtgagctgagatcgtgccactgcactccagcctgggtgacagagtgagactccatctcaaaaaaaaaaaaaaaaaaaaaaaaaaaaaaagctggctttgaactgaaaacattttttctttaaatcctgtttcttaaaaaaaaaaaaggggggggggtggttctattataaaccaaaggtacctattattaaaacttgcttccccattttccagtacttttgtactgtctagagatgtctaggttggtgtttaaaaaaaaaaaaaaaaaaaaaaagacttgaaactccagcttgccaagaaagagcccaagcgggaagtaccttccgaggctgtggtggagggagggaggcctaactaggacattcccagtccttgttgccagagtgtggggttcctcccgagtgtggctcaggggtcagaggcgcgctgtcccaggtgtttccagcctagctcagtggcctgaagcagaccctcccaggatttcttccaggccagtcttgcaggcgtctttagcagccccaggatacagcctccctggaatgtactggctttgaaagataaaacactgtatctctgcagtattagtcctataggcaccgaagctgcagtagctactcagaatcacatctgccaggcccaaacccatcacttggcgatgctcctgaaatctctgtcctctattcaagctagaagttgagtgaagggtgactgctcatgatgtgccgctgtggcatcagacactctcatctggagctgtgctggttggcataatctatttatactatgtttagagacatgtgcacctgcacacacawgcatgtgcgtgtgtgtgtctgtccttccctcaaatagctcaattcacttctcctgggggtcaccaataagcatcgtgaaatgggtgtgttttttctttatttgttgccatgcctgaaaattaatttttaaaaataaaatcaggcacctaggctgggcacagcggctcatgcctgtaatctccgcactttgggaggccaaggtgcgtggattgcctgagctcaggagttcaagactagcctgggcaatgtggtgaaaccccatctctattaaaaatacaaaaaaattagccaggcatggtggtgcacacctgtaaccccagctactcgggaggttgaggcaggagaattgcttgaacccgggaggtgcagtgagctgagattgtgctgctgcactccagtctgggtgagagagcaagactctgtctcaaaaaaaaaaaaaaaaaaaaatcaggcaccaaaataagagtggaatttaaaggttttttgcttaaataaatgccagaattgatatatgacctgtatttataaccaaggatacatgaccatttctgataactttttatgctcttaatttgtggtaagagctttacacttattatcttatttcatgtttacatccactttgttaataccattattacacttgtccccattgtatagaagaaaatgaagagcctcagagaaattaaggaattttccaattctcatacagctaggaatggtaaagccagaattagagccaggatcttatgggcctgtggttcaccaaaaaaaaaaaaaaaaaaaaaaaaaaaaaaaagtgattcagtattgttattaccataaaatctcagataaattgtrttctaagcccaaataaatgtcttttatttcttgactcttactttaaagagtaagagtattttaaaaacaaaataccattcaaaatagagcttttctactttttgccatttaaagcaaataatttgcatttcatggtgaggttaaggttatctagacagtctgaaaaccatcatccttgactatttacaaaatagccaacactcctggaggcagttcttaaaagattttttgcccagttcacttcagtacaactgaaaatttgagtccatgagtagctggtttcacctctataacatattattcttgtttactggttatttgtgagtcacagtgaaggagaagttttcattttcttttagaaacactgattcaagtcaagcaccttaatgttagtcaagcttgagatttggtaataacatctcactttctccacttagtgtcctgaggttgatgcttgccattgagaaattttttaaaatttcaacctcaggatcataaacactgtgttcaaatttcagtgtgctatttggcgtcagtcatagaagttcccatccaccagtgcagtgtgtgtgctgccgaggtgagcaccagctgccagcatagaaggcacccttgctccgtctacctcattgggaggtcacagcagtgctggcttcgtgctaccacttcacagacaaggaaaccaaggcttgcagcagtcagtggtttaccttgggctgcatggcracggagaagccgacactcagttctagctcatcagagtccgcatttctatttgtgatatcatacagtgtcatgtgacatcatgtgataccatgcaaggcatcagtgagtaactgcatctctcgcaaygccacttcccccatcttcacccccctcaccaaacacttctccaaggctaagatttcattgtagagaactattgattctcttctatatcactcctacttttccagatcggaaaatagataatccacttgtatcacccctgtttcctggataactcacctagaaatggtctaatctgtttacatctttttatccaggtgaaaatgccttagtgaaaggcatctggggcattttatgacttggaaaatcacaagaattgatgtaaaatagagcagaggagccaaagcaaatatatattcattaagggctatttgcaattatagtgagctgagtggttttgtgcattctccttgaacatgatgaaagaccgcagattactctagcatcattgcagacaaagctacttaaactactaattacaccaccaaggagctgtttttttctcatccctgtagtctgacagagccaactttttttctcagaatgttattccctgcttgtgtctcaccctgtccttcagaattcaatcagcatgtctcacagcagcaccctacatgaaaccagattgctggaaagtccccaaaacaggccagcctttgactaggcctgccaatctaaggcaagggtctgcaggcttttcctgcagagagccagataatattatgtattttggattttgcaggccatagggtctctgtcccagctactcaaccacgctgtcgcagcacaaaaggagccctagacagtccatgaacgaatgagtgaggctgctgagttccaatcagactttacttacagacactgacatttgaattttatattattttctgtcatcatgaaatagtattctttgaaattttttcccaaccatttgaaaaagtaaaaaccattcttagatcagagccagtttgctgacctgagctccaaggcattttagctggctaggaaatggctgggctaggaactgctgcaggagctttctttaccttgaatcattgatctaytgaactccagatcagattatgcaaattaatgtagtgggtccctgattaaaagagactcaagaactccttgttggagagacattgttagatagcactacatcctacttctcttgggtggccaagtacgaacccaggccagcatctctccttcatggcccacagtttctagtggcaccagagtgcagccaggggctgcaggcttggaagatcctggagtgaaagagaggacaggaattgtttaggaatcgtagtcactgccgagtactacccatttaggactcagagtgcctctcagaggtcacataattcaggaaactggaaggaaaagataactcaagacttaagcagagctcttgctacatgtgacctgaagcagcctcacctgagtgctgcaaacactatttacatttcaaatgcattttcaaatttacttttatggctactctcagaggtgtttttaatacatgtaaagcacaatcttcacaaaaagccttccgcaggaactgtaaaaaatattttatgtctttatttctaaaagtcctttgtaattccttgaggaccttcttgtgaggaatatagactacaggtcatgatgtaaaggaagaaataagtggaatagtaggttaggatgtatgagctggggaatataatgaggagaaaaagacaaaacggcatagtaagcagcaagagagcatataacaggttgacaaggagatgaagaagattcattcttgctgctcacaccactgcccgtgaactcagatgccgacacccccagaagtaaaatacagcatcacagttgtctttgcgtttttatcagacagagttattaaattgcctgtttcataacacaggtgattatcctctctataaatgctgcattttattatcattataaaggatgcatttgttgtttctctgcaaggatacaagcgctcctctctatgtttccatggagactacaccaggatctagtactgggcactcagacatgataccttatgtgaccgtagttagtcggtgatcttcaactaccgcagcccagggagggaatctgttgtacatttcctctgaggttgtaggccacaagtctttccaaatactggggagttgggtttcaatttaaataaaatggttattgagcaccagcyatatttatgcattgtgctcagttctggggattaaaaggtaatagagacacggcttctattcttcagggatgtatgactccaggggaaaagaatgcctggagaatgaaaccagagcaagcccttgtgtaagtttccaactgtatctgtcttcttgctaaggcaaaagtcactggaggtgtatgacacccagagctaatcaatagcaagccctgggcaaaatacggtgactgtcaagaggcttgcccacaaggggctccttggcgctgcctccttcctacccttgactcttcatcatcccagtagacactagccccagagggcagctgtgcagagaccaactcttctacttgtacatcaaccaaagacaatagaacagagctgtgactttagaaatacatattttatttgatcagagctgagatgtcacagattatatgatgtatcttttttgtgtattcctctaagaaggaaaaaatagcatcagttctgatcataaatgtcagtgttagggtgatgggtacattagaagcccaacccccacaattacgcatgtaatatccatgaaacaaacaagcacgtgtacctcctgaatctaaaatttaaatttttaaaaaattatarttctaagatgctgtcaattgtatgatacattgtgatttcagggatgttaaaatgtgggaaaaatgtgcattttaaaataaaggaaacataatcattattggagtaaatccttgaacagccaccarctgtggttaacctaatagagactataggagcagtaatgataatgcagatgagtgtggtaatttaaaatttacagagcaatttatttaaatttatttatttgagatactagattaaaaataaaacaattatacagcaaagccatcctttgacagccagtctactatgttgacagctgataagccttcagttcatacttaggatacttcatgatattatatgatcttgtggttcttctttaactcccagcccagaactcagtctaaacgttgtgattccctggggcttagtcttagaccccttctccccctttgtttcttttttcccagtctgtattccctccgtaggtagtcttatccttgcatcaytgacttaaatactcaccatatgctgataattccaaaatgtatagctttagctccaactttacccttgatccccaaaattaaacctctagctgccaccctgacttccccatagttcctaatggtgtctcctgcttcataatgccaaatatgaatgtgtgatccttcttttgcttcagtcatcatcacctccataaatggacacaagcatcatctccaagttaycttgactcctctcttgctctcacaccacacatgctacctacccatcagcaaatcctgcagacaattccttcaaaacaccttccacaatctgaccatggcttggaccgtggcccaagccaccatgggctgtttcctggattactgcaacagcccccagctgatcttccacctccccacttctctgctgcttctccttccagcctggtctccaaacagatgccagagcagtcattttaaaattgaagtcaaataacgtcccaactctgctcagactccaatggcttctcagctcccttggaataagccaaagtagttaaaatgggtgcctggccaatgtgccctggcccctgctgagtcactgccatcctttcaagcctttctctcaaacctcaatctgcttcccgtcagggtcttgctcccttgttccttctgcctggaaccctttcccagtttccagaaggctcacacctgacttcatttaggtctctgctgaaaagcaactttatcatcagtggtcttctctgaggacttgcctccttctccaggcattcccagcccccaccccgcacacttatccccatgggacttgggtttccatgtttgtctcctgcggtgtgcatggtgggctctgtcttgccttcttggatgagtgtgtgtgagggtggagaccatctccctacgattcactctctatccctagtcctcaggggagtgccgggccgagtggacagcattccagaagtgtgttctgcacgggtgattatgaagttatgtggctggattcactgtgtggttcatcagtcctgttgctttatagttatgaaggatctcatcagtgctggccgagatccttttcggttgtgcatgttccattgatactgtcatttgatgcctggtgggtaggaaattcatagaaaacactttayaataatttcaattttggatgattctagaataggtcagagactcaagagttcttgtgaaataaattgctcatagtttagtacaggaaaggccttatttcatcgtattttaaatttttgttttgttttgttttgtgtaatggagtcttgctctgtcacccaggctggagtgcagtggtgtgatctcggcttactgcaacctccacctcccgggttcaagtgattctcctgtctcaccttcccaaatagctgggattacagacatctgccaccacacccagctaatttttgtatttttcatagagacgggttttcaccatgttgtccaggctggtctcgaactcctgacctcaggtgatccactggctttggcctgccaaagtgttgggattacagacatgagccactgcacccagccatattttaaattttaagttgagaatatgctgggatatctttaagattaatattagaataccatatcatagttcagtgaaaagcttgttaaaatgaataagaaataaatctctacattatttatagttattaaaattgtgtttagacatttacatgggcataaagttttattatctagcattcacatttttttaagttgacatatggtgaattaatggtgttcagggtttggggttttattttcctatcagaattacaatacaatttatacatttagtatctacacgttatctgcatctcctgtcttttgttggaaatcagactgtgctgcctagagtttagggtggtccattgttactcatataacctgcaggtcgaataatttaytagtgtggttgatttgtcttcaagagttaccaagaaagttgaactcagcttggcatgacatatcattgctgcttaaacaaaggaagtgtgtggaccgctccaagcaagagtgaactctrtcgagttcatgagatttcactgcagtttccagaagcgtcggctaccactgtggagccgcagaactttatattagtctgtactaaatctgactgagaccaaaaaatgtgtctagaataaaaccctcgaaaatgataacaaacagaggacaagacaaccaagggactgggtaataacattaagtgatgaacacagcgttgtttattctggtcaacattacattttgtctcttctcttttcagtttatgattacatgctctggaaagaaaaaacaatgatatacaaaacgataatcttttaatacagtctctgaaggaccatgcttgctttatgactttgctctttccactagtcttcacttttattggccggccagttcatgtcccccatccagattactcaaattacaaacaggggaggaactacggtagcccgtcagtcatactgtggaatattgaaaatgtcacatccatccagcatcacacttaatttattgatatatggagcattaaaatgttgaatactccgactcatagcctggatgataacagaataaagaagctccatgccgcggatgtgtaccccagaaggtgacaatgcagccggttgcagtggggggtctgagcccgtcttatttcagtgtgaggtgctgtagcctctgttaccatgacatgaggttcctgggacgcatgtaccattcagactgtcacgtcagcctcactgccaacactaagaaggaggtgcactgctgcctattcttagagatgtgttgaaaatgcagcagaatctcttggtttattatgtttctgagagcaagacacaagcccctccccatgcaggtatcccatctgcgcccgggctcagagagtcctgctcacagaattagattttagattcatgttgtcaggagccaaattgcattattttttagtgcttgagggaaaaaaacaaacatgaagaaaacacacgaaaaaacacttcatttcctgttatgggtcgaattwtgtcccccaaaaagataatgttgaagtgctaatccccaacacccatgaatgtgcctttatttggaaatagagtctgtgcaggtgtaatcagggtaagataaggtcatactggatttggtgggtcaaaattcaatgtgactggtgggttttgtttgtttgtttgtttgtttgtttttgagacagagtctcgctctgttgctaggctggagtkcagtggcattatttcagctcactgcaagctctgcctcccgggttcaygccattctcctgcctcagcctcccgagtagctgggacaacaggcacccgccaccacgcccggctaattttttgtattttttagtagagacggggtttcactatgttagccaggatggtctcgatctcctgacctcatgatccacccgcctcggcctcccaaagtgctgggattacaggcgtgagccactgcgcccagcttgactggtgtattttataagaagagaagggacacaaagacacagagaggagactcacatgcatacagaggcagagatcggaatgatgagtccacacaccaaggaatgccaagggttgttggcagccacccgaaaccacaagagaaggtggaacagatttgccctcagagcctccagaaggaagcagctccaccaacacccgctccagaactgcgagaggatgcgtttctgttgtttctagccacccagtttgtggctgtcccacaaagctaatcacgtcccttcattatctcctacctcctctcctaaagtcctggcttgaacacagctgggctctgggaagcgcacagaggatagtacccggagagtcacttctttgaagccactctattgttctatacctgccaacacccagggcttcaaaacagaaaagaagttatgaggtcaaaattgtgaaatacttctgccacatcgcttatgtctctcagatcttcagtcatctctaacacacattcctatgtcactggatgccagactgagatccagagactcttgaaaaccaaaagcttcccatttctcagggcccgttctgcaaaggggcagcatgctgggggctgagagcctgtgcgctgcaggctgggctcacgtgacccccactgctgctgctttccagctctgtgacttcagttacctggatggtgaaacgggactaatgacatcactgcatccagatgatatgagttaatagatggaggctcctcacaccacatgtagaaacagtgatcatcccacagtcagctgttgttaccaacactgcagcagataaaagcatgatcagtccttcactttcttctgggagttgagaatccctagtggttgaagcagaagaaccatttttaaagagacgtaaatgaacctgtctctctgtgtggtaagacaggttacatattgggcatgctgacccttgaagaacaatccttagtgaattttgcttccattacattggaacatcggaaacatacaatgctgacattaataagatttcacagtgaaacccaagggatggtcattttttagcaggtggtgttccaagcccagccaaacattgctgtggctgcaggggaggcactgactggggctgacccctgtgtgcaaattggatggggaggaggaagctgtcccatgattaaagtagctggaggcggtcactgtgaagatggtgtcttggtcccttcaggctgctataataaaacttaataaactcagtatcttacaaacaacaacatctatttctcacagttctgggtgctgggaaggtgctgggaagtccaagatcaagacgctggcagatttggtgtaggatgagggcccacttcctygtttgtaaaggattgtgtctttttgctgtgacttcccatagtgaaagtggcagatgagctctctcaggcctcttctataagggcactaatcccattgatgagggctccacactccaccctcgtggcctaatcatctcccaaaggcccacttcttaacatccccataatggaaattaggttttaacatgaattttggagggtcacaaacatgcagaccatatagcatgtggagaggagtgccttagtcacagtggggtagaagaaggtcagtggggtagaaccagtggggtagaagcaggtcacaggatgtgggtgagatagacagctggcctcatgtgagaagtcactgtcaccacaacatgcttatgaaaaatcttcctgcgccataggattgttaattagttaatattgattatccatctactatgtgccaaatatttgtaagtataatgtatttttttctgcacaatatagactattataaaagaraccatcccaggcctcattataataagtccatccctcctgtacttgtccgaccctaactgcctacacagagaagaattaatggagcttaatatcttagggacctcttgttcatgttggtgcaactctttctggtcatgatggtgatcaacattagaacctgccctaatgtgaaaatgttacataactaaagcatagaatccatagatgggtttttcctgtactcatattatgctttgttcattgttgtttgtatttttaatcagcaggaaattttgcattgtatttaagagcgtgtgttgtttttatgctcataatgagatctgtacccagtttcatggaactctagtttttggccatgacattcaagatgccaattgtactgaagcctttttttttttttctttatatgaaaaacctgtttcttctttttttttttaatgggagttttttctgggctaaaggtctctaacagaaaaatagaatcatattgttacattttagtaagtgtcagcatatactaccagatttattcccagatgagcgaacaagacttatagctgtgaaatgtatgaaccacttaagctaatgaattaggtcagaataaattaagaaaacatacatcaagatctagagaattccaatgtaatttttattgcactaatccatacattcatgtaagcaatggtaagttcccataatatttagcaggagaggccaacactaatattagtacttaacattgtttgattatctgaaatgttaaataaataaaccctcccaggtttttctcactcttttattttctatgattattgctgtgttatgaaatttaggaaatgaagaaaagtttaaatattataataagaattacctgtaatttcactgcctggatttaaggaactattaacagttttgtgtcataatatgttgtctttttgtgaacttaaataaaatttaaaacataatgctgacttaatcatctatttggtcaacacatagttattgattatgtagcatctatcagggactagggaagatactagagatacgaagaatgataaaaccagctcttgacctctaggagtttatagttggctgtaattatgagagcacccaataaaccctctaacaaggatattaacaaaagattctggtagtttagagaagaaaataaactctgcgtgaaggggtggagaaagcatcgcaggagattgacctgtgggctggagaaggaaagagtggggataagcctggccatgcgaagcttgcaggatccacagatgtgcatcaggggatgctctaggaaggggccagggatggagtccctgaggccagagcacagctgcctgtcagcaatggaccagcaagaaagtctagcagaaggtgggggctgcagggtggagggccttgtagtcatgctaggaactgtggagtttatcctgtagtggtgtgagatccagggtaataatgatgacggctaaaactcctgctgagttttctrtatggtggattgagttgggtttggaaaagctgaagcacaaagctcagggggactagtgtttctgcagggctgctctttctgtgtgggccagactttccttggctgtgttaatcatagaagacagacactggcctaacaggctcattcattgtcttatttcttctcataaatgcagcatggggtaaagcctggagttacccatgtgcctggctcttgcacagaaggtgtgagtctcccattacatgaaggtccaccgcctactgtggggactggtgaggtagggagtgtaaggcatcttctgctgagtgtctgccagcaaaactccctggccattccaaagtgtgctggagtgttctgacgcctctcactgctttcttccaggcagcaacatcagacttatactagtatccaatcagatagtcttatatcattcaggacagtgaggggcagaggtttttattttttccttttctttaataaaatatgttttaaaaagcaaccataatttctgggaaagtcagacattttgtagtaaatttgccttgcatgtagtttttatttgttgcaatgactcactggcttttttcttacttaaaatcaataagtagtggtgaggggcagctatgtgtgagtgttggaagaaccaaaggtcctatggcagtggtccctaacctttttggcaccagggaccagtttccgtggaagaaaatttttccacaaacagggtgagtggagtggttgcagatgaaactgttccacctcagatcatcaggcattagttagatcctcataaggagcacacaacttacatcccatgcatgtgtagttcacgataaggttcatgctcctatgagaaggtaatgccaccactgatctgacaagaggtggagctcgggtgataattctcgctcacccactcacctctggctgtgcggcctggttcctaacaggctacggacaggtactggtccatggctcgggaggttggggaccccctgccctgtagtgggtttgtctgaggatgccccaaaatagatattgtaatttattctcgatcttagtgatgaagaaacaggatagaagaggctcacgggactgcccaggtgtgatgggctagtaagccgcccagctgggatggaatccaggcgatgcagtcttctcagctccacacgctgcccccaggaacctgagccaggaggcaggagcagactctgatgtccatgctgggcatgggctggagtgggtagacatccagsctgttggaaaagacaagacagagggccctaatattccgcatcagtggtgaggatgccttggggctgctgagagggtaaaggggaggctgtcagttcagcgtttcacacaatgggcgttcatataagacttaatatgaagaaaaggccgatgacgtgttttgttattgttgtcattattgagtttaaaaatcactactggaagtcagaattgccaccttgacctaaaatgtttgatactaatgtagggtgagtgaaccaacttccaaaggagattttgatgtagaatgaacaaggttgggtgacctattagaagatgggagcaaggaagaagcagtaaagaagagtctaaatttccggcatggagcctacctgaatgctcgatgatagtattaagaaatcataaagaaatttcagatctgatttgtaggggtagaagatgttggacattatctcctgtcatccacatggaaatagtataaatctaccattatgcaatagtcatgaaaactcaagaaaatcaacagaaaaaaaatgtttaagatcttcataggttgagtttgtttggtggatacatgtaactctcttctatgtcagcctcagttacctgtatactggcmacatatagagttggccttttttggtttttcaacagaaaaaaatagccatatcccagatttaggaacataatactaaatctatattaaataataaaatataaaattatttaaatattcccatggtttagaagataaataagaatgttcattggtttttttactagtataatttaaataaagccttttgagttttaaagtcagttgttgggccaggcgtggtggcttacgcctgtaatcccaacactttgggaggccaagatgggtggatcacgaggtcaggagttcgagaccagcctggccaatatggtgaaaccccatctctactacaattacaaaattagccaggtgtgctggtgcacacctgtaatcccagctactcgggaggctgaggcagaagaatcgcttgaacctgggagctggagtttgtagtgagctgagatcgcaccactacactccagcctgggtgacagagcaagactctgtctcaaaaaaaaaaaaaaagaaaaagtcagttgttgtttttaataaaataagcttaaacaaatttttatcagttcttttattggtcagttttgttttgaaataacttactcgttttaaaatccagactgaaattcttctcagtatttggaaaaaaatccatctgccagtttatagacaagccagcatataggctttgacatatataagctgtcatgaataactttgttctattaaatgactagtcacaatttaatattttaccctaggattttttcccatctggctctagtattaggctgtattttaaaggataccggttctaagaagttgccgtaactataaataaagtgacagttactcgaacagataggctgtactcagccaatagcctggccatttagaaagctgaacagaaccactttaccctatgttgacagtgagaacaaattgaacatccttgacttaagtgccatttgtacacccctttcccgtaacaggaagaccctctatttcttttgctgtgctcatctctacccaatacatttaaaccgtgagagggagctgtgtctctatttttccctgaaaagtgctcgtctgttggcatttctggyrgactcctcacagctggatatttggggttgctttacataacctggcatgtaagggacccaggtcacttctcctccataagctcctgacttccatgcattggagaagcttgcctcccagggagtgacttaccagaaatggggccagaattgataaatcaaaggggtttaggggcaagatcagtgtggaagcgggccccagagagaagctgcattagcggagctcccgggagcactgttttgacctcagggttctgttgattctggggccagctaggggcggagccaaagccaacccaagccactcccccatgtgcagcatcccagcctctctcccggcggctgctcctcgtggtccaccagccaccctctcaccacagggccggctgttgggagcttagagaatcataggaaagaaggaggcaagrgaagaatggagggagaaggaaagagtttaacttaggccaaatattgttattaaaatcatacataaagtgaaatcctttgcagtttaataaaaagtccaagttgttaaatacattaacctgacagataaagtctaatatttctgactcatctggagacaaaacttgcctgacatgcaytcttggtggcaaatcctggcawgaactgcagtgaggctgtttatatccttgatttatcccactaagtatgaatattcatatatttcaccacagttgtatccatgtgttcgattagaccctgctgtgggtctacataaaatatggcctgtactctgtattaccttcctaaaatctgaaaagttctggaacctcagatttcagatacgagttaggaacccacattcatattctcatattacagggaaggaaacaaagacacagagtggtcagagacttcgccaaagtcgaaggtccggtgtcagagctaggatttcactccccagaggctgctgcacttgccaccgccacatgtattagtcyattctcatgctgctaataaagacatacctgagattgggtaatttataaagaaaaagaggcataatggactcacagttccacgtgactgggaagcctcacattcctggcagaaggcaaaggaggagcaaagtcacatcttccatggcggcaggcaagagagagagcatgttcaggggaactcccctttataaaaccatcagctcttgtgagacttattmattatcatgacaacagcacrggaaaaacccacccctatgattcacttacctcctaccggatttcttccacgacatgtggggattatgggagctacaattcaagatgaaatttgggtggggacacatccaaaccatatcaatatcctcgatttatcccactaggtatgaatgttcatgtatttcaccacagatatcctcatgtgttcgattagaccctgctgtgggtgctccataaaatacagcctgtactctgtattaccttcctaaaatctgaaaagctctgaaaccttgggtttcagatacaggttaggaacccacattcatattctcatattacagagaaggaaacaaagacacaaagtggtcagagactttgctaaagttggaggtctggtggcagagctaggatttcactccccagaagctgctgcacttgccactgccacgtgccactgtctgccattcaccaggcaacccttagccaaagtcagaagtccagtggcagggctaggatttaactccctggaggctgctgcacctgccactgccatgtgccactgtctaccactcgatacttccaagataaatgagcaaataaaaataccaccaccaccaccatccctcgaaacaacaaagtccattctcccatccgttcctgtcactgtggaagctgctgaagttcagccgagtgggtgaagagatgcacgccctcctcggtggaggcagcgactgtctgcatccaggtcagcacaggcagagtgcagtcaggctaaatctcatcgcaaaatagcacattcctcttagaaccccctctacktgcactttttaaagctttttattccacccctgatggcttactgaagaattttttttgagccaacattcacgttacgaactttccctctgtgcagctcattcctcatctttccatacagaatgggatacttattttttttaagtatttacttgtactacatggtttttttgtttgtttgtttgagacagagtctcgctctgttgcccaggctggagtgcagtggtgcaatcttggctcactgcaacctctgcctcctgagttcaaatgacccacctgcctcagcctcccgagtagctgggattccaggtgcccaccaccacacccggctaatttttgtatttttagtagagayggggtttcaccatattggccaggctggtcttaaactcctgacctcaggtgatcctcccacrtcggcctcccaaagtgctgtgattacacgtgggagccactgtgcccagcrtacttgtaccacacatttattcaatacgtatctttcaggcactgttctagatgttgatgatgtggctgtatacagtacaacacctctgccttcacagaacctgtactttggtagtgaaaatggacaagaaattaataagcaaatatacagaaatgagacagcacttgctacagaaaaaaaaaaaatggaagcaggtgacagaggctggggcaggtagtggtggggaagggagttcctgcggtctaggaggtggtcagggaaggcctctgtggtacatgatatctgaagatagatccaaaggaactgggatgggcagccacacagatatctgggaggggagttccaggcagatggagctgcagacacacaggccctgagatggctcctgtgtggttgagtagacagcagtggatgtaacctgccagggcccagtgagtgtggagaagagcaaggtgggtgcagagaagtagcagggccctgtgttcagagggccctgtcagactccgtgagggtctccacttttctttaggataagatgagaaaggattgaagagttctaagcagaaagtcagaccttactttaggggctaccatgctgggagaattctgtagctggagtgaagatgatgacacagaagtctcttgtgctaacccagatcagagatgatggaggtttccaccagcagtgggcgtgctgaggtcagtgagaagccaccagtctctgcacatacgagaggtatgtgggttagatactggcatgagacaggcagcagagtgaaagatggcaccgtgggactcggcctgagtcacggaagactgggtgtccacttactgagatagggagggcagtgggaggagcaggttttgggtaaaaatcaatagtttgagattcagcatccaatgggatgttcaaactgagtcaggacgtgccatcatcatcaaataggtggtctttaaaggcaagaagaatggatgagatcgggaaggacatgtgcgcagagcaaaggcaaggtctaaacctgagcctgcagcaacagagtccagacttgtgagaggaggaccagacagcaaaggggaaagagcggcccaggacatgggaaggcagctcagagaggtgaggccactgccgctgttcacatctggttttttcttttgttcacaatcagactcctttctaaggaatgggccatgctcatcatctctcttgccagctcaccattttttccttgtaaatcttcagctgtgtgtctttgatcttcacagaaatgaccttttagtttttattccatccctggtttttcctttgaatggtttttagaattgtgcctgtcctttcaagtttcgtaactaccgtattcatccctggcccttattagtactaactgagttattgcaataaccttgatttaccaactcttccactttgaccatctggctcatctgagtcctgcagccataccaggctttcagagcactgctataattctgtgattctcctgcttcagctcagcaatgcgtactacgtgaatcaaggtcaaaccacttcattcaagcagagccatggcctccatccgctacccttctaattaagtaatattatctgtgatagttgtatagcagactaatagttctaatcattatagtaatagttgtagtagtagtagtagtagcaacagcagtcacaatgctttttgagaccttagtaagtcccagctgctgccattcggatacatcatctcatttaattgttgcagcaactctaagaagagttattataaccagtacccctccctacctgaactctgactgtatgaactcggtaatgaatgggatttagataacacatctctgtccagactcagtatcaagcatctcattatccacatgtagaacctgaataagtgtggatagtaagcagtcctgagtcaccgcctccttctgcagatacccaggggcttagaaagacsattcataacttgccaagatcacacagccagtgacgacaagccgagatctgacctcaggcctgtctgactccaaaacccgacctggagaccatgtcctccagggccrttgcycacctgcttttgtgtcagccttcctcccagtccctcgagtgacaccaagcaccttcccatagccccttcccagtgagagtcccgccctgtccatccttatgcccagcccatagcccctggccttatctgccccacacttagcactsctctgtatcctcagcagtgaactagccttccagaaagctctgtgcttcaatctcatgccaacatagacaaataggacagtctcaaccactgtaccatcaccaggcctgcttaaacatgtgtgtgaaattcaacatatcatgcatttttagtgtcatctacactgtgcaaggctcaaatgagtcctcaaagaggtagccactggactcctatattaagaaaakaattatatataattaattttgaacaattgtgacacagcgtatatgctctatgtgcccaggatacatttacatctcaatgccctggaatactaagtgtcactgacttagaggcactgtaagaagtgctatataaaccacatcttctatacctaactgagaatgtggtgctcagcatagctgaagcacagaacatagatttgtcaggcagtcacagtcaaggacaatggagagaccagcagttatggggcagttaaacatgtactaaatggtagtcgctgtgctcagcacaacatgagttccagggactcagcactgggcctcctctcgtcctcagtttcttattctatgccctctgaagcaggttcagaatcttctagacagacagaattaatgaataaaacaatgaattgtcacacatagaacttttaatgtgcaggacctggacaacataaggggttaaaaatcaagcccattgtaataacagctccttgctgttgaatatttacttcttctatttgatccctaaacagtatgctgtgagtatcatagaatatcgcattcccttcctcagtgaatttttttaaatgtctgcttcttaaggatgaaatatttgtaaagttggaggaactactcaaagccctattatttcgcatgtccccaagctccacctctgataaattttttgtaccggtaaagacagcatgtgatttgtaaaatttgtacccatagtaattaaaaatatgacctttatccagatcctgttgcagaggcacttatgaattcctctaaagtacactctcccgctgttattgttgttagaaacatgtttccactggttgacttttcaaagatgatttctagttttaaatgattaactttgctgctgtgttataagtcactggactgagagggggtaattgtggttgaaagaccagcacaagagaactcttttctctttattgaaaggtgatgcgatctcatgtaataattgaccaacacttccaattaacggagcatggctcatgaataatgcaattattcttttgattaaagtaatctcagaaagaaattgcatttctgaaaaaaaaatacaatttaatatatacatgccatagtaaattctgttgctttttgttgrtggagcttatcatgcaaggtaaatggaaataagaaaactctacaatgtggctgaaatttgtgtgacatccttttaaaatgtgagtagtttcaactggcacaccgtttttttcttttcttttctttttttttttttttttttgagacagagtctcagtctgttgatcaggctggagtgcaatggggcaatcttcactcactgcaacctcctcctcccgggttccagcgattctcctgcctcagcctcccgagtgggcacctgccaccatgccagctaattttttttgtatttttagtagagacaaggtttcaccatattggccatgcccgtctccaactcctggcctaaagtgattcacccaccacggcctcccaaagtgctgggattacaagtgtgagccaccgtgcccagcctagtatactcgtttttaattcatgtttcaagttgatctagatggggaaccaatttatttttaatgtcgagtgaggctgtgtcaagaaacagaagcagagttcatattctcagcccttaaactggtggactgttagcaatttggttgttgcaacgttgaatgttttggaagtgagttccatctccttaggaaaataagacaggtgtttgcaggatttttaaaaaattactaatgaaaagctagagcatcaggaaaggccagcctgtgggtgcgggtggagaggccactcacacagggtcttgaatgctcttccagagatgtggagcaggatcctaggagcagtggcaagccactgaggagatttgaaataaaagagcatcttattcatattcgcctttaaaaaactaattatgtctaaaagggcctaataggaagccagccagagagaagactgtcccagaaatctacatgagaagtggcggcatgggcgatccagagccgtgaggtcactgggacaagctgagatgtgggggtcaaagagaacgaagagttaaggtgattctcgggtgtctggatttggaactgaacagagagtagtgcccttggcttatgattagacagaatgataataaagaactgttgtgcactcaattttggactgaatttttagtgtctgagagatgtccaggtggaagtgtcaagttgacttctgtgatacagattggtgagtcagtaaccaaatattttttggagaatctgttggcgccaagtaccattctagggtcagaaacacacaacttacgagtccccgtcttcgttgacattcgtgtgttttatttgaccctaaagcagtattatatgatttccttagaatatcacgtcacctgtctggtgaatttgggaagaggtagggggatatacaataaacatgagaacaaatcaataagataattttagatgctggtgagtattttggagaagataaattaggacactgtggttgagagtgaccaaggggccaagggtgggagctacttgatcaagttcagagaaggcctctgtgcccctcatcaggatctggaattcaaatgaaaagttggggctagagacagagatttggaatcatcctcgttgagatgctggttaaaggactgaaaygtttcattggatttaggaaccagtaggcatgttccatggcatctcagagtccctggaaggtctctgcaggcctcctcccaactccaacagctcagagcagtggggggtgctgcagagagtgcccctgtcctgtggggttagcttaggaagactggtagcagaacccctaatgctgtgttctggaggcaggtggaaaatcaaagccagtgaagcctatcaggacatcagtccaaggacatgcaacactggggcctaagacggggaggaacagaagtgtgagaggcgcggatggatggcagagcagtcaggtgggaggctcctgaagcaactcaaagatgcagcaggggcccgagcgctgactttcagtctgcacgcccatcgctgaggatttcgctccttgacmgaatggtttggagaacaggtcttctttcagaatgtcatcttcccgcaagttaatattctgaagtggagaaaacaagctccaaagttacccgagctgccacagtcagcttttggaggcagcgggctacctcggctgtctccccagactagaaagctgtaacaaacgtggtttattctggaagcagccaggaagatgctcagttgctttctgatttataccatacamgtgaatcaaagaatgtgactgaaatatttatgcatatgaccgtgtgtgtgtgtgtgtgtgtgtgtgtgtgtgtatgtgtgtgtgtgtgtgtgcatgtgtgttgatrtgcctgtgtggtgagtttgaactggaaatcaataatcaacatgtgtcaactcattttattttctgtaacttttctttgacaagctgccaatttctctcagcagcaggagaactaaatttagtccaacctagtaaaatcagtgtaatcattttttrgcyacttctggtttaaaacctagactctttttgacagtatccagttgattccagtattgtcgttattgtggacattgttcacagtttaaagcctttctctctcggtttggcaaagcttagccccagatggagtggactgtctgcagaggggtctcttccctgttctcttcttccatgtgctgacggaggtragaggctgggtgggcccaggaacgcctctgtgacagtgcaccttggtggtgatgaggggccaggcccgtgccaatggtggtgagagcctgggtgggcccaggaacgcctctgtaactgggtaccttgctggtgatgaggggccaggcccatgctaatgacggtgagagcctgggtgggcccaggaatgcctctgtgacagtgcaccttggtggtgatgaggggccaggcccatgctaatgacgctgagagcatgggtgggcccaggaatgcctctgtaactgggcaccttgctggtgatgaggggccaggyccatgctaatgaygctgagagcctgggtgggcccaggaatgcctctgtaactgggcaccttgctggtgatgaggggccaggcccatgctaatgacgctgagagcctgggtgggcccaggaatgcctctgtgacggtgcaccttggtggtgatgagggactgggcccatgctgacacctcgtctggctctgactscagctgtcctcaccctgtcagctctcagaccagagcttctacccttgttcctttggagctgagtggcacaccatagtcacaccaccctgtcttccaggatctgggcaaggctgcwctcctagagtgggccatccacccttgtctcttctgaaagggtccctcccagggggcgtggtaagctggttatgcccctgtggcctttgctggcctccttctctccatgggaagccatgcctccgtgggagacaggtgacctttcgccaccaccatgctcactgtgtccctttgtcttctctacatcctacgtagatacacacgtgggaggtgcacacagtaggcctgaggtttctttgtctgcatccgaagcaatttttaaaagccccactgccctgggatttcctaaaccttagatgttagaagttttctaagaaactgccaccttccagactgacagaccagaaaggagaccaagaaagggatctgggtccaagcccctggcccttccttgatcgtcttctatcctcctccctctcggcattgcaggggccaggcttcttcatggctgctggagactttgctgtgtcatcagtgcgtcctcccggaagtggcctttgctcccctttgccctggagccataataaatgaagggcttccggggtacatgatttgatatctttcacagtagccacacgggtaagcataaaccaaatgatgtatacattttcaggtagggccaatccaaatgcaaaaggaaaataacataattaagtttataaaaaatgattctctggatgtgaaaattggctaaatttttattgactcgacttttttttaattgttttcaccttcatttttaaaaatgccttttagagccaagtgcggtggctcacacctgcgctcctagctactcaggaggctgaggccagaggatcacttgtggccaagagtcgagaccagcctcaacaacatggcaagatccccatctttaaaaaaaaaatgcattttattcagttatctaaataacattagagactatcagatcccaaatgtttaatagagttctgttttgtgctaggcaatgtgaccccagcgtgctcctgtgacatgtttccctgaaggctggccggccagtttacaagcagaattttcctcttaggagtcttcacagttacatcaaagaatcttcagtccagtaatgtttccaatctttggaatcttacccttaaatgtgctctcctaacaaaagaaaatctataaagacccacaatatacaacagatacatcagaccttaatcaccaaatgaagtatttatagtatatatacgatgtacttctctattctgtggtggaggacagacagtgggaagtatgaactagttattcctaaatggctagagagaatgttgcagttagtggaacaaagttcctagagggaactacatgaaattcatggcacgcacccggatgatatttactgggagcattttatgatgtgtgtgaggtggagaggctaatactgatgatggcggttttcaatgagggagcatgccatgagtacccagccagggtctgggtgagtacttcttcatgcagcactgttgatttgcatctttgttgttgttttgttgttgtttttgagaagattcagtctcactctgttgccaggctggagtgcagtggcgtgatctcggctcactgcaacctccgcctcctgggttyaagcaattctcctgcctcagcctgctgagtagctgggactacaggcatgcgccaccacgcccagctatttttttttgtatttttartagagacrgggtttcaccatgttggccaggatggtctcgatctttgaccttgtgatccacccacctcggcctcccaaagtgctgggattacaggcataagccaccgcgcccagccaatttgtatcttatgtagcacatacttctaaagaatcagaggtattgctcatgataagtcaacattgattccgatgaagcaagatgtgtacgggatagtgaaggatttatggttaattgcagacagattttatgtttgggtttaatgccatctaggtacttttcgtcagtttgaaaaactatgttgaattggtattaaaagcaaattcagcttttataactttacatcaccyggggctctttggaagtttcctttaaagtattttctgctttgccacctcctyttaacttttaatagctggtttggttgtattctagcatgcaataagtaatttccaaagtcacataaatagctagagagtatcacattatcttctccattagaatcatatatcatgttttrcttctttatatctacatacataagttatttcttaatttctatatcaaaattatctattgttttagaataataagaacaaataacttactataaatgtcagtaatcccttatcgctacacattggactgtagtttaagaatgtaatgataaaactagaaaaatacttaaagcaacataaacccctatgtrtgaatgcaaggtgaaaagattttcttatataaatataatactatagtctacttgatagaccttcatttatgaatgataatttagtgattatatcatatccgtttccccacaagggctttaaatttaaattaatggtgttccaggtaccctgtgaggctgatttttgctgccataccttgacttgcattttctgctgacattgatacattagttctgtctatcactaccctgactttcttttatayaaatagccctgtctttagatatacatgtgtaacaaaacagcatttcctcatggctaatgctgcccctgtttcttgctatgagtgattgagatgcttttgggcagatgtctgcataaactaaagtgctgcactatgaaaccttaccagtcattcagattgattatgccgaaagaacaagttgacactaggtaggataataagatgagggatgaaaayaatttgtaaattggttggaaaaacttgcagagtgtcatgaattctgtacttcagaaacatcaaaatgttcaaatgctcagtgatgaatgtttttctgtataacacagatgactgtygtatgggttttatgaaattcctattatataatggaggaacacattacctttgatttccatttgtgggtcccagctcagggctcttggtaagggtgtgtgatttatacaagaaacagtatatagagacatctgaaatctcttttgacaagaaactttttgcaatgtttagtttagaaatgaactttaaaaggtatatcagcttatggaatactaagggttttctttgagtcactgaaaaagctgccctgtatgatgattgtcatctgcaataccttaataacctgaccacacttccaggatagggcggtgggttaggctttcttatgctactcacagcccctggagagatgagaaacacttggtaagtatccatcagataaaccctaaagatatcatagtgaaaatgcctaagtggctaaagaatagtatttctcaagctatattttccagtgagattacttggtcttcttggtaaaatgcagaccctctgcycccaccctcagggacttattcaggaggaacatacaggttgacagcacctggcccatacttgaagaaaccatattagagacttaaagacatggtccgtggtgtttgctgggaccaagaagagtacagataattagttatgggagagaaagagacaccaaaggggatgaagtgcttttgatttacatattttgaccctgctaattggaacctaattagtacattccaaacacagacattaagtatctacttgcagtgataaatcttagatgtatatgtcttaattgaagctaaacctctcttcttaaagacaagcattagatttccctgataaggcagtcttaatccattgcttgtcctaaatgtgatctattagataaagcaatgatacatatgaaaatttaacaaaagtgcatattaccagagacacaaaggagattataatataataaacgtattatgtaacaatttcaggatgttaaataaatgcaaaatgtagcacacccttggaaatgacaaataaccattattagaaagagctcctctgaggatatcatgagaactaaggtagccaggaaggtgagatgcacatgctcccttcactgtgcatttagtaaacattctccaaggctgactgtctacactcaagaccagacaccatgccaggagccagtgaatgcacagccactgatggacaaggacttcacaagctcctaggtctcctagatatgagatttgccgaaattcctcattggccgtattacaaaattgaaaggccgagtaccaaaagaggttaagtaaagtgatgtggatgtttacagrataaatcaatctctctcggtctccatttctctctgcctctctctccctgtctctgttwgtcttctctctctctctctttctctttctctcaatctctctctttgcagatgtcacttacaatttctggtgacacaagtttgtacatatgttcgttgtagtgctggggagtagagaaagacaaactgtataaaacacawggaaataccatgctaagacattyaggcactaaatacatcaacataccttaaattataaatgtctggaaagagaattccttatcgtaacaaagcaccttatctttagggtctggcatctgagtcycttaattctctctccctgtacaaactcataaagaaaagttagtaaaaaactataccacagctgacataaacaaatattgcattatgctcgtggactctgtgggtcaggcatataagcagaacataggagctggcttgcctttgttgcaaaattactgggttatcatctggaacgacctgtaggttgagataacttgacctctggggactggtatgatctgggcgtcatcacagtagatgttggctgtcttctgaggcctcagctgagactctgggctggcacacctgcagcgacccttccatgtggcttgggcttcctcacaacatggtggctgacttccaagttgggtcctgtcaaggaaacaaggtggaagtgcatgacatgtttatgaccttagccttcaaagtcacatagtgtcactgtaccctgttggttgagacactcacagtgttctgcctgagcttggggagagacaacattgtccctaccactcagtggyggagtgtcaacctgacaytgtgagaagaacattcaaatgataaatatgtgacagccatctttggaagatacagttggccatactttgggtctggcattttagtcatttaattcattctttctgattaaaagccttgaaatatattacttcagaaggtgagaaataaaacacaaaagtctcttatgtccttttcataggaaataggtccatgaactacgtctctaaaccattctgaacctggtttatataarcagcttaagaagtatgtcccaaatgcttgtcagccattgggtaaaatcaaacacgtacttcttttattttatatacagtcatgttgcaaacagagaagcaatcaacaccattaatccctcaatattttctttaagccagagaagcatccttactgtttcaagtacttcttcactgttgcatcatgacaataatgagttgaatggccctggttctcagcacaggtgcactcagccctaaggcaagcaagaggccaggagggtgcattgtgaacggcgctcaccataaggagaccatatgagagagggggtcagtcatgcaaatgtactgatgtgagtcagctgggcctcttttatgttcctccaattttgagaagaattgtctcactgtcttttcaacactttctctggttagaactgatttcagcacatttgacaaatgtagcaatgctttgtgaggatactatgttataataattaaactaataattacaggtggtgtatttagctacttgcaaactcacagatggctaatatagttttaaggatccctgaagaaagtcatatatgtgactaaggtcttgcagaaagagtaaagtagaaaatttaatttctgaattaattgctttattcctaagagacgttgcccttgatagctctgcatactctggaggattttccaagttcatggttgactctatggctgtgtttttggctctaggacactgtgacattctgtgaaatgtgttctagactgggcttgaatgcttaagtttagtacaaagaattatgctgttgatctactgcagacacctgaacctaagcttgaaatgcaaataataggttttctgcaacgaattacaaaggcaaacagaagccatccctatccagagaatgaactacacctcacagttaaaacagaaaactggagaggaggtgatttactatggctactcttaatagtgaagacagaataatactgtttaattttrtgagaatccacattggcaattaagaactatagggctggctccatggacagttgcaggaaagtccacagactatccctggcccctataaacatgagcctaggtgtttgttctcctccctactgtttcattaaactctgatggacacacacccttgcccccratctattgatggcttatatactgggataatgggcagaagggatatatactcagtaagacctcccttatggatcaaagctttgtctacatactactgagctgttgactttgaggcttttattacactttcagaatatgaaaatgcatttctgtacaatccatatctgtgtgagtttaaaaaaataataaggcaaaactacaattacttctggccactgtccttgggcatctcaaggctatcagatcttttactggagaagcaagcttgttttgtctccacctgaataatccctggctggaagagagccaaaagaccasatttcagcatttctacccattctgtgcatcatrcaccagtaataaatgcccaagtaaacaaagagatgaaatagcaatgctatagccataaaaccaattctattgattttattccagcaaatctcataccgtactaaatttctcagaagcacgaaaatatctaggcctttattgctcactttaactgggctctttgcatgctcttattttgttttaataaattatctgaaaggattaaaattaaaacatgattcttttcctaatgctaaaagcacttctgtgacacaatatgcttaacactgaagaaactcaataaaacaaaattatatcccaggatagaaagatttagaacattagcaaacttcttcatttagatgactaatatgtttttctcaatgggattttgagcatgtttgtatsagcacagcccaaatctgaaaactcttactatttctattgaaaaaaaaaatgttgacaaggaatatactctctgagtatgggcccatacccagttgcacttttaaacacaggmagtttgtgctggcagcaggatttaattgactgagctgtggtggtggctgcacttgtcatctctgcttactatgctctgtttttaaatatttattgacttcacacactctgcacgatggctgctcagagamctcagccctgactgaagaagccactgcagggtgagcaggggcagagagccacgcctgtcgacgagatgctattaaccagtttttgctctgcccctgtcatgccctatcagaccctctcttattttgtatgttctgcatactgttcagaagataacagttggaaacaatatwtgaaaaggctctgaatggaaatccttataggtaaggatgtacgtctcagggaagggttcggtgaatcactctgggttacacagctagttggggacaggtgtaggacaccttccacaacctgttactattaatacaatttcccctgcaccatattacattatgagcacaatttccttcagagagaaaaatatcaacattcaatgtctcatatttccacttgattgccactgatcttattgtagttcagagccaataggaaattaagtgttttatcaaaaataaatttgaaacagataaatgtactttctttcctacaggggccaaatttagtatgaattttttaaaagtgcccaggattctagaacagcaatggaaccatcagtacaaattgtaggggaccagaactaaaggagtctgaagatcctaaactcaagatcccaatcctgtttgggttgtggcattcaactcccagggtcccactgtgcttaaccaataggggctatttgtaaatgcatccatggcttaggaggctgcatcaaacaccacccatccatacaatgagccctgtcactgacgtttcgcctcctccacgcgtatgaacgcagtgactactgtcactgatacaccacctcctccgccacgcacgcacacgcagtcaccactctcactgacacgccacctcctccgccacgcacgcacacgcagtcaccactgtcactcatacgccacctcctccaccacgcatgcacacgcagtcaccactgtcactgatacgccgcctcctccaccacgcacgcacacgcagtgaccactgtcactgatacgccacctcctccgccacgcacgcacacgcagtcaccactgtcactcatacgccacctcctccgccacgcacgcacacgcagtcaccactgtcactgatacgccacctcctccgccacgcacgcacacgcagtgaccactgtcactgatacgccacctcctccgccacgcacgcacacgcagtcaccactgtcactgatacgccgcctcctccgccacgcatgcacacgcagtcaccactgtcactgatacgccgcctcctccgccacgcacgcacacgcagtgaccactgtcactgatacgccgcctcctccgccacgcacgcacacgcagtcaccactgtcactgatacgccgcctcctccgccacgcatgcacacgcagtcaccactgtcactgatacgccgcctcctccgccacgcacgcacacgcagtgaccactgtcactgatacgccacctcctccgccacgcatgcacacgcagtcaccactgtcactgatacgccgcctcctccgccacctgcgctggcatggctgagacagcggccttttctaacttatttcccttttcaagactgtttctactggacatgttggcatgatttcatctgtataatgactttgaagagggcacagtgccattattctgctcttaaaccccgtgtccatgcaatacaaagtgatggacactttattgtgatttcattgataaattaagggaagttttaattaggcaacaatgccaaatgcacatatagctaggacattaacatccatctaacataatataaattgaatgaaactgcaaaatagttgaatgggaataaaaccaaatcaatcaaactgctttataggattatgctctataaaaaatyttagtaagaattttcattttataaacgtttaagttgaatgttttgaaatgattgctataatgactacagtgattttcaggaatttggaaattcagtaatgttatcatttatcccaatgattaaatgagaccaataattccaactgayttccatgagtttacctgaacatacctttgtcaagtgcgtttcagatcatggttgacaagttgaatggtatctgtggtttaagttaagcatctacatccccaaatatcggttagtatgtttccgtaattcatttttttttttttttggctatttattgaggaaattagtcctgagattattccgtaagattttgaaacatcatcagtcatatattttgcacaattatagtaggaagtagagtcagaatacttgggttttagtcactgctctgccaaatattaaccatctaatattggaccattggcttcccatctttgaatttttttttcttattgataaaatgtcacagaaacaaaatctaaccaattctactcactcctgggttggctataaggataaatgatatgcaggttggcaaggacagattctaggtcttacccctacttctgcttccagtctggttttattagtcaggatgatctccattgtaatagaatccaactaaagttagctttaacaaaaaagagaattatttgtgtagctgagtcattttgggcagccttggctgttggcctgcctgggtccatgtcctcaaatgacgtctcaaagctgtctgtcttcccttcactcggctctcatgccatgtttactgctctcaaatagactctctccccaggtggtagcagagatgagcacaggtagttccctatctgtattttcctggcttagccaaaaccatatgtccaagccaacagacgccatgaagacatgagagatctgaatggcagtgcctaggtcaggcgcccacacttggacctgggagatgagacaagcccacttgaatcaaacgaactaagggcagggaaagatgtagctgccggaagacatgccaggcaggcgaaatccacgtgtctaccacctcttccagggaggacagacagaatccaaatgtactttcttcccatttataaaccttcaaagactatccttaactaatatgcaactctctcacatacaataacagcaagatgagtcrtgtctttcaamactgacrtgcatttcctagcctgatccagataccatttttatggatgatcaatctgtagataaatgccctaacctgagtgaatccytaactttgcacccaacagtctggttagtttgggtcagggaatttgggttttccaaattttaagcctcctaattagctgactccaagcatccctcattgctcacagccaagagttagaacccctctcaaaaagactatgctttttccctctgagattggaggtgagccaccttggaggaaagattctccttcctgcgggaccctaccagttgtcacaagaagcagctactgaagttaatagttttttacttgctcctctggcattgatgaactgtggcccccccaccaagatatcttaagacaggctaaaaaaaattcacatgtcaaactggcatataacagacattcaatcaatgctaatgaaataaataatactggagaaagtactttatgccatggaagtaattttgtaaatgtcattgttgttattattatgcctaatatgaaagtttttttaaaaaaaattttacttgttttagtagtaaaaagtgggtcgagagagattaatgagaatagatggtataaaactcaagattcagataatttttgagatgacactgatgtccctctctatctaatgcgttagccaggtttaagaactgaatcatcttagctattgagagatagttatatgacatctttggaatacctaaataaagtagattgcaatatacacttyttaatatctgttcactggcctatgtttaaatgaatttaactttttggttaaagatgtccatttagaatatattatttttccgagagtaaacactattgaatttgagttatctaaatttagtagcataaaaaatgttctcctagcaatgtatatagaagaggctcacaagttaaccaacatccttcagttcctctgaaatacatccctagtgatgtccatagcatgctaaatatttgagactagagagcttcagcatttctcctccctccggtttaattgtgtgttttaacaagtcagttgtgttcctttgcagacctgtttttactagttgtgcttaatatggatttcttaatttaattaaaaaaatcaagtaagccaggraaccatcaatgaaaaaagaagtgtttctacaaaaaactaagttgagtgatttgcaaagatttaataaagcaggcttattagaaaactattgttgagctatttgcatgcagaattactataaaaatgaaagaatctaaaactcgaaaccaattctgacttcagattgcattgttactgtccttatgtcctagttttactttaaagaaattgaaaccagaaactagaaagactgatttaaaagaatgatgactggacactccaagaagtagatctatgctttaaaaaataaaacaggctttgatyttccattaaaagattgctatataagtgtatgtttaaatgtttttaaaaataataaaacatgcatcaattttctgattaacccaccacatttacatcatagtaaggagttccttctatccttggctctgcctctcttctcaccagaaattcttattttggcttttcttttttccaacttctcccaattcctccactgactttttgttgttgttattgttgttgtagtttttaaaatttttgtgggtacttagtatgtgtatacctccactgacttcttagacctctctgttacacctgacaccttattttttgtctttttttaaaaagtgattgactagtaactcagttaagactcctttgatcttccttttgatttccagaatgaaagaggatattgtgttcttgtatacatcagaaattctctattacagtccataaatatcacaataattctagaaagagaacaaatttttaattaaaataagcactgtgatcatttttctgtcacataccaaagaaatgcaataagcaaggcatcaaatatctatatctaatttacatttgtattaactcaagttaaaggtacactttatcatgaaaactctaaatctattttttaatttgatgactttatattccatattgattacatttatggacaaaactaattccctgatagatggaaatactaaaacaaaaggaacagacagctaaatgacttctaggtagattttcaaatcagcttggaaagattttttctttttattattttaaataagacagaccctttgctttctaatccatttcataagataatttaatctacagtagtgggggaaaatccttattattttgtggcagccagacattcataaattaaacttctttcttagagaattgcttccccacactggaggggaaaagaagtatgtaaactctttacactagcagaaacttcaacattgttgggaaatgtttggtaatgagcttggttcattggtaggtggcctgccttttaatgttgtctgcaagggaatttacaggaatggtactacccagcccatcaggatggtgtatggcacagaagctttaagcgccacagggcactttgcctttgttacactcctttttgcctggggctgtgaaagtattctgaatatgatgcaaaatatcagatgaagagtttgagttcctcatcctatactgcccaatgggttctccttgcccattgcctagacagagccgatttatcaagrctggggaatygcaatagagaaagagtttcattcacacagatctggctgtacgggagaccagagttttattattactctgtcagtctcccagaaaactcggggatgggacttttaaggataatttggtaggtaagaagttgaaaagtggggagctgattggtttggtcagaaatgaaatcatagggagaaatgaaatcaaagctgccctcttgtgctgagtcattttctgaccagatgagccactttatccatctgggtggtcccaactgatccattgaatgcagggtcagcaaaatctctcaagcacagattttaggttttacaataatgatgttatacccaggagcaatttcagaaggttgagaattttgcagcctccagctgcatgactcctaaaccatcatttctaaycttgtagctaatttattgtgtccygcaaaagcagtctagtccctaggcaggaagggggtttgttttggaaaagggctgttaccgtctttgtttcaaagttattttatcaactaagtttctcccaaagtcagtttgtcctatgcccrggaatgaacaatgatagcttggagatgagaaggaagatggagttggtttggtcagatctctttcactataataattttctcagttatactttcgcaaaggtggcttcattcctgcagggagccggctttccagccttctcgctgagctcagggcttcgaaagatcactggacgtacccttcctataaagttaatttattcagcacagcaccctttaaactttatttccatccctcagaaatataattgttagctttttttctccagttgatcacactaacctgagaaaactgtgtaaaatacagcaattctgtgttagttctggggaggatgtggctgttgctgttggtgccaccagcctgaatagtttcccttcacttggtgtctttcctttcctgaaagaaacctcggtggtaaaggccgtggctgagtctgtcaactcaagcctggtcaaaaaataggatgtcgaccactgctgccagagtcccagtgggatatactccctttttattctcaagctgaagaggtaacctattatgtaggccaatattttgtattccatatctcgttgtctcttgtttcataccagttgagactaattgacactaataatcacatctgtctgtgcgacacagctaagcataagcagctgcccaggtgcccatatgtgctccaagactaccccagtgagtgccttccagaccacataaaactaaaatgctccataaagttttggaattttcrctttatctrtrtatgttttagaagctaatgaaaagcargtttttaagacgtataatagcttctttcattatgtgaaacaagtcttgctgattttaggagtaaaactacaaccagaaaactgggggtggaagagaagaaaaagtattttcatatgaatgaggaaagtgaggcttttgcataattttaatggaaaaaggattaagtggttggaaataaacaaaaagtgygaaagaagaataaaatacatacagtgctggttagcctaagcacaagaccactgcagtccccaggagacgttaaaagagctctggttcttgaaggactcaagccccctggggacttgccaacagttttgaatgaaatctctctggagcccctagtcatctgggaaagaattttactagaagcagcctcatggtattctgagtagcacagtcagcagtcccccacagagcagaatttgatggggtggtaggcattgcgccttgtgcaaaaatatcaactgctttgtgttacaggatgagggaatccaataaatagcccctcctccttgcctgagttctgaaccaactgagacagagttgactgtgactaaaaagactaataatggagaatgtggcaaagatacacagagggttggtgctggctctcactctagtcctgtgcagggcagacacctgaggcctccctctccatggggctggatcggggctgggctgtctctagcaaacatatttcccggaggtgcagtccaggcagcgtacagtgcaggcaaacagggttgaggaggtgggaggaccagggctgagcattaccaccaggtttagctcccaaatttcaaacactcctttttcctttcctggggaagagggagtgaggagtacaggcgaggccaggagtrtttctgctacctggtgaccctccatggggaaagatgaagccagaaaagagagtgtgccgacgttgcgctaacaattgcttttcaagatgtgaacgtactcgatcctgtatggtcattggactgatccccaatggtcatttgaccacagcagagtctagaaggagctctgcacttggagactaggtctatttgtccattctcacactgctaataaagttgtacctgagactggctaatttataaaggaaagagctttaattgactcaaagttccacagggctggagagacctcaggaaacttacacttatggcggaagggaaagcaaacatgtccttcttcacatggcggcagcaaggagaagtgccgagcaaaagggggaaaaaccgtcagatcggctgggcacagtggttcacgcctgtaatcccagcactttgggagactgaggcaggtggattacctgaggtcaggagtttgagaccagcgcagccaacatggtgaaaccccgtctgtactaaaaatacagaaattagctaggtatggtggcacacgcctgtaatcccagcttctcaggaggctgaggcaggagaattgcatgagcccgggaggtggaggttgcagtaagccgagatcgtgccactgcactccagcctggctgaaagagtgagagtctgtctcaaaaaaaaaaaaaaaaaaaaaaatcagatctcgtgagaactcactcactattacaaaaacagcatgagggtaactgcccccatggttaaattacctcccactgggtccctcccacaacacatggggattatgggaactacaattcaagatgagatttgagtggggacatagtcaaaccatattactagggatttctagtcccagctgtaggacttcctggcatttgacctctgccaagtcattctctgagcctctgtctcatttgtaaatcagggataaataatgccttcatagatggacaagattgtttaagaaaatcagcagtgtggccggacacgatggctcacacctgtaatcctagcactttgggacgccgaggcaggaagattgcctgagctgaggagttcgagactaccctgggcaacatggtgaaaccccatctctactgaaacacaaaaaaatttagcctggcatggtggcatgtgcctgtagtcccagctactcaggaggctgaggcacgagaatggcttcaacccagcaggtggaggttgcagtgagctgagatcgtgccactgcactccagcctgggcaaaagagagagattcagtctcgaaaaaaaaaaaccaggggtgaatatcactgcagactgcaaggctctgtgcaaaggtaaagytttgtarttattatctgtgatggtgggaggcattgtttktccttggactgaaaaaaaataccctggcccaataaggggatagaaaaataaaagcaagcacaagagaaaaaagtttaagactgtrtggaaagccaactctacctctagctattttgacaggaaacctgggatcaagacctttgccccagtcacacttgggatcagtcaccttggattgggccacctcccctctgggagcacgcccaaattttgcctctaggtcaacagctatttgctctcaagtaagggaagcagaaaaactgtatcctaaacagaattggggccaatccaaagaacttaactttttaccaacctgtaagttttttttttttttaaggacaaaaggcaaatgagtctattttttagtttcatctcaagataagctctactacctgaagaggtgcttttaagcaattctttagagttgacaacaggcctgggaacgcagaggagaaaaggctaccttgttctgtagaaacacgaaaggcaggtcrtgctgcagcctccaagggagcagtargctgggctttgttcttttattctgggtaagaagttagagggccagagacattaaattatgtagatattttcatttctttttctttccctcctttttttttttgccacaggaataaaaagtttttgttcttacacaattttgttcttgacagtttaatcaataaaatgtatggcagccatatgacatttatttatggtaatgaaatggattcccatgatgtaacctccttgcctgccaggcgttaatggactcccaagtcacacctagtacatttaagtggcggtgcagaagcatggtgtcaccaaggtgaagggaccctcagaagcatttcctacatgcatgaataccttagaaaaacctcagatcctcagcagacacacttccaatttcagcatgatttagcggtttataaaaacatcttacctcttccaccaacagggatttactttaagcttcatttcaagccttttatgaggtcgtgctccatcagcctctcagagctgcagtggctgatacattctgatgaggcattttatgtgatggcgtggcacttttggtaacaggtgttctttttctgcaaaacttcatctaaaatgaacatgaacagacctgagcgctcaggcagttctccagtgtgcttacagctgttgacgtgcggccggtcatccctcctcctgcctttctgtaggtcggactgaagctctgaaacagcctgtaaacatcctgtgtggaccacaggcctgtatttctgttgggccwcctgtttaatctcgactttgtattttttttatatatacatagagacagggtctggctatgtttccctggctggtcttgaactcctgcctcaagcgatcatcctgcctcagcctcccacagtggctttgtgagtttgctctttggcatttccatccttcccatgggcattccgaaacaggagcaagtggctctttcgttgcaaatagttaagtcaggggaactctgtatcaaaggggcactcccgcatgtgcattaaggaccacgctccctgctttcactcacagcagcccccatgccatgactgttcaccagcagctgcagcagcagcctgaaagacaggggattatatccacagaggtccggcccagtgtctccggaatggacagcccccttgcgagaggtggcagggagagccttgcccgctgctcctgccctctggcccctgccagccctttctctgagcctcctgcccacaaatcagggctgggagacaaatatgcacatcctgcacagagctgtggatagagcaggggcagtggacatgcggctcccctaggctgtcctgtgctgacatagtgagtgctgtcatgtgcccagcacatcacatgcccagcacagtgccttgtcagggtggccttgtctctagctctgtgctgccctcagcacaacggcctgctcatagtgcctgggagactcgagatgggagactcatgtttcgggggcaccaggatggagaggactgaaggaggttgcagggtgtcagggttgaggacacagccctggggcatgtgtggatgaaggggcacctgtcttcacattcagcccttggtgggctcttacaagcacttcccctcctgcaaaaatttgatgaaatatcaaaaaagcctggacacatttactttatttttaattagagctctttcaggattgtctagggaagtgcgttagttacttaaagttctgagatttccttgatcattaatcccccaccaattcaacggcccccaagctcttcacctacctgggactctggaactctccacttttcactgagtcactgcctctgcagctgtcaacctccttccaccgggcccctcctccaggaaaaaaagcagcaaaataaaacccaatgaagatagctttgcataaaatccgggattctttcaatgtagtgcgtctgatgatgctcagatagagttgtatggcaaattattgaaaaatgcctgcacaccgatgtccttgtaatagagattgcctctcacatgaatgggggctgaggaaggcacctgagagaggattcgggtttattaggatttgttgtaatcagactagcaaagcattttcactgtgggccatctgtcagcacatgtaaataggctcattttataagaccagatgttctaacagtattcatttgaacaggagtctacctgttctttgattatagtcagttatgtagagaagcgattctactatattccaaaatgatttctctttggcttttaaatttttctggttgatgttttttgtttgtttgcaccttatttacagcataaggaacagagatctggattagaaaccagaaatctactcttttttctacttcaccactaaggaatttggggtttggtaaattatcaactatcactggccatggtatctccaataaggaggtcagacaaaatgattcccaaggattctgccagctcctaagtctcccgttttaattacggccctgaggaaggagcatcggcctcaccgtctgcccgcttcaacatcactgtcctggcctcgggttctttggggtgagaacagggatgctatgcgaagcccacagcttgctctagggagaagacatacagaagttctgaggaaatgccacactcagcagatccttaactcttctcttcctttctctcaattgtgaaaaagtattttaaaagggaaagtactcgcatttgttgattagttggacttttttgagttcttatgacctgcttgaagcctactaatgtggagggcagcctatgatgaacaaattcgaaattggtgaggcccaagacagagcatctccaggtaaattccacggctcttctctcctgggaagaccaaccccaaaggatggcgagcccacctcaacttccatcctcgtgtccaggtgatccccagctctccttgagtcctcgtgcctgttcttggggtgagttgagtagaaagtaagagtgctattgaacagttaggctttggaaacaccctagtgcttactagctgtgtgacctgcagcaagttgcttagctttcctaagaacacactttcttgtctgtaagatggagatacttgtggggattacatgagttgccacaggtcagtgctgagcccattctactgtatacaggaggctcagagcaccgtctgcctatggaaaggtcccactcagcctgagaaggccctcccgctgccctgctacaggccttcagggggactgagcccatctgcggggacgctcaccaggggtgtctactattctttttattcagctcatccagaccttgtggttacaggccgacaaggggatgtgctttctgtctctgacaacactgccttgccacaggcatccgtttctccgttctgactcacctrtgggacagaacccattcccatcagtaacgataactcacttacagtcttaggagtcccaaaaagttgcttgggttttagggggtgggggatgtgtgtgtgtgtgtgtgtgtgtgtgtgtgtgtgtgtgtgtttaagttttccatttggttaaagccccctcctcatgtgacgtacacacagacacatttttagcacccagctttagcccataatcattttaattcgtctgacaggagacattttggacagaggcccctcccattctcatactgtatgagcagctgcctggcacctgcatcttgtcccctgttagaaaaatcgagtggaatgattctgtcaactagatggtgtcacatatgcaggacactgagtgctttaattaaattatgacagtttcaggaaaccaaaaacaactctgaagtggcaagaaagcacttttctttccttagaagattcatgggcaacagaggagagcagtgctcctggccttgcaatatctcagtttcttttaactgtgccagctatcttattccaccaggaatatttaatatccacagtatgatgtggcttttacaaaatcctcgtgatattctttgaaactgtctacagtgtctgtttaaaagtcaataatgttaatttgtttgataaatttctacagatcccaaccctattaagctgttaactgaatgctcctgacttttaacggatgtcttaaggattcaatgttgctaaggggaatatagtatgaagtgaagtagactctttggaacattgtatgtttaggcataacatcctcaattggaaggaatataaaaacacagtatgacaaactggaatcatgagggtagacttgcaatgtattcagcagagaaatttatttggcaatcagaaaacaaagaaaaccaactaaattatctcctttgggagtgtatgtgtatgtgtgtgcagtcagacatgcacacaaatacacatgcattttttctgaaaggtatttcatacctttacattttccgggacaaatatttctgttttaatttttattgtgccaaatgaatacagtattgtttgtacagcaaagcctggaatagaaatttaattagataatcataggtctaacagagagagacaatgatctgcaaagcttctgatatggtttgactgtgtccccacccaaatctcatcttgaattgtacttcccattatccccatgtgtcatgggagggacctagtgggaggtaattgaatcatgggagtgtttacttccatgctattctcatgatagtgagtgagttctcacgagatttggttttataaggggtatcccccacctttgctctgtacttctccttgctgcctccgtgtgaagaaggacatgtttgctttcccttctgccatgattgtaagtttcctgaggcctccccagagctgtggaactgtgaataaattaaatctctttcctttataaattacccagtcttgagcatgtctttattagcagtgtgagaatggactaatacagtttccaatggtttatagaatatttagaaacagatacatttttcagacaactggatttattttgacttctattatttcaaaatgtgactaaaaacaaaagtgaaactacttttttctaatttcatattaaagaaaaacagcaagatcaaatgaatcaagatgcaatttcacccaaatgtcatattaagtaaaagactagataacgttttgccatttacactatagttacagatattttataagatgctcacagatgcctgtgtctgcctgggttgccatttatggggttttttttctcatgtaaatcctagaataacccttgcaattaaggacgattcttaccacagcttttgtaaccttaggccccatctatgctaatgaacaaaaatgtgtgacgctgtgactatcattaaaactaaaaagaaaatttgaaaaaaataaataagacctctctgccatgttgagccatgactcatcagttccactggaaagtctcttttaattggaaacaggagctgctctctgacattggtgcacagtcttggtttggcttattttaatgcactttgaatgctgaagctatcaatttgtacagaccattttaatgtactgctggggggaaaagaactcaacaagaaatagttaacracttacacatttttttattagtttttcttcccagatactttctacagtcctaaatgggataaattgggtaagaatgcatgtcaggatatgtttttatttcagtggctgtgtttagctatggcaaatttccaatgaataaaaagccctgaggaatgtgtgtgtgtggggtgttgtgtgtgtgtgtgtgtgtgtgtttgtctgggtgtgtgcgtacccctagcaactgcatatagaaaatgaaatagaaatgtaagaagaggaggatattcctctaactacagatagcaagacatttcaaaaagcgtttttatctccccattgaatgaaaactgtccaataaattcctcatagcctgaagtcatcctcatattatgatggatacatttttaaataaataagatgccttatgccataggcaattatttttccagattattttattttctatttacactcattgcttttgagggcctgtgatatttgtgccatggatttgttgcacctgtcacttgacactttgcataaaacacgtggcaaagctactcttctcctgtcttgtctcttaccagtctgactgagctacttgtgagtcttgcatgatttactggtactctagtgtatttcgggtcttgtagagcttattggtactctagtgctttgcagatgttaaatgcttggtaaagaatttgtttcctttacaaccatcagaaaactgtttctcagaaaaaattctatctatggaatcccacaatgttgaaggctttcagtaagcactagctcatgcatggcacatggtgggcactcctgtctgctacggcagagttattctgatgtactcacccccaatcaaccattgctgggctcccaccctctcttcctcttccatggctgtggctgggagcacaaagttccaagagggtagcaggagcagcctgcctagaaagcgtggccccacccttctggggtagtgctgcccgcaaacacccctggggatgcaaacagcccttaaaggattgtttttgtctgtatcctattttatctgtgactaacattttggaagaaaaccgtttttgtatttagacactcgaacttcctgtgtcatgtggttctttcccaagtggttgactgtcactgtgtggtcttttacaagccctttgctggcagagaaccacgtgtcttttttgattcatcactgcttctcttcctgagtgcctagtctagggccctagacatggtgggggacaaacatcttcactgatgatgatgatgacaagagaaaaccgtggatgcctgcggagagggtatccagagagcgccataacttaaagatgatgaatttgtgaaagtttgaatttgactctggtaaatggcaacacactggtacttctgaaactgctttaaaagacatcttaaaacaawgtaattcttggaagtacaggaagatttaagatactctctgcttttggaaactmattaaattaaataaatttggtttatttaatttcagttctgaaattctattatgatgacagtataaactatgtcaatggtaacttccatttattggggacataccgtgtgtgtcacccaagtgccagttacttcaaagcatctcatctacggctctacagggaagctgagcctcagagagttgcgctgattggccacgttttcaaactagggagttattggtgggtgctcggcagttccttgggtagatggtaggtgttgtcagaccttcaaagctcaatttttcagaccctaaaggctctgctttcatattatattatgagtttcccaaggaagagtgggacttactctagtacacagtaaaaacctatgccttttcagggtgaaattcaatcaaattgaaaattgaaaaggcttctgttattatgataccgtgggtgtgtaagcacaatgaacgctatgtgagctcattgacacagctcaactcagggtgcaccaaagcttgtgaactccttcagtgaaaaacctgaaagcatttcacaaacccttaagctagagactcagacctggcgctattgtcacagagtggaagcagagtgcctttgaaagggcttgtcaacaaagcttttatcagcattagcaaatcacaaagatgtgggtcactaggtaaccactatcgccccaagattttaggtctgctccactcacattaactggattcttcagcacgagcttatgtgcagcatcttcctgaagatcaaattggcatttgctaggtgggtggggaargaggcaggcagagcgagagtgcggaggatggttgggtgagaataccaggatggaaaacattaaaaaagcgtccgtggttcagggccagcctgggaagggcaagacaggaggtgggaggttggcagagtcatgtatagggtgccttttgtgaccactggataatctgacttcacgggtcaagtagtggaggttttaagcagaagggctaaatgtggatgcctgttaaacggtgactgatggaatgtggagcctgggttgggagaggtgaggtgaaagggaggggtgattgggcagcaactgccggggtgcaggggagaggcttgtagtgcggcttctgaaatcgctcctgactgcaccctaaccgatgtcagtacctcctcccttgcttctcagttagattctgctggctgagagcrttgccctaaacttctcctggatccacatcaccctgttcatgtctacaggagtcatttttctgaaacaccagtctgatcaggtcccatttttgagcaaacgccttcaaggagtctgtcctgcttcctgaacaaagcccagatgcatgagcatccctagcctgccttccccacctcttccatcatcccttgatccagtccatgctccacgaagacgccattcctcggtgctggttttcctcagtgcctagtgtcttccagctctgtgtctgccttctgcactcctttgcctgcccattatgtttcagctcccacttacaagatatcaattattgaagatttcccgtaactataaattacttaattaaagctgtgtgtcctgcgaatggttctcttcattgcctgctcagcactctggttatctgcatgcatggtacactctcattggcttcctgcctcaagggcctgcctattacgcgcctctacatccccacagggccaaatgtagccctgcgcgattctgtctgttgaatgaatgagtgaatgcattaattaacaatgaacggtactgcagtaagagctggcgcagctctggagatgtcagaccccctcttctaagtgctatgtctctacttctctacaaaggctggcttgtggccttcttggctagttggaatttaatcctttcactagcaaatattcaagcactaaatgtttacccactgctatgaactgaaggtttgtgtccctccaaaatgtatatggtgaactcctaaccctcaaggtgatggtattaggagatgggacttttgggaagtgattaggtcatgagggtagagatctcaggaatgggattagtgttcttataaaagggaactcagagagccctctcatcccttctgccgtgtgaagacacagcaagaagacagcactcatcagacacagactccaccatcaccttgatcttggccttgcaacctccagacttggagaaataaatttccgtggcttataagccatccagtctatagtatcttgttacagcaggatgagcagactaagacactcatttcttcaaaccaaattaattgaacagccaaattattacactctttattggactaaaatcatgtaaatgacattgattttttaatctagtttttctatagaataagaaaaaggagagcaataaatcaatatttagaagtattgtatacttccattttccaacattactctaattgacatgatacatgacaccatcatgtttgtttgtttaattatcagtttgttttggctaataccgattttgcagctgcccacaaagcaaatacccacaagccaaaaaataaaaaataaaaaaggaagtgtaaattctcagagacattttagggcatcataaacccatgaaacacaatttattcctaagtgaagtttttaattgaaaacctccatctttgtatcattactgaatgaagggcaaggtgatgtagcagaaatacactgagagttatcctagtcaccctggtgcattggaagcagtcatagaacaggctcatctctgcaccaatggggtccacacaaaagatgtggccatttgctccctgaattggggatcaaacatatcaacagctaaagacatgaaacaccactcattctccccaaagagcagcacgtcttttggtgtgggttccacccatctttcctagaactctccgccacaaataaagacctttggaggtcttctcagtgtttgtaactgactgtctggcgatgggctttatgaaagcatttgawgacacttgctacactcctcttgttctttatagtaaacactgtttttaatccattttaagtagcatgtaaagtccaaggctgtacatcacatgacacagtgatgtgtgtaccatattccatggtgttctctttctggtaaagtaggtagagttctttcagaaaataatacgtactttagttgccctttgattcagaaaactgaaactttgctgaattatttatcaaaaaagtataactttattagatcacataatagtagatcctatttcattattggtaagatcatcttagcatgactgataaggcagtcggggccctctgtttcctaggcttttctccgatgctgtacctccttcagcagaatgccttgagaaaatgcatattgtggtgtgtaggagattggtcagggtggtgggaacaattgtagaaagatgcaaaccttggaaggccaggggtttgcaaagcttctaaagaaaatttggctgaaggcagctgaattctcttaagagcttaggttaggtaacaaggggatgtaaagaaactgatctagataagtgagtttacttaggccccagaacctggcctttaatcrtctgcgagcaggactgctctgggtggtggggggagggtgaccatgttaattatccacaagtgtgttgactcaaagcstttgtcattaaatttgtgctgaataaatgcctgcggcaccagccagccrtggctgctgactctttacagtaccctccttggggtctgtaagcggcccggttccctaacccactctttcactagatatctgtgtctgagtgcatttgttcatccatcatttggccagggtctgcgggtctgacccaagagtggtgggagcagagcctaggctggcaaagctgtaaatatcagtggatgcagccagagtttggcttctcagctttgccggcatsctccagacacgctccgtgttctttcagtctggcaaccacatgtgccctaggactctgaggtcagcaagcacccagttgaaaggaaaaaatatcagtgtgttccctttatttttctttaatggttgaaggaaggactggcgcccactaacgggacctgaagcatcatcagtcactggcccctgttcgtgtacacatgggtggtagttcggtctgcacttgatctgtgtcacactgtgatgctttccagaaccatcctttctttggtaagtgtagtagagagtaaaaagccacaggaaatctgaatcctaacagccgcacagccagtaagctggttacgccaaaacaggctggttccctccttattcgttcaccaaacagtaaggagttggagcctgccctgtcctgacactgtgtgcacggcgaggaatacacagtgaaccgcaccaggaacatataggatcttaacttctgaggaatttgtttagcctgtctacggcccagtttcctcatcaggaatgaggaaattagatcagatgatgtacagatgtaaactgctgcttttaatcagcctttaattttactttatactgtaatgaaaccaacttcttatactggatgactttgggtggggtcttattaggtggtggccagacctttggcctccaactgctattccacaggccctttgtaaggaaattttgtgactaagggaagggtatcaataaacctaaggaggcctggcctatgaataggcctgagcagaaatgttctggcatttttaaattttacacttgtgtgctgagccctgagctggcaatttgtgcacatgattgcatggaaatcttagcacgagtgttagatgttactctcccctttaagaagtggttctacgtagccgccacattgctcctctgygcttacccctcaacgatgggttatatgcagaagaaataattgagaaatcatctactttattttttattgattttttaaaattatactttaagttctagggtacatgtgcacaacatgcaggttcgttacataggtgtacatgtgccatgttggtttgctgcccccatcaactcgtcgtttacgttaggtatttctcctaatgccatccctcccccaggcccccatcccccaaccagccccgatgtgtgatgttccccttcctctgtccatatgttctcattgttcaactcccacctatgagtgagaacacatggtgtttggttttctgtccttgtgatagtttgctgagaatgatggtttccagcttcatccatgtcccagcaaaggacatgaactcatccttttttatggctgcatagtattgcatggtatatatgtgccatattttcttaatccagtctatcattgatggacatttgggttgtctccaagtcttcgctattgtgaatagtgctgcaataaacatacatgtgcatgtgtctttatagtagcttgaaagtcatctactttaaaaagggcataggacttttcctggaaaaagacatttctaaataagaagtgttgaatggcataatgtattctaagaaagaccagtgcagaccaacttgtttatttcaatttatttccattgtcttattttccaaatattttgtgttcattattaatagaaggcaaggcttctgtaggaattcaactatcgtatcttccagctttcttctcaagcactttttagattaaaagtaattcaggaaaatgtttttagtagcagcatcattcctttagggaacactttttaataaattatcagaccaaactgtttaaataaaaatgatattagtagaatgtgtgtgtccatctgcaaccttgagtttcctgtgggatgaaaatgtatttcccaaggtctcaaagtcagaggcatgcgattcctatgggaaacagaagcgaatgtgtttttctcccagtgctaaccttgcatgattgatcataagagctgtagatttattctaattttgcttataaggtttttttgttgttgttgcctttctttgaagcatgaaacactgccagaggcaggaacccgggcttaatggaccaagagcatgagctgagagagcatctccccagtttatattcatttggcaatgagaaagtattttaatgttaacacattatgttacggtattgtgaaaacaaacattttggcttaagtacagtagggattcttgctttggttattccaaagatcatctcaactcttctgtcttcaggaaagttttaagactcgtttcataaattgtagtttagcctttttattagaactggaaatagcttttggcgccactaatgaattttatgtgtttctgctggtgtccccaaagtaaattactgtaactaatgtggcactgtctctttttgtaactgttagctgctgaaagcaaaagagaaatttgtctaaagtcaaaatattaacagttttatttattacaagatgtcaagaggaaagagtataatttctgcggatttgagaccagactgaggcctttcataatgaggcttttcatagtaagacttccttcccgtaattcaaagaaaagtgaaaaattaatgtgttgtgtttattatcaaatattagatgaccctttagtagaagtcaaagcagccattaaattagccagttcaatataaacatacatatttcttatttcttttaaccgtaaccaaatgtttactgaatattaaagcacagtgcaagaaaaggtgctttcttagccaaagccatgttttctgttttacttatgtcttcattctttcctttttacccatttttggctcatctgcaaaaccaatgtagtttcataaaatcattaggaaaataatgggtgttagagagtatacacaggcactaaggtagttatgacaaaaccaaaacccacatgactttcagattaaaaagcaggggcataatctaatattttattcaagagctctgttgacattgcaaaaagataacaaatgcttgatttggataagcttttcaaaaaagcagtttttaaaaagctgtctgtcgctcccttactggtctatatttgcttacagttgaggataatatttatactgtttaaaaagacatcctgaataatgtgacactggaagtgtatatacccatatttttgtgttgctagggaatactacaataaaatcctttttgtatctattatttatgcattcacttacaagacttatgtctgtatatacatcttttttaagggaaaacatggttgaagagaggcagaaaaactaggatatcatagtaggaagcacaccagagagccagaatagggaaagtaatgggagtcccagcttggggatatctcagacttctgtggttaagggtcttggcaggtgccctcagtggactcacccataggctctcgagtgttaactatggctttgtacatgattgtatttttacaattttatacacatttttctattatctttttcttagaaacaggctggggctcatgcaatctattgtaaatagctatagcacatgaaatagacagcctaagaaaaagcggaaaagaaaagagacattgccaactcagatatgcttttgccaagacaagtgagcaacgcagatgagccacaagagcagatgatttccaaactgcataggtttgatgtaggtgtgattctttttcagtttgttagcaccaagaagtacatagcattctgagaatttagtgttttaaacagaataataagtcaccttgaaaattcatttcagaaggaacaagaaaattgtcaagttctctgatttcttttgtttctccaattctttctcactcttcctcttcctcataaatcaactttcccagaagcctaaagttaatacaatcccaggagagggcatgaggtagtggcagctctggtcagataagagacagaagaggaacagaacctctctttcaggctcacatggactgtggggtggagggaagacctgtgtccatgacaagaaggctgcatagagtgtgggggaggatgagaggtgagggcttgtggctctgcttcctgctgggggctgcagcagtggccaggcaggagcacagtggcttcaggtagagaatgcctgggcacagctcccagaacctcctttaggggcctggggaggggcagggaggtcgctggaaaggggcaggcctggtgctggctactgagcaaacggagcctaccatcagagcctacggggcagacctgcgtgcccaggaattgaatgggaatggcggccagatcttcagaggctacacagccctaagcaaagagagaactttcccttttcaaagaagtyagcagccagagcaggtggtgacagggagaccactactgcagcagctggtgaggaatagagggcagccccccatctgcaaacagcctggggacccctcctctcactcaccatgaggacccagtcaccaccttggaaaggaggtgcgaggagttggagacagggggcctaacaggtaccaaaagcgctcgttacaccagcagatactgagataggcggcatacacgtggtaaggcatcctctctggggagaaaaacagagggtggcttaagcggaaggtgagatcagatattgaggaaattaagaagtgacttttttttctacaatggaatgtgatgtgtgaatttgtcacttggtaacatactaggagtgagtgtgggtggcctatgttgtagagcacgtctccttcctccttgattcacrtcctttctcatttatgggtgaccagcaaggttaactagatcagtagctttaaagttctttcctatgaaccaaaatgtgcggctgtaatggttaattttaggtgtcgacttgactggattaaggaatagctagagagctggtatagtgttattttggggtgtgtttgtgagggtgtttccagaggaggttgggatgtgagtccaagtggattgattggggaaggggaagatcagcccttaatgtggacgggccccattcaggctcctgggggcctatatagaggaaaaacaaaggaaaacaaattagtttctctttactggagctgggatacactctcctcctcctgcccttggacatcaggaccccaggacccccagccttgggactcaaggactttcatcagcacccaacccccaccagcctcagactgagaattacactatcagcttctctggttccaaggttttgggatttggactgagccacacgaccagcatcccagggtcttcagcttgtagatggcctgtcctagaacttgtcaacctccatcatcacatgagccaattcctctaagaaatctcccctcatatatgtatctttatctacctaaagatctatcctattgcttctgtctctctggagaagcctgactaatagagtggcacatgacagacagcaaaaccctggcccctttgagcctctcccctgcaccctcacccaggctgtcaggggcattgatggtaagcatcaacagaagaatgcagaaactcaagtgagcccttgaagcaccgaacataaaggtggacaggaggcaccttgccagaatccccctggatagtcatcggaattatacagcctatcctccatctcactgccttccatggtgaccatttcctggttgagaatctttgttgaaatgaaagagatgtgctgataaaagaaaaagatggggaaacttctctgtaaaccaaagacacgttgtctctggcccagtgcttgccaagaagagcttgaaggttttttaacatagatgaatcaaaacaaaaattttccttccatgactgtaggttgttcaaatatccacgcattggatcccttagttactatcctgaccaataatctatgtaaactctagaagttggagtcttaaagttgagaggtaatcctgtccaggaaatgtcgatgcaaagtggagattcggattcctctgatgttcctgtctacacagtgagaggtgatgctagtagtggtttcttccctcttatccctgaattctgtcctccttccattccatgtgatacctacatccgacataattcctatcaaacaaatcaattcagtgagaggaactaccaaggttcaggtcgagaaattttacagaattccttaacgtcattcattttcctgagaatggcgaggaagaaggtgtcttgggacaatgggctgtacagcgtgggagtcaaggatctaaagccaacaggaccaatggaaatataatgtgtaccagctgggcacagtggctcacacctgtaatcccagcactttgggaggccgaggcgggcggatcacctgaggtcaggagttcaagaccagcctggccaacatggtgaaaccccatctctactaaaaatacaaaaaaaaaaaaaaaattagctgggcatggtggcatatgcctgtagtcccaggtacttcaggaggctgaggcaggagaatcgttcaaattcaggaggtggaggttgcagtgagctgagatcacaccattgcactccagcctgggagacagagcaagactccatctccaaaaaaaaaaaaaaaaaaaaaaagaataatgtgtaccaattatacaattatagaattgtaagctttctaatagccacattaaaggtgaagttaattttaataatatattttatataacctaatacatccaaaatattataattttaacatgtaatcgatgtaaaaattattgagatactttctgatttcacacagagtcttcaaaatccagcatgtatttcacagtcctctctccattcagcatagacgcactgagataaccacttgtggcttgcagctaccatattggagggtacagttctagactctgctgtctcagagaccccaattcaagtcaagggctactgctgcttcataccaagtgtgactggataaattgctctctcagcctcagttctctcatttaggaaatggtaatagtaatatttcagggtcactgtgagatttaaaataaaactatctatacaaagagcttaaactgataccaagtaagaaccctgtaaatgttagttattgttatatagatatcattattaccaattttatcatatgaaaagtttatagtgtaacaattatcgatagacctattgaaaaaaataaaaaacttctgctgtaactaccattacctggacatagaacagtaaaacaggaaagtaaggagaagaaaaaaaaaaaaaagcagcttagcaaatgactttccctatggtggccttagctactctgggcatcgagattgcgtcactcttttttttttttttttttttaatgaagacagtttttgtaaaggcttgctttacaggcttgccaaaaattcttgtgccggtgaccatatgtctgtgaaaccaggcaatctgtgtccttgctaccttgtagatcttcagcctttttgtgattaacaaaatgacctttcagacccggcggattcagaaccacttcaggctctgccaggactttctgtctcttccaagtgaagagcatctgctgccctctgccgaaaactgctgctactgtggctcatttttctatcacttctgcttcaccagaaccactcaagaatgaagatgaatgcgaagtcagcttggcagctccatggcgccctttgtggtttcttgacctggtggctaaaatccttcctccartgaaaaacatttttagtatctttaattacacttagtgaaagtaagacacgagtgcggttttaatcttctagatggtcttttggattaaaattagatttatacatttgcataataaaagtaatgttgtgaaagaaagcagtttgagtgtgtgagagataattgcatctgtacaagctgtcttggggcggctcttatggaactgggctcagcattagacattataccactgtagcattttgcatttttatgcggcagtgcaatagaatttgaattttatgcacaattagtcttatattgatgtattgtttgtaggtaggtttgggcataatactgagaataaacctttagtttaattttttggtatttttctggaaaaagaaaagtgagagagaaaaggaaaagctggggaaaaatttgggcaagcaaaaaaaaatttggacatagtcttttaccttgagagagtgtctgttgcattcaaagattctgtggctttccgggcaaaacacaaagtacttcccttgtgcattgcttattgaagttgttcatatcctggggcaacaaggtcaggagagggaaaggattatcaaaccaaataactccttttctcaaagcagcagttgaaaaatgggagctgtgcttagggaattaacgagcatgggatataaaataaagttccacaccaaacacttcatgtacgataggaaaaaaatatatgttgcagtttgctagaacatgtgtagtaaatccaaagtaacattgattaagcaaattgtcatgaacacagagtagttcttatgatcatacataattccaagcttcagtgtggaagtggagagrtacagcacccgtttggtgtcccatacactggttctacctgcacattttggtcagatttaggtgagccttaaggattttactttctcacagtctttttcctttgttgtaattcattgatgagtacattaaagcattttctaatagacaaggaatctaccgatttaacaggaaggcccaggccatatcttccgattggcagttctggcactggcttcctgggattgtaataggttgccccccatcccatgccatttcatatgtaaaacatgtttgtaccttcaaatctattgtataatctattagcttattcaaacctccacttatgttggatatgagaarcacctagctaaaaagaaataagaaaaaatataaataccacaaacccatctcactaaagtttgtcattatattcctccctgaaaactctgtggtaatcacacagtgtgcaagttcctggtcccatacactgtatgctggctttacagtaattgagtctaaaacctcaatgagtctgttttaaaggtatagcgaaatgtagattgttaataacggagcaagtacattttcttctcatcagcattttcctgatttgccaatgcagtactaaaaatattttaagtaccaaaagaagcttctgcacacctaaagaaatttatcgtcagagtgaacaggcagcctacacaatgggagaaaatttttgcactctatccatctgacaaagggctactatcaagaatctacaaagaacttaaacaaatttacaagaaaaaatcaaccccatcaaaaagtgggtgaaggatatgaacagacacttctcaaaagaagacatttacgcggccaacaagcatatgaaaaaaagctcatcatcactggtcattggagaaatgaaatcaaaaccacaatgagataccatctcacaccaattagaatggtgatcattaaaaagtcaggaaacaacagatgctggagaggatgtggagaaataggaatgcttttacactgatagtggaagtgtaaattagttcaaccattgtggaacacagtgtggcaattcctcaaggatctagaaccagaaataccatttgacccagcaatctcattactgggtatatacccaaatgattataaatcattttactgtaaagacacatgcacacatatgtttactacagcactgttcacaatagcaaagacttggaaccaacccaaatgcccatcaatgatagactggataaagcaaatgtgacacatatacaccatggaatactttgcagccttaagggggtgagttcatgtcctttgcagggacatggatgaagctggaaaccatcactctcagcaaactgacacaggaacagaaaaccaaacaccacatgttctcactcgtaagtgggagttgaacagtgagaacatatggatacagggaggggaacatcacacactggggcccgttgggtggtggggggctaggggagggatagcattaggagaaatacctaatgtaggtgacgggttgatgggtgcagcaaaccactatggcatgtgtatatctatgtaacgaacctgcatgttctgcacatgtatcccagcacttaaagtataattaaaaaaaaaaaaaagaacacatggaaaaatgggtgtgcacatcactggggacattttatttttacacactaattttcccttcagcagtcctaatagtggtttaaagtttaaaagggatgggatgagtccggcccctccccttgcagggagagcaggaggcaaacctgttgtgttgtgttgctttcgcaaatgaaataccttttactctgagctgcaaaggctaccaaataaagaagcacacagagctatgtgtcaggagggagtaaaaatgaacagagcaggacagggagttcaggcaagttgacaggccacacgagagttcagcagagcatcaaagtcagtgcatcagcagcaaggggtggtagctaggaggagggctggggagagagagcggccagaagagagacgggagaccctgagggagtcctggtgagaagtgtgtgttaccattcaggctattggaggccataagcagcacgaacccaactacagatgcttacccgagagagggtgattttcctcacataacaaaaaggtcggggtacgtggtcctggcatggattcatgatgttgtgtgaaggcagctcgtctgcagttctctccccctttgcttcatagtcaggtccacgttgcagccactgcagccrtcagctccccattgcatgcaggaggagagkgaggcaaaagcttccttaggaactcactgcagattctgccctgtggcattgccacggttgtatcacatgaccccctttatggaaagagagcaaggcatggggccggagcaagggtcctggcarcccacgttgctgccacagcctttggctggctggctgtttgccggtgcttgtggctattgtaacatagttggatgcattggtagtttagtggtcattcaggaatcctgaaatttcattcttctcttcatcgacactctgctgttttttcctagctaaaatttggagctgagttttatgagaacagccatgaaagtattgacatatttataccctgagtatttctctagaccagatatttaactttcactgaaataaaaaatattttcaatctctctaaattctaccaactttttattggtccttaatattaataatagctttggggttattgtaaaagtgtggatgaggagatgaagggagggttagggggcagcagaaaggcagcctagaagccccaaaataacacaaaaggcatctagctgtttcaagacccctctctatatgcttatcatctcattaaaagaaaaatgtgtaggttggtgcaaaagaaattacagtttttgctattaaaagtaatggaaaaaattgcaataacttttgcatcaacctaatatttttgcatcttcattcttcaaaggacctatcagactccagcatctcatagaaatatacagtttcagtgttctctctctctctctctctctctctctctctgtcttcctctcccagaaaactaaaaataagaaactgctgttgttgccaagggggatggaaggaggaaatkctgggaggtcagcttcagtatccacctccaaatagacacagtggctgcctgcagcctgacatttcaagattgattaagggtgggggaaaggagagtaatattaagcgaagattttgtttgaatttctgtaaatgtcatttgatttctgccacctgtcaaaatttcatgtattagtggcaccaaatagatttgtttttataaaactagacattcccactgtagtgtctatacatatatgtgaaacaatatcaactatttaaatgtctgtattaaataactgataagaagtcttagacacctactataccagaaatattgagaaatacaatctcaacatagtctagatttcagtccggtggtgcacttctaaatagatattaccatagccttctgatggcatacatttgcacatgtgcttactaatgcaaggcatgctaaaagatgttttaaagccttttctagctttgtttaaattatgtttgtctcaaatctgtttctctttgttgttgttgagttgcttaatagagccctctttggtcctcagtgaattggtttaaaataatgtctccatcactaaaaatatttattgtggtaggcagaattgtaaagagggtcctccaagattctgtcctctagttatgccattaaacacgaatgcagctacagctataaaggtcacagacctcaaatagggaggctctccaaactcacccctggagaccttaaaagcaaccagagagatgtggctgaagagaaaggtggaggcatgcatagagatggaggggaagcaggagaagcttttgagacacccctgctggctgtgaagcaggcagggagtacaggtgcctccaggtagacagcaaggaaaagggacctcaatcctacatccctacaaaactgaaatttgctacaacttgaatgagcttgaaagcaggttcttctccagagccccacagagcagtgctggactttgatcttggcctttgggattctgggcagaggagaagctgagctacgctgtgcccggacttctgaaccacagaaactatgagataaatggatattgttttaagctggttttatggtgatttattataatggcagtagaaaatgaatactgacatacctcagagatattgcagattcagttccagcccactgcaataaagcaaatccttatctttttgctgggagagggtcttaccttcatgttgatggctgctgactgatcagggttgcggctgctgaagcttgacgtggctgtggcaatttctaagacaacggtgatgtttgccacatcactggactcttttttcatgaaagatgtctctgtagcatgtgatgctgtttgatagcattttacccacagtagaacaactttcaaaattggagtcgatcctctcaaactttctcaaagctactgcttgatcaactaagtttatgtaattttcaaaatcctttattgtcatttcaacaatgttcccagtgtcttcaccagaagtagattccaacttaaaaaaaaaaaatctttgcgcatccataagaagcaactcctgatcagttcatgttttatcatgagattgctgcaattgagtcacatcttcaggctccacttgtatttccagttcttctgtggtttccaatacatctgagttatttcctacattgaagtcttgaagccctcagagtcatccaggagggatgaaattgacttcctccaaactcctgttatgttgatattttgaccttctacaaatcatgaatgttcttaatggcatctagaatggtgaatcctttccagaaggttttcagtgtactttgcccagatccatcagaggactttttatggcagctatttccttatgaaatatatttcttaataagactcaaaagttgaaattatcccttcatctgttgtgttagcaggcatgaaaacattcacctccttggacatctccatcagagctcttgggtaaccaggtccattgtcattgagcagtaatattttgaaaggaatatttctttctgagcagtaggtctcaacagtgggcttaaaatattcattaaaccatgtgcatctgtaaacaaatgtgctctcatcctgtctttgccattccatttatagagcacagtcagagatttcacataattcttttttttttttttttttttttttgagatggagtctgactgtcacccaggctggagtgcagcggcatgatctcagctcactgcaacctctgcctcccaggttcaagcaattctcctgcctcggcctcctgagtagctgggactacaggctcacgccaccacgcctggctaatttttgtatttttagtagagagggggtttcaccatgttggccaggctggtcgtgaactcctgacttcaaatgatccacctgcttcggcctcccaaagtgctggaattatgggtgtgagccaccgcgcctggctgatatcacataattcttaagggccctagcatttttggaatggtaaatgagcattggtttctacttaaagtcaccagctatattagctcctaaggagaatcagcctgtcatttgaagctttgaagccagtcattgacttctccatgacatcttcttccaatagaaggctctttcatctacattgaaaacctgtggtttagtgtagccaccttcatcaatgatcttagctagatcttctggatgacttgctgcggtttctatatcagcacttgctgcttcaccttgcactttatgtgatggaggtggcttctttccttaagcttcatgagccaacctctcatagtttcaaacttttgttatgcagcttcctcacctctctcagccttcatagaattgaagagagggccttgctctggattatgctttggcttaatggagtattgtgattggtttaatctcctatccagaacactcaaactttctccatatcagcaataaggctgtttgctttcttatcatttgtgtgttcacaggagtagcattttaaatgtccttcaatagctcctggtttgcattcccagttcacagcttggctagctgtttggtgcaagagatctagaacttgacatgccttcctcaccaagcttaatcatttctagtttttgatttaaagtagaagttgtgtgactcttcctttcacttgaacacttggaggccattgtaggtttattaattggcctaacttaaattgttatgactcagggaataaggaggcctgaggagaaggggcaagacaggggaaggtctggttagtggagcagtcagaacacacacaacactttaccagttcagtccaccctcttatgtgggcacatttcatggtgctcccaaacaatcacaatggtaacatccaagatcactgatcacaggtcaccataacaaatatgatgatgacaaaaaagtttgaaatagtgtgagaattaccaaaaatggacagagactgaaagtgagcacacactgttgggaaaatggcatcaacagacttgctcgatgcagggttgccataaaccttcaatgcgtaaaaactgcagcatctgtaaaatgcagtgaagtgacacacaagaagaagaggtgtgcctgtgctgtaagagagaagtaagttctagacccacagattttgggtgaagctcaagctcgccctgcatatacgcacatagactcacattatttccaygcctggtggttccattgatcatctttccatcacatcttttttaacagccctaattaatagattttatgtactcaattattcattgggattaactgagttgtaaaaccagamaaaaaccacagtggcccctatatttggatggctttagacrtgagaacaaggcttcaagctcctgtttcagggcatcgatagttttcagctgcaaatcagatcctatccccgccctcaaaatgctccagtaactgccctttataattagaataaaattcaaacaactctatctgtgagtgccagattcctctctacctcttcggtgacaccttgtgaccacccctctcctatcacaacctctggccacgtggacgacccttctttccaacacaagcaccttggctctgctatggacaccccggccaagcccaggcccctcctggcatcctctttcctgggcactgtgcacagctgatagcctcccccagaccttcctccacatcctccctggaccaccctggccccattgcctccctggtttatttgctcctcctgttctacttgttacggcacccaatatcaagcaacacaacatcctgggttgtttgaggtgtttattttctcttcttcactgtcatatccctggtactcctcacagtgcctggtccatagaggttcttaaatttgtgtgtgtgtgtgtgtgtgtgtgtgtgtgtgtgtgtattattaatatacatatacatttttcttagttatatattaatatatatttattgaataaattaataaataagtgggtcaatcaaccaacgaaatacctgccctgtttctgttttgcccgtaatttttagaggtacgtattttggtggtgctgaaggaccttacaaaagataactccctatgggcagcgttcagaagcagctcgcggacatcccagctcccggctttgcccccagagtcagaacccactttcccaccacaggccagctcccatgcaacgctgggcaagttgccctctttgtgacacagggacagtgttagtaatgattccttagtgcttttgggatgagttgatgaaataattcagtttgagttcctagcatagtgcttggcacataatacaatttattaatatctttttacatgaataatgataaaataattctgcactctgagtcattgcctcattcaaaaaattttttttgcttattttgtgaatcaaatgatgaccttaaaaatatatcaatgacttttctttgtaaactatggggaacagtctcatagctaattattcaaaacaattcgactcctttgaagctattggaaaagcattctcctttcatgtgcttctggtcctcagtgaaacagcaggttcttggtgactggagaactctaaccgtagtccagcccccaggcactgcgactccccaagctgagtccagcacagacctcgccctgaatctccatgcccaaaacctgcctgttagtagatcttcacttgcagtgttttcttagggttttttgttttggttttggtggaatagggaaaaacaggttcttaaaggaaagttcatgtattatcatctcaggcccagctcaactttgccaaccatctgcccgaagccccatctcctagaagcttttctgttatttaatttcaatatttcatcaaagaaacctcacatttgtcatttagtgttaaatatctgtaaactactcactttccttattcctatagaatcacttttcattcttttgtagtttcaccaaatagttattaagatgccattgaactaaaaaacagtatcattttcttcatcatcaagaaaaaataaaaaaacactgttaatgaactctgaaagactttgtatcacttcaaatttctcagacttatatttaatacttatcaaaagtgctcttagagtagaaatatatgagacactttttcattatttatcccccttgtacatgtataaaaaattaaaagtaaaatagattaagatatttttaacacattcaaaatgcaatctcctagctagctcacttgcagtgtcagaattatggttgtcccataattggacatatgggacctatgtcccataattcagaaactatggtttccaaataccatgctctcaacaagcaagagtgctgaagatgctgcccttagttaaggagtgagcagctactgtctttggaattttcttctaagctcctgacagctattctgtatgtttgacgggcatgtgcaggcaatgacaactgtgacaacattgccacctggatgacaacctaagctgcagcctaattatagtaataataataaaataaatcagtgaaagagcccaagatgaatcttaggataaaaaattctaggctgggtatggtggctcatgcctgtaatcctagcactttgggaggccgaggcgggtggatcacttgaggtcaggaattcgaaaccagcctggcccacatggtgaaaccccatctctactaaaaattaaaaaaaaaaaaattagccgggcgtggtggcacacacctgtaatcccagctacgctggaggctgaggcaggagaatcacttgaacctgggaggcagagattgcagtgagccaagatcacgccactgcactccagcctgggtgacagagagagactctgtctaaaaaaaaaaaaattaaatatagtatgactatccagctatttttttcttactttaattttaactactatctgctaaattctagctatgaaagatcaatgaaggtttaatgctgtacacaacatgtgcctgcaaacacacacacacatccacacacacacctcctctattaaaagcattgttcagactaggtattataattccctttcttatacaactattttatttttcttggatttagtgattgacttggttttttcatttgcttgttcacttgggtttgggtaaagtcgtcattaattcagccccaaactttctaatagaattataaatctcttagtataatcacgaaaaatcacatatcattttctccccaatttttccaattggagacatgcattctgaggtcccactcctcctgaggctgtcaggaccctccagcacagcggagggcactgtcgtccacattgtcccgaatgccaggtttattctgcactgatttttctctctattgtccccccaacactagatcaatggtttgtctgggaatagggaaacctaggtaaggcactattttctttcagaatgttgaaggcattctgttcaagctttcagggctggtggctgaagtccaaggccattctgattcttgttcctgttctcccccagcccatcatccatttgctcactgtgacggctgtccttggctcaggccttcctcattcattgttctgggcctacttatacagtggctccttgaagccagaaacctatgaccttctatactgggaaacatctttgtatttaattatttgatatttttctccactttattttctctttctgggattcctacatcttggatatgaaacgtgttaggtcaattctttgtttttctttctttaaatctcccatctcctgtttcccattcctctacctctttgctcttctttcaaagagatttctccaaacttgttttccaaactgactaaatttttaaaattttctgccgtcatcattttaatatttaagaccgcttctttttctccaaatattttttctttataccattatcttatctattcaaagaaattgattgtagttgagtgtttgttgtgtttgatttttttaagtcttctactcttccctaaattgttttctgtttccttttcagtttcttggagtctcttacctttggtactgaagactttctccagatgtcttgtcttcatttgcttttcattcatactttttttaaaagcattttaaaaaaactgattggaaaccgtgtgcaaggtcaggcttsttaaattctgcatttcacctgagtacctgtagtagagcagtgaacaggatgtgaggaaggggcacacctgcacccaaacactggactatttctagggtggtaggactccacaactgcagatagaaagtctacaataatgtcctgcccagtggtggggaggtgtagggttttattaaatctggatgccgtcagtctggaagggaggcagaacaaaggggttgagctatcaccaatcaacatgcagtcatccatgtaattccctgatttcaataaagcccctcatctcccccccatgctgtgccaggtggcctgagcccagatccactctgtagggctactctgggaaaagaacattttgtcttcagcctggggaagcagggaaagttgccagcttcataggctggggggtgggatgctgtcatcttactgctcactgtatgagattttcaagtacttattctcatttgggccctttcttttctctgaatttgccagggacctggatcctccagtcctgggccttccggtggtgctgcacctaaatggccttgattatgactgaatttcccttctgcagacagtgaggctttagctttctctgctctgctaaatacagtaggttctaccattccatctgtgttctatgatttgattaacatctctcttctgattttttcttctctctcaaactctttgtccttatagatttatttcccttctgcaccaatatcattttagtcaggctttaggaagtaggagatttaaacacatttgttcagtctgccacatggaactggaacacttgtttttcttttttcagttactgtcaccaccatccctactggtcaaaattggaaacyctgaagtcatcccagactccttcttttaccacatctaggtagtcaccaactcctctcaatgctacctactagttagctcttaaatgtgtctcccagcctcccttcctcctgctgtgtgtttagtgtacgctcacatcacacttaactggagagttgagcagcttccacattggccttccaatatcagcctgttcttcacaccaaccctgccattgtgactctaaaacaggaattgatgacattttccctaaaatgtttttatggctcccccagacctttgggatagaaaaacagtctctgtccatgaaaagaaaacacttcattacatacaaaaccttctgcatttcctcgaacccccatctccacctcctaggactrccaccaccacaggcccccaaagagcttatggttggttcctgaggaaactcttggctcagggtgtttgcacacatgtccgcatcttgctgtagagcccctattttctcctctggctgataccataggatgcttttctctatatgccactcatcagagggttgtaatttctgcttggcattgttctttagagagggtagtccagacgggtgcagtggctcatacctgtaatcccagcacttcgggaggccgaggcaggcagactacttgaggccaggggttcgagaccagcctggccaacgtggggaaaccccatctctactaagtacaaaaattacctgggcgtggtggcacgtgtctgtaatcccagctacttgggaggctgaggcaggagaatcgcttgaacctgggaggcagagcttgtagtgagccaagatcgcgccactgcactccatcctgggtgacagagcaagactccatctcaaaaaaaaaaaaaaagagagagggcagcccctttctgctatttacaatggtgtcaaaacatctgtatgacatggctaccactaaaaatagaatagattgctattacctatggccatgctgcattgagcatttgaaatatcaaaatacatatgtgtgtaaatgtatatgtgtctgtgtgcacatgtacattctatatgtacatgtaatatatatgcacatatacacatacgggtacatagctgtatatatgttttctcacaaaagaatgtgaactgttatattttaatgcatttttctccaaagctgcaatgatctaatatgaaattctcagctttgaaaggggtggatggtacacagatcctttgaaaaattacatcacagaaatactgtgagaatgcagaaatattagatgttgaggaactcaaatatgtttctctaaaatatagaataaaatagaatataaatttaaatctgtattttattctaattkatgttattttttaatcaaagagaaaaaagctaatctaagattttcagtaacaagtaaatccctttatggtgtctcttaagaatgtgtcagatttctctcttttttggggacagaatctcacttgtcgcccaggctggaatgcagtggtatcatttcagctcgctgcaacctccacctcccaggctcaagtgattctcttgcctcagcctcctgcgtagctggaattacaggtatgtgccagctcacccrgctcttttttgtatttttggtagagacagggtttcgccatgttagcaaggctggtctcgaactcctgttctcaagtgatccgcccaccttggcctcccaaagtgttgggattacaggcatgaaccgttcatgcttgccaatgtgtcagatttctaacctaaacactgtgcattcagagactcattctcatctctataaagtaggatcaaatccgtggcctgaagttgagcaaccatgctgcaagttcttcctccagctgaataaactccatttgacttcgattctggccacccgttctgccctaaaggcctagggagttgttagccgagtagattggaggctaagtttgtcttctgcacccccatccatatcaccatggtggaggctttctgttgtgtaaagaatgccatcctcctggaggcagcttcatgactcctactttgaaaaccygctctagctgaaaggctcaaagttatgtcttaaactaaatggtctggattgtctctgtgttttgaaggtgctttttttaatttacaagaacttgtttagtttcaaatagttgacctctttttaaggttcaaccctggaaaaaaaagaaaagcattgatctctatattaacgtagcttatcatgtgggcttaaaagtctcctgtcttagtccatctgggctgctataatgagatcccatagaccaggtggcttataaacaacagaattttattgctcacagttctggaggcttggcagtccaagacaaagtctctggcagatttggtgtctggcgagggcccacttcctcatagatggtgccctcttatgcatcctcacatagtagaaggggctgttttatacgggtactaattgagatgcatggacactcatgagagacataaacattcagaccatagcttctcccattttcctccttctcttggatttccctttcagctcagcagctcactctaatcttactcatttctaaagacccaggtcaaatttgctgtcctctgtgaggcattcccagagcttatggaaataattttgtcccacatgggttcctgaagaagttccatrtatctgctacttccccaaaccccatcaaaatgatacggaaggagttaaaatagtgtaagtccacaagaacacaaagagttagagagaagataaaagtcaggtaagagaggtcaacaaaatttcagaacacagagggaagagtgaataaaatagaagtgttaaaagataaactaaggcgtattaaaattttaaacagcttatgtgcgcaaacagtgatttatgaatctagccacaagtggtcagagctccaccacaggtcattgaagggaaagcttttataggataaatttggaagcaaataaattatgtaattggctaaagtttgaacaattaccttatttggacgattcccatgggaagttcagaacaatataactaattccaagttgactgcctgtgatcagctgagttcaagtttcatcttttaaattagccgatcataggaaatgagtctgagttatatttcagtttgctgatttaggaacccggggttttagagccacctctgtctgatggcctcccatttaattattttcacagaagatagtcaatatggtgccaaaaaaaaatcggcaatttagcactgttgctgctacgcttatgaatgtggatccaacccttaatgttgtgattctcattttccttgtttctaaactaaggatgattcagtctttctggtctactggaaatatttcttgttcaggtcaagggaagtaatgtgggtgaagggctttgaaaactgtgtagacctttataaaaacagaagtctttattagtaccattatcagtctgcctcttactgtacttaaatatttgtttatgtatcccctcaactaagctgtgggctctttgagggcaaggattagatcttgtttatattccctagagttcttagtttactcataataagcattcatttgctgagctgcattagtattggcctaataagttaccaacacattcttaaagtgctctgaaatgcagatctaaatgttgaaatgaagtaaatacaagttatgctaaatttttaagttcagagaaagaaatcctatcttttgagcaatcacttgatgctggagatggctgattatttacagtccagcagtctacagagagcaaatctctcagcagttctaaccttgacayttctctctcacattaaaatattccttgagggacaactcaatgttaacattttgtaaggaaatakagcatgactaacaggccctatgcaacaaacagaagtaagtccaaatgaatgagcacttttatactctcagtaaattatagcagagatgctaaggctactgggagacaagccggtgttgaatttcacttgcacccagttttgttttagtaagattatttctgtggaaggttttttttatagcttaagtaattgatgtaaaaattcagtgtcatacgtagaaatagcacaaattctaattgtgtttggaaagttactttggaagacagatgatagataaatagagagatacattgaatggttggttgattagattgattgattggataaaatagattacatagataagataggtaggtaaatcgataggcaaattagatagadagatagatagatagatagatagatagataatctcccctaaatatacttagataaaaatatggttattagataacagctttagtcaaccactgaaagatggcaagtgatacgaattattttacttcatcacattgaattagcttcttttgatatttaaatacagcattacatgcaccctgttaaaaaaataacagtttttagttttgctaaatacattgtgtcttaaataatgatgacttaaaatccactatatgccgggcgcggtggctcatgcctgtaatcccagcactttgggaggccgaggtgggcggatcacgaggtcaggagatccagaccatcctggctaacacggtgaaaccccgtctctactaaaaatacaaaaaattagccaggcgtggtggcgggcacctgtaatcccagctactcgggaggctgaggcaggagaatggcgtgaacctgggaggyggagcttgcagtgagccgagaycgcgccactgcactccagcctgggctacagagcgaaactccgtccaaaaaaaaaaaaaaaatccactatattagacatttctatacatttccatcaaagaaaagcccaggatctgatggccttattgctgaattctaccaaatacttaaagaagaattaatgttaattctcctcaaagtattccaaaatatagtatgaagaggtagggcctttggggagttacaagatcatgagggcagagtccacatgactggattagtacccttatctaatagacccaaaggagcttgtttgcccctttcaccaagtgaggacacaactaggagcactaccaatggggaagaagccttcagcagacaccaaatctgccagcaccttgatcttggacttcccagcctccagaactgtgagaaataaattttttttgtctaagctacccagtttatggtattttgtcgtaatagcctgaacagactaagacataaatagaaaaacaaatatattcaatatgaagtcaaatggtaaattcttagaaatgtaatgttgagtaatttgagatacagtcttgattatttagaaaagattcatatagtttaggatgactttgttgtaagctgacacttaggaattttcaataataaatacactgatgaattatgagtgaatggatgaaagaatgattcccaagggtaactgtaatgaattttttaataggagtttggtttatttttttccctaggagttgggtaatagtggttttgaatagttttctaatttttgccctgacctgtaagattatgacttagctgctttaatagtgtcttctgagaagaaagagagaaaaggggaatcagggaggaagggaaaagggaaagaaagaatgaaataagaaaggaaagaaagacccatctagtaggtgagaacattttcttctttcccacacatatatccccataatatgccttgtcttaggtaaaaagtttaactgaggttagtgttggagatgtagcatcaatctgcattaacaaaagcatgccagttcaacagaaccgtaattttctagagtatattgtatacggagtatattaactaactaactagtactgtctgggtatatcaataaagacatacctagagggtagaaactgggcccaaattatctcttacctaaagtatctaattattatgacctactacttggacagagaatgattaacaaatgcttgttgaaaaaattaccatcagaatcactgactcagtgtgatcccaggcaagcatggatttgaacaggaggatgcagttggaagaagtccacccagatgaatgaggatagaaaaggaagaccgttcagagagggtgatgggatttgaagtatcctctgggagtggaaaagaatataactctagctgatcaaaatgcacaaagaaaaggggtagagaaataacagaaaaggatgagagaaagaagaaataataataccaagtaaggaataaaaattaggctattcaaaatagcaatttggggaacttctaaggattcaatacccagagcttttctaagaaaatgaactgtacaataaaaagaaattatatcattaattgaatgttaatataacagattttaaagaagtggttgaagaaacaaacatggtgttttcacgtgtgcgggatgtttgggaaaattgcaccattgggtctcgcctttgtcatcatagacacccagtagcagaaacatttgagaatccctgtgttgctgtctctgtacattcctcacccatcaacatttgattgttttctttccaaaaataaacgaaagcccaatttttaagaaaatactttgggagtgtttgaggcttttaagaacaaatgagaaatagaaaactgggtagctagcgagagatcattatgttaccccatccctatcccagcactgccaaacacagctagaacaattcaagctgatgggagcacagaaattgctgtaagccaggctttggttgaatttaatgaaagtttacctggtataaagggaagtccaatgccttccttattttcaaatgacatgtccaagatgccctgtctcaaatgtaagtcaactgtaattccaatgaggcaatcattttgctcttgaatttcagaactctaaagaaacgttatttttatcagaacaatagtcttaaggataagttacaaaatacatcttttggttaggttaagtggcaattgcatgttaaaagaatggtcttctcagatccttctattttctatgatttgatctcctttgatctgtctcctcccatctgagtgtcaatgattttatatagtgacagatggaaatcaacattgcactagcaggatctgagtcacaagaatatatccattgtcacccattgtattagtttccyagggctgccaaaaaacaatctgccacaagcttggatggcttaaaacaacaggaacttactgtctcattgtcctgggagcctgaagtctgcaatcaagttgttggcaggactgagctccctctgaaggctctgggaaggatctgctcccaccccttgtctgagctttggtgttgccaggagtcggcattcctcggcttgtggctgcatcactcagacagctgatctgttatcacatggctttgtctctgtgtgtctttgtgtctcttttcttcttacaaggacaagagttatattgtattagggcccaccctcatgaccttatcttaatttgattacttctacaaagattttattcccaaatgaggttatattcattggtacttagggttaagacttgaacatatctctttggggagtaaattcaacccataacatccatggccacccaacatccaaagaaaaaggatagttggaagaagtatgttacaagaagagtttactaatctatctgctgtacatactttcgtaacatatattgttaaatatcctgtatcttatgctttgaaggaagaaaaacacattccatcgagtggatgcttatgataaactagctaatgaattagagaaagataatcatgttttatacaaaattcatataatatagaaatcatatgcgtgtatatgttttgggtttttactccagcctctcattgctaagaaggcaaattaaaattcttaagattcagaatgcttaaatgcagaatgaatgcttaatgtgaccaagcccgtrtgttaagtagataactcacggtgatctctctctttcatttgcaggtcttttctctctcttataattaacatttggatgtacaaaattatgttccatgctatcatacaattgaatgtttctcaatatagagctttatcagactttcatgctgataaatgcaagtttgtcgtgtatacatctgtttctatgagtttatggcttatgagtttgtatttaaatgtcacatacttgtttctttcacccagagcactaggcatcgagcatagttggaggaccacacaactaatttatctattcattcaattaggaagcttttattgagcatctgctgcatgtcaaacactgtgctaggccctacagatattaagacaatgttattttcctcaagagatttatactctagtaactagttcttaattttgttatgttttgttttgattactgacacctttgagaatctgattaaaaccataggaccttctccccttctgcactaagaaaaatgcacacacagaattgtgcatgcatttaagtaggtacatgaactaccctaactgtgtgtacgcacacatgtgtgtatgtgggtttagaatatgtgtgtgtgtgtgtgtgtgtgtgcgcacgctggatcagaggacagaccttttatttactcacagaacatcatagcagcaccagtacctcatgcactaatctcccatggtatggtacagtgagggccacatgtgcctgcatgggcagggctttctccccaggagaggacctctggaattatgaaacttggagcttacatagagtaactgtcacacttgtcccttctccactccagagagagagagagagagtcgggggtggagggcagcaaggcaggaagttttgtccgggaatgtggaagaatcttctctgaagaaaggagagaaaggtccccagttttgtcacccctgggtaagtgaatggctgcagaggagatgagcctttacatgtcacaggaacaagtcactatctcgaattccaaggcatgttcaccattcggtcattctttaacttgggttgccagtaatccttactcaataagccctagctatgcagaaatgtgaaatatgaaaatattcatggagcacagcttcctttagctacaataacagaaaacctgaccagctgaggtctgaaacctgagaacatttgctgtttagttatgagaagtccagaggttggcaggtgagggctctgtttaggagctaacacttctgtgaagccctgggctcctcctttcggcatgtgttcatcaccccatgcccacaggtgctgcagctcaagataacatctcatcaccctggaatccaaacaggargaaaagcgtgaggcccaaagcctcttgttcttttgaatttctctctaggtatcaggaagtgatagactccccagaagcccccagcagtcttcccggtacttttcattggccaagactaggtcctatgaacactcctaatacagtcactgtacacggagaataggattcttgaggcaaactgagattagccatcaattctctgagtcagagagtccctgctgccgagacatggaaggctctcaggccaggtcttgcatcaaatcatcttcagggaagaaagaggtagagaactattgtgtaggcaaagataggagttggtcagcactttcattctcctacaaccattgttataactaatgggcactagctcttaaatgatcagaaaaataatctagtgtaactctccttccagacagaaatgcaccgacttaattatgagcatagggaccaccaggaagggatttagtaggctttttttgtgtgtgctaaatgttcctaggggtttcttgtcgatatcgctgggaccactggtgggtgaaaggcaaggyagacatgaatggaggctgagaagtgggagacaagttgaggaataaagggaaaaaatagcaaaccaaagttggaaaacaatgtcagaaaaagaaaaacatacatattgtgaagagtattgtttaaatagttgttttcctatacaataagcactagtaaagatagaaatcttccaaataagtgattctctgacttttaggtgtaaactgttttagtggtgaataacttttatttccagaaaagtgtttttttttaacctccaaccatagtaatgtgtttctctcctcttgttctgccttctctttagggaaagagcaccttggtcatcattctctagataaaataagcaaaggcagttgcgttctgcctcatgctcaaggggaacrtgccaagaatgtgtcgaaacacaaaaatgrgtcctcaaccctgataggtatagcaagctttgtacagctggcagctccacgctgtcagtctccttgcagtccccactcctcaccccgaccccatgtctgcaagtcccctgtccttctgtgtggatctttcagctgtcccctgccaccggccactccacaggacaacattagttgcaggtatttcttgtctttctgtttcaaatgcaacctctgatgtggatttaaagttgtcagtggagttagtcagaggcagcctagagaagtgacccaggaatgttctttcttttttcactttcccgccgtaaattatagcaccacctccttccttttggctgataagcaatcaaattgccataaaggtgatcaaccctgtggcatagtaaagatcactgcaaataatgtgatccccctcccaatgagaggtaggttctacttccctgccctgtgaatttgggctgacctcaccctgcttgcactgagttcagtggaaaaagacactctgccaggcctagctcttgacatgactgtcagcttccgtcttggccttcgtgaagagtcctgggctttcatatgagaaatccagatacattgaggccaccatgttgtcaggaagtccaagctaaccacatggagtgtctgcgtggaaagagattgtgaaaagaataaaaagtaaggggtggtttgtaacacaacaatgggaaagcaggtaaaacccagtgtcataacagaagcctttactttcatacttttcttgagcttgaataacatagctcccctgcctcttgtctgtgtgtatgaaattcctacatctcgccccacactgtgggttcctttggagtatcttgttgtcggtggtttgttgaatgtgagagattaccagaaaaacttccctctcaactttttgccgtatttgaacactgacaacgtgttctttgatgttcttgtaatacatgggtgcaagaatttgtgctgttttatctgacacacaatagaaacaagtatataattattttgtcactactttatagtcacactatggagtcaacaattacattgtaggtttagatttctcacggcattgtttgtccttttgaatagcacaaagggtacccacccaatacagtcacattttccattggattttgctttcttggggacccccccaaccagtgttcatgtagttgaagaacttgtattgatccatgttcgtttaggtatccctgcttctgcctatctgatttgactgtttttcctctctagaatgtataattttgtaatccacttgtttccttattttcttgtttcacttatttttttcttttcttcactattattttattacctataattttcttgcacatgtagttacattttcaaatataaaaaaaccagtgtttttagttgttcaagttattcagtcaacttgaaatttcataacttctatgtaaaaatatttayatattttaactgtgtaagtgttatactagaaacaacttaactggtgatgtcataaatcaaatatgtgaccctgtaatgagaggctcatgtcatgagataataaattctaaagcagacagtttgactgaattctaacaaaaatctgagagaaaatatattattgtgtcctacgggtgtcttgatattggaaagaagtgacatgaatttgttgttcaaagggaagaggtgtggcctgccactcttcttgaaagccatcattttctttgcctttgggtttcttgatgtcttctcccatcttgcccacagcctcttcccctctttctttccttccttctctctttccttgtttctctcataagacagagctgggatggggatctgggaggaagaggagacaggctgaggacagaaaattgatgaaccaatttttgttgatttctacatcttgaagagtgttaaattgatttgtaaatagatttggcatgaagtccagcagtcagttctttttttgtttgtttttttgagacggagtcttgctctgtcacccaggctggagtgcagtagaatggtcttggctcactgcaacctctgcctcsagggttcaagtgattctcctgcctcagccyctcaagtagctgggattacaggcatgcgccaccataccctgctgggtttttgttttttgttttttktttttagtagagatggggtttcactatgttggccaggctggtctcaaactcctgacctcgtgatctgcccacctcagcctcccaaagtgctgggattacaggcatgagccactgcgcccggcctccagcagtcaattctatcacctccacctatttgacccctgagcatcatgacttggtgtgtcactctctactctccaaacactcaccttcttctcttggctacaactggataatttataagctttgccaatgtggcatccgaagcagaactcctcgagccctctctcgctcttccccagtcttcctactctcagtagaaggcaccactgtccagccggttcctcaggataaaagtggcagcgcaacccctgcctccttttcctttgtctgctccacagggcagcccaccagcaagacctgctggcctcaccttccagcccccaggtgccatcacctcccacctgaccgctgcactgctgaccacaggccacagccagagcctcctaactgggctccctggatcttgttttgctcccccagactattccagagttcagggttggggattggccaatattagcttgaaagcagcctcaccatatattagttttgtgacactgggcaggtttatgcacctttccctgcctcactgtcctcatccattaaatggggataatgaaaatatcaatagccctgccctcacactcaaagcagcccgtaaggactaaggaggtgatccatgcgaagcactcggaacagctcctgggatgcagttgacatgcgatgttattagttcataatgattgtcgttattattagttcgtaattattttctatacagtaaggggacagatcaccttttaaatatagaggattatgggaagatggcctggttatgtaggatgttaacagcagcggacgtggggtgcagcgcatctgaggacgctctgtgcagtcgttacaactcttctgtaaatctcacattattataatgtagaatgccttctaaaatatgaaggctatgacatcactaccatgtgcaagtcctccagtgccttctccctactctcggaattaaacttcaacccttgagaccatcacgatctggcccctggccaggagtcatttccttcaggtcctgcggtgacctcctgcctctcccgccagccctcctatcctggcggcaccctggcccgcagacctgtctgctctgcttgtgttccctcgtcctcctagtgctggtcctggctgtcccttggtctgcacaagggacctccctagtgaagactttgctgatgttccagatcctccctctccctccaacagtttccctgcttcatctttctccatagcccttagggttttctctctttagtttgtgtacttaagtatcatctagtggagtgtaaatcccctgagcataggaactgtgtctaatcgtctgtattcctcttatctagaccagttcctggcatttggattttgtgccatatatatttgtagaaggaatrtaggcataatcagaacattaatatcatcaaatgatattgatattctttcgtctactagccccacattatataaacagaagagtatattaaagagaatattaaaactaatcaaaattaacagatgggcttaatgcattgtctccttatattttgctcctcagtctttaaggtagaaattcgtttctgcatatccaaaatcctacattcaacaatcatgaagcattacctcaacctagtgtctgtcaaccccctgtatctatgggttccacaactgaggagtcacccaactgcagatagaaaatatttggaaaaaatgaacataaaaaatgacacaacgataaaaataatacaaataaaattgcaatataacaactatttacatagcattgactttgtattagatatacataatctagggatgattttaagtatatgggaggatgtgcataggttatatagaaatactacatcattgtatatcagagacttgagcaattgtcactttggcatcccaaaggagtagtggaatcaatactccttggacgccaagggacaaccgtacaggtaaggcttggattcttaaaaaaaaaatgcatattcaatatcctgttagaaaagatgagtttaccttgtcttctaaagggccgggtaaaaatggcattattcctttccttgttctccattagaatatcttatagttagagaaaactaacatagaataggctgtacagaattattggatattcagttgattaagcacatcatttgactccattcataacactattcaattagtttcagtagcaatcaaaaaataaagaactggccttaccttcggatatttgaaacattgctttagactgcactgacttgattatggtccagattgtctgtggatgttgtggaaactcaaattttctcagctgtaaaaaacaaaaaacaaggcaaagctaaacaaaacaaacaaaaaaacaacattgaactatccagtaagtattcagaaaactctagccggggagccctcctgtgggagagggtggaggtggttttctgtgctgtagctatagctggctgtgctgttcgagtgtcatttccttcaggcccagtaagctttaaaacaaagtggatgcctcccctagtgatactgagtgacttttttttaccaaaggaaatgtctttttctttgaactttctaattttgacataattttagactcatgagaaaaggtgcaagagaaagaatttttcatacattcttcaactagatacccacatgctgacactgaccacatttgtttcttcctgtctccatctgtgtacatatgtgcatatattttttttctgaatcctttgagagtaagttgccaacatgatggtcctttacttctgaagattgcagaatatgttttctcaataccggagtaatctgttatgtaaccacagtataatgatcgaagtcaggaaattagcattgatgccatactttacacaaaccttatttaaatttcaaaatttatcctcagtacatacctaatagtaagaagaaaatcccagctcacatgttgcatccagttgccacatctctttagacccctcttatctagactattatgtctagtctattatgactgtggaattttttatgagcgcaggacagttattttgtagactatccttcaatttgtgtttgtctaatgtttcctcctgtttagactcaagttatgcaattttttttttttttttgagacagagtctcactctgtcgtcacccaggctggagtgcagtggcatgatcttggcccaccacaacctccacctcctgggttcaagcaattctcctgtatcagcctcccgagtagctgggattacaggcgtgtgccaccacatctggctaatttttgtatttttagtaaagatggggtttcactatgttggccagactggtcatgaactcctgacctcaactgatcggcccgcctcagcctcccaaagttctgggattacaggcgtgcgccaccacgcccagctaatttttgtatttttagtagagatggggtttcaccatgttggctaggctggtcacgaactcccgacctcaactgatccacccacctcggcctcccaaagtgctgggattacaggcgtgatccaccgtacccaaccaagttatgcatttttggcaagagtgttggaggaggatgttgtacccttctcagtaggcacacagtgtcagcttgtcccattactggtgggatgaacttggattacttggtcaaagtggtggccgtcaggtttctccactgtgaagctaattttaggatatttatttaattagatgtaaaatatatcctaaataaaattataattgcatttcagaatttaatactctagcccaggcacagtggctcacgcctgtaatctcagcacttcaggaagccaaggtgcgtggatcatctgaggtcaggagttcaaaacgagcctggccaacatggtgaaaccctgtctctagtaaaaatacaaaaaaaaaaaaaattagctgcgcatgatgtcgggcacctgtagtcccagctacttgtgaggctgctgcaggaaaatcatttgaaccaaggaggtggaggttgcagtgagctgagattgcaccactacacaccagcctgggtgacagagcaagaccctgtctccaaaaaaaaaaaaaaaaaagaatttaatccttttcaattcattgtattttaaaggaaattcaacaaaaaacatgtgcacaggtaaagatgatactgataatggcttatcagtgtctgaaaataagacaaacatctctatgcaattccatgaaagaagcaaaatcctttggaattacatacacaaaatagatggtttttgtgtgccttacatgtattttcctctttcttacatgtcgaaacttttgaaaactttgaccacgagttatctacctgaagagggagatcaaatttaacaagctctttgaaaggaaaaaaaaaaaaatctgtatttcctttcaaacttctaccatcgaatacagatactcctcatttcttagaataggtttatttgatgatgtttggttgaaccttgtctgaagtataatcttatttttcaccgactaaatccttagagtggagtgaggtgagggctttacgggagaaaggaattaaaatacgggygtctcaggtgtgacccaccctgtggtgtgcagacctgcagtggaccctgaagcacaggcgctctcagcagcggggcgtctctgcgcgtcctccttaccctggcttctgcagcacttgctcctgctcagatctgctggtgtatttcagcaggtttcttgacggcatgccgtatactatgtcctgatgttgttgaaattagaagcttttgtttctaggaaatatactatttctcattctagtcattccttaagaaaccaagaactaaaactacatgctacaaatggccttctgttacaaatattctctctgaattatggcttggtaaggctgccagataaactagaggataccggttacatttgcatttcaggttaacaaaaatatctgggtcaggcttaggctaaaaaaaaaggacttggtactttactgaaactcaaatttaactgggtgtcctgtatttttatttgctaaatctggcagtcctaggcttgtgccaaaattaagttctgtccttctctcaagagccactttgggtttattttctagagatgatggtgtcctctcaaaaaccactttgggtgtattttctagggattgtggtgccctctttgttctgattgctgggaaactcagaaccaagttggtggctcacatggatcagtatcatggggctttacggtatgcaccgagaggtccagccccacctcccagtttgcccttacttttattgccatcactttcccttttccagtcttcccttcattaaaaaaagcaagagcaacaccagcaaaccaacttgtttgttgcaaatatccttaaattgcttcatagccttttactgaatgaggcacagaatgagttagaataacacattgattattgatacccatagagtaaatttttttttttggcgaggggacagagtttcgctcttgttgcccaggctggaatgcagtggcgcctcttcggctcaccacaacctgcctcctcctgaggcaattctcctgcctcagcctcccaggtagctgggattataggcatgagccaccacgcctggctgatttttgcatttttagtagagacggggttttgccatgttagccaggctggtctcgaactcctgaccttgtgatccacccgactcggcctcccaaagtgctgggattacaggcatgagccaccgcgcccagccccccatagagtaaatttttaatcctaataattaacgctctattgacatggtcttattaatgcttatagaatatttctgtagcagtcccaagagctaaaattttactctgaattttgaatcagaaatcccaagttcagacagcaatatatgcttctaaaaacattactggttttaccagtctttaattctcaacagagactaaaatgaagagattttacatcttaagaggtgatgttactagaatccaatgctcagaatatattagatacagtgagttttatgtgttcaaaacacctttaaaaaaacaagaatgagaggaataaaagcctacacattgggttcggtgtatattgcttgggtgatgggtgcaccaaaatcccacatatcaccactaaagaacttactcatgtaaccagatactacctgtttcccaaaaacttatagaaataaaagttttttttwaaaaaaaaagcaggaatgaaactcatctttaaatagccttcattttaccataagaatgatcaaacttatttcatcattcttaacctcaggatagcattaaagtatttggcagatgaattttatctgaaacaggctttgctttatttatagttggaaaagaaaaaaatcttgattttttgtttctgaaaagatctctgttacacagacatataatgatgcccttatttttaagttaattactagcatccttaatccctcttaaaattttgtaaactatactggaaatttaggaattgatctattgtattttcattgcgtcttctttatagcttttaaacacaagctgctaaacatcaataataaagaatcgctctcctttttggcctacactgctgtgagtagacagcagagatacctcttgcttgtcttccatctaaattacatgagaatgggatttatgcaggctataaatctagtcagaataaagcctttaagtggtaaccaattttgtggtgtgtaagtatcattgatttgttaatctgagagtgtttttataaactgatttggattagtgagttctgatagcagagctattttaaggcccctcaatagcggtaagtgtagtgaaaacaaggcagtgaaaattaacccattgaccccacctataaatttaaatcacagcctttgaaaggagagagcagtctcattatatgtagcttgctagtgtctagaccatactagccacagagaccatttcttcataattggttgttgttgctctggattcagaatcagtcccttggcactttgcagaatggccaactgttgtaattcttcaggaactttttgtakaaagcactattaagatgaacttagatgtaaattggggagttatatttctctgttataaaacataatgaggaagatggcttccgttctttaatatctcatagctagtgaatactagaaccatactatttcaacagaaagaatgcaaggatattctacccatggacacatgaaagagaatttttttttcagtggaaatagcagtaggaagaacaaaaatcaaagacagattttagtcttgagttttaatattgattgattgattcgtttcacaaaatctcatttagaaacggagcttaaggtgttggcacagaataagcgcttgcatcatgaggactggggtaatttcatttctacaccagggtagctggagtaaacgtgagcaagaacgtggaactcagtggagaaaaccaaaactcaagtcccactgacctgaattttgctatggcaatatagtgacaaaaccaaaggtgcaggttgagcacagtagctcacacctgtaatcccagtgctgtgggaggctgaggtgggaggatcacttgaagccaggagttctagatcagcttaggcaacrtagcaaaatcctgtctctatataaaaaatttaaaacttagctaggcatggtggcagatacctgcagtcctagctactctggaggctgaagctggagggaggattgctcccaggagctgaggagtttgaggctgcagtgagctatgatctcaacagtgggtgacagagtgacaccctaactgttcttttttttaaaaaaagaagcgattgaggcacagaattgcatgtttggaaaaacaattaaagaaattcttccttacaaatttacccttatggagactgagaacatgatcttaaaaaataaatacatacataagaggttactggagccaaatatgtagaggtcagtgagatttcagctgtgtattgaacctgctgcctggctgggttgtcttctgctgtgtcaagtcctcagggctgtaatcgagccagctgtagaaaataaaaaggcaagaggcaggaggaccacctacttcatgtgtttcaggactgctagggaagagccaaacggctgtccaaacttctgcaacaaagcctgaaactcatcatccctttgtgtcttaaaatgttgatgtctacatacatccactccagggacaagaaattcttattcggtttgagctacaatttgaacgctatttaattgacaatcactatttaacttaattgttagatacacaaaatttgagatgtgaatatagcagactctatttggcgtttagwatagtcttgggttttaatttctctttggtatgacatatctatctgcaaaagagggcttctgttttctaagagctcatctactaatactgattatttgacattattctgacataactgtaatcatttctgaagcaagacccactcattagtcacaaaaagccataatacacagctaagccacgtttcacaaatacaagaaaaccaaagctcacatatatgaatctaatatatcaacaaaaccttcttgtacaatgtgtagcacatagattgtgttttctctgagctgtcagtaagcatttaatggtgcccgtgtgcttcagaaagagaatgttagtgcttaactcacactctgaggcttcctcccaagtgcctccctagaaaaggaacgctgactacagataaattagataaccgggcttttttcttttaatctaaatgttgggaagaaatggaaccagattctgaagtgttctgtttggtttttctccaaatacaaattgggcttcatacaaatggagaagccattgttgacattcattgacagatctgaagcaatgcattctttatgaaatagcactgcattgctaatacagccatcccggcagccaggcttgtgctgtttaatttgtttccatggtgtgatagtataattttgacatgctgaaaaatcgctgcacagagactcatcccgcaattgttactgagcacattttcaatataacatttgttattgaggtgttcgggatgtcttctgagaagcaatwtcctaaatgaagctggatgtaggatccccctgttgtataatggagttttgtatccagcttcagcttatctcaaatctatttaaacagatattcattgcacactttttattggagggacaacagctactctcttacaataaaaccaggaaatcctcaacatcatttctttttacctttggatggcaagtgtaagggggatatgttaaaagattttcttctaataacaggccagccataaggttttttcccccaatttggcacatgaagattataatagaagaactattattatattaaattaactaatcttacaaaatagatttttgtgctttttatattatgtttaatttcagattttgcagcaccattatattcagagcaattatgtgggtgactgctctatgagtcaccagctgaaatagaaaggttgggctctggtgtcctatttgattgggaagctggaaggacaggctgtattgagcacagacatttttcataattatgttgcctgcagggttgccacctgtcctaatttgatctgattaaggtgaaatgcaaaaacggttctcatttctttcagagtggagtgatgccaagcttcatctcaggaaggaagaagagatgaatacacatacaaccaaggaggggagggttgtgtctctaatactctgggaaactgggggacattggcctcactgtgattggtggtgttaagtttstagacaaattctgaagagtgttttggcaggaatgatggaaatgttaaatggaacgatactttaacccggtggtagtcgcactttggggagtgtgtccaatttaatgcctctgaatggtttgcaaatatgcatgtctaggtgactcactgacaccaatatgatcattagggtttgcctcaaggatattgcaaaggtgcgtagccattaaaaacgatgatgtatgtctgtatcatttgacatgaaatgatgcccattcctattattaggtggaaaaaacaagttacagaatgtcatgcatagtatgatgcaacatcyttaatatcctatgtgtattgatgtaagggcatgcaatgagttatctaggagatgattcataaaaaaatactggtgactgtctctgggtggtaaaattgctaatttctacctttctcaactattttaatattttataatggcaatgaaaacaaagctattttaattttgaaaaacacctttaaaaagggaattgtaaatattaagcatttcctgaacttctcctaaataggaaaaaaaaaacctggaaatgataatctgacaccaacgcttctaagaagagaagagaaaaatacatatgccttgatgctataccctgatagtgccattatgtaactgaattttctttatttcttatcccaagatgtgttttttagcttaaacattgtctttttagaacagcttaacaccatttgtcctaactgctacctagtcgatatattatttttcattgttcctgaaagttttaaagagaatctaaaggaactatatataacctatgccctgtgtgctcagagtgacatcatatcaccagaaagaaaaaaagtaaggcatgaaagtcaaacagaaaaacattttaggctttttggtaatgctctatagttcatcatcaaaaaaytaaccagtaaatcatggatctattttggtttatggttttcaagatcttacaaaatgtgtgtgtgtgtgtgtgtgtgtgtgtgtgtgtgtgtgtgtgtgtgtgtgtgttggaataggccatctcactggaaagatgctggttggaatttagtcactggcacaagggctcccatagtctttttcctatgtcaggcctatgctgggatcagctacatggatgcagcattgagcttcccaacctgggtgaacatggatctgagtcataagacgacagctctgaactcaattcatgcatgtatgacacttacgtctggtttcatttatccttattataaaattaataatagtctgcaggccaggcgcagtgtctcacacctgtaatcccagaactttgggaggccgaggcgggcagatcacgaggtcagcagatcgagaccatcctggctaacatggtgaaaccccatctctactaaaactacaaaacaattagccaggcgaggtggcaggcgcctgtagtcccagctgcttgggaggctgaggcaggagaatggcktgaacctgggaggcggagcttgcagtgagcctagatcgcgccactgcactccagcctaggcgacagagcgagactctgtctcaaaaataataataataataataataataataatagtctgcagatgcagtctttcctagttcagattatatctgctgcgcccaacattgtaatgtatagatcttcaaagaagaactttcaactttagagactctaaattgtttcaaggtaatctcaatgttttaacaagagttggtgttctcatataggaatgtttctgctattataaaataagacgaattatccaaagaattgggttgtcattggaaattctaccttttaaaatatctcctttaaaactgttactttctgtgagccagagagccatttagaaaatgcactttacactttggtaaaaaccagtagatgaaagcaatgattccaaattcaccattcagtcatgcgtggagctctgggcacggtgagctggggagtaacaagttaagtcaaaaactccttctctgatctggaggtgttataatgtaaaatagacaagagagtggatatgttcaaagaagtatgagcgaaggacgccctaagcactgtgaagagtggactgtttcattaatgtgtgtcctcagctctctgcgcagtaaatattgagtgggtgataaaacctgaagcaggaaaggagcccttgtcagaactcactagcttagcatggcttccacaccctctgcactagcagctcggcaggaccactttcccatccctcacctttaagtcctcaaacagaatctcagccttctgagtcaacaccaattgctgatgttcattctcaggccagcgattccatttttccttcatttcttccattctatttcctgtctcttgctcactgttgatgacataggcccaacgcccttcaccttgtccataagtaagtctttgcttctgattgtccagtgactcaaacctcagacttcagcatatcctcttccgtgaccttcttccgttcagcacattatctgtgtttttagattccaggcctcttctctctcaacacttctcaaaaaaactccttttgcttatgtacttattgggcatggtagttaattgacatttttaaagtcactaaataaccaaacacaaaaacagcaaatacaatggagacaaacactttgtgaacttagaccaaaaggacagcacagaagtagtgaaatgacctttgacaggttctttcactgcagtagctttactcatgcctatgaaagttcttaaaataaaaattgatacatagagaaactttttttttttttttgagacagagtctcactctgttgcccaggctggtgcagtggcacaatctcggctcactgcaacctctgcctcccaggttcaaacctccccagtagctgggattacaagggcatgccaccacgcctggctattttgtgtgtgtgtgtgtgtgtgtgtgtgtgtgtgtgtttagtagagacaggatttcactgtgttggccaggctggtctcaaactcctgacctaaggtgatccatctgccttggcctcccaaagtgctgggattacaggtgtgagccaccatgtctggatgatagaggaagttgtaaatacacaaacacagatagatgaaagtttttcctaggataatcttcagctttgacacaccaacgatatccgtgtctattgagcttcattttctagttgataagtgcttgcttaaaacaaatttttgggctgggtgcggtggctcacacctgtaatcgcagcactttggggggccgaggcgggtggatcatgagatcaagaaatttagaccatcctgtcctaacacggtgaaatcccatctttactaaaaatacaaaaaaattagcctggcatggtggagggcgcctgtagtcctagctactggggaggctgagacaggagaatcrcttgaacctgggaggcagaggttgcagtgagccgagattgcaccactgcactccagcctggtgacagagcgagactccgtgtcaaaaaacaaacaaacaacaacaaaaaaattgtctataaatgaatttcttatgtaagtgtgcaggatgaagggctggatttaactgtctggarttgcttataccagggccatggtgcagtcacctgagccgcataccaaggctcaaggtctcgtgttttagaggcacctggttgaacacttgtgatgctgcactgcaaaacatggatagcaaatttgagctcattggtaaaactctctgacagatgagacgtgctcagattcatcattttggctaattaaaataaagaataattactaattctcgtgataaaatgcaaagatctgggcaatcaaaccatagtgtaattaacaatatactcaaagctgtgtgggttttcccgcatcatagaagctattagttgtcttttaaattggatttttgttttattttcataatctctttcaaatgtatctcaccccagcatatacactctaaatatataaaagcagggatgctatataaaagcagtgatgaatttaagtggcaatatttagagtgcttacatgggttttgttttttataagaatttgaaagatgcctttcagtaatgaatgcagttatgcctacgctaagatgaataaaagaaaccaaatgcacagaactaaagtgacaagggaaagtactgaaatgaatttaaaatacaaaattcaaaaacaaaaaataccattaagtacttgtaaaactataaactcttttctgttcccctgccccattccactttacccccagcccctctctttacctcatttttaaggaattgtgtccatttaagaaattcctccatttaaggaattgcatcaattcctaaagtccgatgacttatatttatttaatactggttttggatatgatttattttcccaaacttaatagtgcctgaatatgccctattcaggaacatgccctacaaggaaggccagtttacagagcacactctatggcgaagtatagggtacaaatataaattacacaagtttccagtttataaacaggggagtgttccataaatgttcatgtctatacattgtttggaactcagaattcttttctcctaaagaaacctcattaaccatgataattaggtgccccgctgaccctctagaccctatttaactaggccttatctgacagggatgtgcctaacctaagtgccctttttggttacacccacttgggggatgacagtcccacagattctctttcccccaacgttaactagacattgacattttcactcaggtaaccaaccaaccaccataatctgtggaaaaacatattaaagagagcacaaaattccatctccttcacttcctccctttcctttctctgatgtcaaccaaggacaaacttttgagagcagcaggagaaagaaaataatggataaggatcccttttcactctgagagcctcccattcccagtggccactcatgtgttgaccagccaaattaaatttgtgatctgagggatgctggatgttgaaaacacttgccctgtaaaatgtatcatcacaatcactcaaaatataggtcaataacaaaggaagaactttatgaaattcaaaggtgaaggcaaagcgccaagaatatacacacaattcaaaatatttaagttgttttgacattgtaatgacatacaaataagaaaaatgagaagtgtttttcatcttttgttactgcatgttctaccttgtcctctgtctcaaacctcccaaatgaccacagaaaatctattgcagagcagcrctgattagatctagtgcaggaagtgacaccatcgtgtggacagtcatggaggtgtcacaggaaagagaggtcaggggagggtgttcatagagcctggggatctgggcttaagcgcttattgcagatctttcaagtgggaaactgattggagttgagcagatcaatgacatagtagtttggggtcagtggacacagtgagacaaagtcctaaggaagccttcataaggaaactgttgtcttatacaagagctattattgcccaggtgaaccgtctgatttcctgttaagagagatggctactcagatgagcaaactgtctggttaaattatttgcaggagtttcttsaagcaaacagtgaagttatttattgctttacaagcttatcttccagggcagaattcttctggaacaaataattaggtctcagtggtctcagttctcagccccagtaggtaggctgtgtgtatgcaggtgctttcaattctcatctgcagccgagcagctgcttggattcctcaaacactccaggctttggcctctttgattccaagccacctcctctttttctttttttatacctctttggttgctctctgctcacttggctctttctacatctacttggtttgttggtgtgcgtcttatttcttctgcaagctccaggaaggcagaatccctgtctgattcatttatgatttctctatggcccctggcgttacgcatagtaagtgtacactcaagagttgttcgacgaagaatcaatgaatatttacttggaattcacctccggccaataaggataatattatttgtgaaatgaaaatttctgatcgtgtctcattatcaatgagactgattcttccctggcacctcattggaagatggatagtctcatagccactagaagctgacccagcaaggatgtttggattaatacagcagctgcaaaaaaccagaaaataccaatctgcatcaattttaatataaattatgaaatcacagctatctgagcttcatacacactatgctgagctcctaaaagatacttcrcatcttctggactggtaactgcctcatctacaagtaagaaattgaatagataatatttcatggcttctttcagcttattctgaaagcatcaaaatttacaaagtttcatgctatactactcagataagttatgtctactaattagtggttgtattggaaggttttccttctccagactacattcatgctcatatatgttcacaaactcaggtctatacgttattgaatttttattcagccttttccaaggttatttttagatgtactttaaaggtttcatctagagwtttttattatgaaaagttccagacatccagttagatatttaaagtagcataatcaatgtccatgtacacactacccggctttgatgacttcattagtttagttctttttctgcctcgatttcgccatctttaaaatggggataaaaatagtacctgccttatagggttgtcatgagtagtaaatgaattacaygcataacactgtgaagagtgttttgttcctactaagcatcatagaagtattagcttttctttttaacaattattgtaatacactttaagacagatttgaatagcagtgcccttctatggtcctgttcctctttcctcttcccttcaatttgatacatacttcaggggcgtttatcatttgcaggcattattttatattcttagtatatttgcgtgcatcgacattgtttaatagattctctaaactttctgtaaatgacattgcattgtgcataaacgattgcaacttttttctcaactttatgattttgagatttacctgttttgatacatttcactctagctaactcatattaactcaattcctaaaaatctgtgcttcagtgtcatggtctcaataagaaatgaacacttacttttacgttagccaaccctgccctttatactgttgtattttctcttttccacacagtgctaatgaccatccaaaatgttacwtcatttacctacttattagtttatttttattgtctctcgcccctttagaatgcaagctccaatgagggatttttgtctgttttaatttttcacggctgcgacccaagtgtcgtaatagtgcctggcacaaagtgggtgcacaatggctatttgttgaatgattttatctcttcttctgttgatggtcattttagatgtgtcgttttgttgttgctgttattacaaaaatgtcgcagtaaatattctattccatatctccttgtgtaaccatgtaagttactctcccgtgtgtatacctgtaagtacattattaggtggaaggtgagtatcttcaagattctccttaactggcttaggatatcttgagacagcaagtattggctacggagaaagaatgcatgaataatcctttataaataaaaacccatcagcagagagaaaggattaaaataagcttggctttatttatgaaaacgataatgctttaaacttgattctgtaaagtcctgctgctgactgaatgcaattactctgtcgagacagcttagtgagttttccagggatcctattaacgcctggctctcagactaattcagaaatggctacttcagcacagtgtatggcaaccctaatcaacctggcttagctggagtagcaagccgcccactggattccttcactgctgcagcccagcctgcacatgtggcccatgctctctggcttgtgctcagaggtcagtgttcagtctcgctgcattgtcttcgatcacattgaatcttcatttatttttgatgccattttgtcgttagtcggtttccttttctaagttgtacttaggggggaaatagaaggtcactgtaattgtcaagcccacattagggattctaagctatagccgagagagaaattaatcctcaaagcgtttcgcaccaaacagcagcaatctgcaaattgcagattatttgtgtcatgtgaccagtgccaggagcacatcagagagctgaaatccatttccatttctatcccaagcctgggtgctcacgattttccattgaacccaaaggatatcacaattgctcctgtgatgacttgcaaagaaattaaaaggaaaaatagtgatcgaagactcatgtggtttttaatgcttctcaatggaatatattttccaaatgagttttccctactttacagcatgattgttgaggaaattcaccgaaagctttctgaaaacattatggctcagttaatctctcaaaggtatttgttttgttttgttttgtttggggttgctttttctcagtagctgtcagtgactttgtggaaatgctacacaactttgtgacgcattttcattgaggagcttccccgttagatgataaaatgacctttatggtatagcaacagaataaaagtaaatgttgattacagatactaattgaaatatagagcccagtttcgcagttgtcctttaaaataagattcaatcctgtgtttatatgctttttaacaaattgtcttattcatttttaacaccaaaaagctggtattcattgaacaccaatgagctcagatttttagaaaacacaggcaacagttgagtgatgggtttaataactagaggaaaaacacgacagaagagcacaaacttgtgagcacggcatgaggatggcacggaaagaggtgacattctcttttaaatttccaaggacagcaggacgggctttaaaagtggagtccaggacaagaaaagagggaaaagatagagaagaataggctcttgtcaagaaagctaacacagtgtcagtaggtaaaaacactactcgattcctgtgtgttctgttttcttgagcaaagagaatatgtcccatgttagaaaggacagaataacaatttaaggagaaccttgtgcttaagaaaaatgatgacataatatggcatatacaaatattttaaatgccaatagatgtccaaacacttctattatagtctcagagatgctgccgggaatctttgagatacaataaagagttcagagttccggagatgattttttaacttttcagaatgaggaaaagttgaatctcaaaagttgaaaagcagtgagtttgataccagtttcacccatcaaacacccaaagaaaaaaatcatgtgagcgcttactcacgaatttcatcaggaatactcattacgtaaagtaatatgcagtcattaagagtcaacgcagatttaccaaaaatcaatgcagaagaacccatatgtgagggaggtgatgcttaaagggcatggaaggatcggacatggtctctattgctccaaatccagaagtagtactgtggtttttattcgccaggcccatgttttcctctctgccacctccgccccctccgctaacgttttcctgtctccctacgcgaatgcattctgtgggcccgtcttgcagttccagttttgttatttttaagccccatcttcacactgagtttatatctggccatttcccacactagtgtccctgtgatgagcacagtttgcagatagccrtccacggtcttctgaaatatcttgccgccttccagctcttctcatctaagtctatgctgtgtctagtcttgtttgttgtttttttgaacctaccaggtgtttcaagtaattatctagtcttctgttaaagatgtttatatacgagctatcatcaacatcagtcctttcacttgtatcttaggagacagccagaatacacattctgaagataagctaatttaaaattgtgtttcttattttatgcaggattaaaataaagccatttttctcaagtttgagtgacataaaagaccgcttgtaaagaaacaaaaaattctccaaaacacccaaggttgaatgaagttttatatatatatatatatatatatatatatatatatatatatatatataattttttttttttttttttttttgagacggagtctcgctctgtcgcccaggctggaacgcagtggcgccatctcggctcactgcaagctccgcctgccgggttcacaccattctcctgcctcagcctcccgagtagctgggactacaggcacccgccaccacgccaggctaactttttgtatttttagtagagacggggtttcactgtattagccacgatggtctcaatctcctgacctcgtgatctgcctgcctctgcctcccaaagtgctgggattacaggcgtgaaccaccgcacctggctgaataaaattatttttaagacaatatgtcttcaatgtgtctagatataaactgagctataaatactttatgcttatacaactagaaggcccaaataaaaacataccaattaaatataactgaaagtacaagaccaaaatattctgatggactctatcaatttaatacgccagagactgacactaaagcagtgcttgggatccgaacagggccctgatgagttggcccagattcaaatgttccatctcagcaggcctgggaccctgagctgtaggctgcctcccttcccccacaacttctcctgtgactctacccttcggacactcggccccagaccatgggacgtcactggcaggggaagcctcccttgccttctatccactcttttctcactcatttcaggaaactaaactatgatgacttgctcccaaagagatccaaagcacaggaactgacttgaggctgaatttcacagcagtttttgtttgaactgaagccagtcaaatgatccagaatatatttttactattgtttaggtaatcatcagaatagcaaccccaaaatcaacaacttctcaaaaagaatcttcagcctgcaagtctccgtggtctctagttggagaagcactcagctcaagcatctgtttctcacttgaaggatctggttttccttctctacagtaccagacatgcctgtgaaagctaatgtattatgttttccagtaaaatattcacttgggttatttatttatttatttatttatttattgagacagagtcttgctgttgttgcccaggctggagtgcattggcacaatttcagcccaccacaacctctgcctcccaggttcaagcgattctcctgcctcagcctcacaagtagctgggattacagatgcccgccaccatgtctgactaatttttgtatttttagtagaaacagcgtttcatcatgttggccaggctggtctcaaactcctgaccttgtgatcctcctgcctcagcctcccaaagtcctgggattacaggtgtgagccaccatgcccggccaggatttttatttattttcttggtggcatcacctgtttacacgtgtgtttaaattttgttcacatttttgtaatcttttgtactactcagtaaacatttgtgaagcactttctcaacatatgaaatgttatataatataggctaaagctatgttccagcattttacatgaccatagaattttggaattggaaataactcagtgtattagtcaggcttctcccaagaaacaggacctttctgtctataggatctataaagagaaagagacaagaggacgtttactgggggaagggctcacacaattatggcggccaagcagtccygcaatctgccatctgcaagctggaaaaccaggaaagcctttggtctaaytcagtctgtgtctgaaggcctgacaactaggggcagcaggtttgggagtcgtgtaygtcttgcagtcagaaggcctgagaaccaggaaatctgatctttaaggctctagaagagaaagagcattcaccgttctctgccttcttgttctgtgcaggccctcagtgccctcagtggatgggacgatgcctgcccacattgctgagagtggatcttcttggtccacagactcagatgccagtctctcccagaaacactctcacacacccacccagaaataacatgttatcagctatctgggcaccccttagcccaatcaagtagacacataaattcatcatcatacccagtaaaattcctctctaaaatatcctacataagtattcatttagcatgtgttgaaaaacctgcagttactgtcttataaggcagtttattccattttcttctgttggtttaaatcctactctctgaaacaatgcacagatctaatctgtatcgcaatgagcaccttcacctgtgtgaatacaggttttctcattcctcagcctgccctcccccagacaaacactctcagggcttctgaccactctcacatcacaatgctgaggaatatgagaaatggctccataatttagttgatatgtcctgcatacaatccagtttccttactaggaagttcaacagattatataatccataggtcttatctcaaagaaacaggtttttatatcaattttgtttccagagagaataatataaataagccagttacagtggctcacgcctataatcccagcactttgtgaggctgaagcgggagcgtcacttgagcccaggagcttgagaccagcctggacagcatagtgagaccccatctctacaaaaaattaggaaaaaataaaaaacttagccaggcttggtggtgcacacacctgtagtcccagctactcaggaagctgaagcaagagggtaccttcagccaggaggtcaaggctgcaatgagccatgattacacactgcaccccagcctggagttagaccctgactcaaaaaaataatagtataaatgactacaacctaatatcgaggaatagttctattgaaaagacagggatgcaacacattttaaatgatattaagcatatactggcctaaattttacatatctatacatttgggcctcgaacaatgtgaggcttaggaacaccaacatccctgaagtcaaaaaactatgtggaacttttgactcacccaaaacttaactactaataacctactgttgactagaggcccttcctataacatcaatagtctatgaacacatattttataggtcatatgtattatatactatattcttaaagtaagatagagaaaggaaaatgttattaagaaaatcatcaggaagagaaaatgtattaactatccattaagtgaaagcagatcatcataaaggttttcatcttcattctcttcacagctagtggctgaggaggaggaggagggggaagggttggtcctgctgtctcaggggtagcagaggcagaagaaaaaatctgtgtataagtggacccacaaagttcaagcccatgttgttccagggtcaactgtattttattttacatagaatatttattatatatgttatattattatatataaatatatatatttaggccaatatttatattaattatataattctataaaattrtatatttacatatataatttatatatgtgagttatataaaaatatatataactcatatctrtacattaaatataattatataatattttatacatacgtattttaattgtgtgtgtatgtgtgcatatatatatatatatatatattwtttttttttttttttttttwacctatttacttactttgttttacaactgaagaaggaaaaggtgaaagtctgaaggagcttggattgattgggtggaacgagaaagtgataggcaccagaactgctgggccttctctcttggtccttccgtaagatgccctttccaaactcaaacgcaagatctaataggtcttcacaaagcctcttgacaaaaccaggcaaggtactaaccgccagctgagccccccaaagaatggatgtstagctacccgacctttgctcttacctctcaatgagcaggcccctggccttgatggtgagcaaacaggacaygatgaataagtcagagcctgtggtcaccaactcccctactctggccctgcggaatcctggctatatatgaggaaccagtgacatgctgaacatgtttctaagaaccagagtggcatgacatcctaaggccagatcataatcagaggggagagaaagcctggccagrgtcacatgcaactgttttctaaagaggtgcggttggaggccaggcagcrgccatagctcttttgagggtttggctttttttgtggttggttagatgtgtgtttttcaggtacacgtctgtgtcctcccaaaaggcaacactggcagttgatagtcataactstgtgtaagaacatataaccacacagagtgaaartgacgtttttgtgattaattcttctttccaacagctggctgtcccaactccttgattaaagagctccatcacttcaggattctgggagaagagcaggtgagtgagcatctcaaaggctgcatcagactgtcatgaaagatagaygctaatgagacagtttgggctccccagggaggccgagtatgtctcctgaccctgggtgccctgaaatggggaagaaaaccatgctggagatatgtgtgaggacacttttttcctcttctatccatcagacctgacaggttattaattgctacatctgctatctgccagtgcagtgcatttcatctcaagactcaagcaggaagcaagcactgcatagtggcagatgagcaaacaaataaatgcagagatgaattatgcctgagggatcgatggtcrtagacattcctaagttgctgtctgtgggtgaatgtgtgagcattttttttttttttaccaggtttttgtattgggtgtttgttatctgtatttcatggcagccttttgtacacgggtatgaacatgtgacgtctatacaaagggtgaccatttgaagkggattatttaaatgctgtgttgtgctcagtgaggcgtgtcataatttaaatagatatgctaagtaaataattcagggtgctaaatattatatatatgtacacacatatatagtatggaatgcttaaaaatacgtttcttgatccctatatggaactacaaactctgtattagtatgttaaatctaggtgtcargttatccttaaaatacactaaagagttggcaaaaggctgattgacctaacttccagtgttatttattttattttatttattttttgagaaggagtcttgctctgtcgcccaggctggagtgcagtggcatgatctcagctcactgcaagctccgcctcccaggttcacgccattctcctgtctcagcctcctgagcagctgggactacaggcgcccgccaccacacccagctaattttttatatttttggtagagacggagtttcaccgtgttagccaggatggtttcgatttcctgacgtcatgatccgcctgcctctgcctcccaaagtgctgggattacaggcgtgagccatcacgcccagcccagtgttatttatttttactcctaaagattgtctctgccaactttgaccaggaaatatgcaaatggagatgtggcagctcactttcatcaatgagtttttggtttgtgtgtttttgtttggtgtatgtatgtggcaaagtaaaactgcccatttccaatatgagaataaaaacaaaaggattagtaaggagaggataagaaactggaatcactgccacatcctggagttagagaattacagtacatccccttcatttttctatattgtgagtttccagaatagcaggcataaatgtatattcaaatacaagtgaaatcagttatcccgtattgcaggtaaaagttgacaactgactctcccaaacataactccttgtgaagacacctggatctcacagccatttcccagtgaaagcctaaagacttcttaaagcaagaatcactggttgttaccctgacaattctgctcagataatggagtcttctcttcaaacttgtaccaatatttgcagtgtttccatttttgttttagagtccatgggtaattagtaaggaaagaagccaacagtaatcatcycctcagatctgctttgtaaaggtcaggtcactttgcattctcctagaaatttaattgagccataatcaaaattaatatcactacgattagttttggtaatatagtgcatcagagcaatattgatctctatttcctaaaacgcaaacacacgcgcaaacacacacacacacatgcagacatacacacacttccttctttctttcagctgatacttactgagtacctacyatgtgctatataccatcctaggttayagggatagaggagtgaaaaatctccatattctacttagagaaaaccatattrtatacacataaacacatttagtgtatattatgttagatggctatcattgctatggagaaaaaggaaatgaaaaaggacagcactcaggtgtggtggctcacacctgtaatgataacactttgggaggccaaggcaggcagatcatttgaggccagaagttcgagaccagcctggccaacatagtgaaatagtgaaaccacatctctactaaaaatacaaaatattagccaggcatggtggtgcacgcctgtaatcccagctgctctggaggctgaggcatgggaagcatttgaacccaggaggtggaggttgcagtgagccaagattgtgccactgcagtctagtctttgttacagagtgagcctctgtcacacacacacacacacacacaaaaaaaaaaaaaaaacaaggacagtgaatactggaggaagaggtgaaattttatataaggtggtcagggaaagtttcactgagcaggtgacaggtgaataaagactgaaaggtatccagagaagcctcatggtgacatctgggaaaggagatttccacagagtggatgaagcaacaacagaggctccaatgtgatcatgtgcctggctttaacattcataatagtccagaaacaagtgtgactggtggaggggaggggaggaggacagagcaaaacaaagaggaaggagccacattgcatgagatagggttgcaataataaagtgggaggaggccaggcgtggcagctcacacctgtaatcccacatctttgggaggctaaggcgaatggatcacctgaggtcaggagtctgagaccagcctgaccaacatggcgaaaccctgtctctactaaaaatacagaagttagctgggtgtggtggcgggcgcctgtaatctcagctactcaggaggctgaggcaggagaattgcttgagcctgggaggcggaggttgcagtgagccaatatcgtgccaatgcactccagcctgggtgacagagtgagactctgtctcagaaaaataataatgataataaggtgggaaaaaatccaggcaggtatcatgacctgggagccaaaggaagaaggcatctttaggaggaggaatcatgatctgtgtcctatgctcagcaagaaggacaaggatgagaaatgagcactggactccacaatgtggaggtccttggtaaccttgaccatgggcagtgaggggaaagcctgcctcgaatggattcatgtgagaggtgaaccaaagagtgggagactgcaaatacatacattttaattttggcaactgggaacttagctgaagaggaaagcaaagaaatgaggtagctgagggatggagataagaaaatgaccttcttaatgggaaaaattgcagcatgtctatgtactgatggtaatgattcagtagaggarttgggagactgatgatgcagaagggggaagggagaattcaggagcagtgtccttggatgtaggcatgggcttggacaagagagtggccagttccgcctggtaacagtgggggagacagaatatgcaggcacagacgtatgagcattggatttgatggtaaaccttgcgtagggtctctgctggttgtttctcttttcttggtgtaacaggaagctaggtcatcagctgagagtacagatcggggaagagttttagagggaaaggagatgtattagtctggtctcacattgctataagtaaatgcctgagactgggtaacttataaaggaaagaggtttaattgactcacagttccacatgactggggaggcctcaggaaacttacaatcatgacggaaggcgaaggggaagcaaggtaccttcttcaaaaggcagcaggagagaaaagtgcaagcaggggaaatgccagccaattatacaaccatcagatcttgtgaggactcattcaccatcacgagaacaccatggggggaatcatccccatgatccaatcacttccacccttggtcccgcccttgacgtgtgggcattatggggattacaattcaagatgagaatttgggtggggacacagccaaaccatgtcaggagaggataatgaaattgtcatttaggagggtgaggagggaataaacttgggaaatggttgaatttggagtgaggtcaatccactgggtgtttttctgacacactcatctgtgtaggcacagatgcagaaaaggcactggcattgaagttttgcggtcaaaatgtaacaaaaacaagagggaggctaagaagctgagggtggatctcatcttacagtgttacaacaacagtgtaagctgagggtgaatctaagggagtgattatgaccgaccatgaaatttcagctgggcaagcagagaacccagatgagagagaggacagggaaagttggttacagatgccagtggctcaaagaattttcgggatttgagtactagaagggttgaactggacaaacaggcattggccaaagaatgaaagacttcacatcgagcttgtggaggagctgcatggtcagcaccgacgaggtcagaggaggcctagggaggctgtgtgtctgatttcagatggaggacaaggtgacgagagaagttgaggtcatggaattgggaagtcggagagttgggagtaccacccctgtgcacgctgagatcttccagaattgcaaactgaagatttgagaaatgagagagagagagagaaatggatgtcagtagctgacagcagaaggggaaatagtgcatggtgtaggctgatgggttgaaatggaaagttggagggctttagaaggagaaagggaaaatgttttacttacaacactgtagagcaatgctttgtggtactgggattgcagacacaaaaacatttgagggtgctgcaggcgaagtagtgtcctcagggacacgcctgtttcagttagggaagaatgtaagaaaaacattgagaaagcagattgcagtcatagggcagttactgctgattgcccatgagttccccaagcatgggggaagggtctcagggtttggggcagctggaatatgtggtaggaaaaaggatacacagagtggatgtggagcttggggctcagcctggagagatggaacaggagtcaggcattctttggtgactgtcgtgaacagggcatatcagtcagggacgtttatatcctgattattcatgacaagacctactggcctctaggcagatggtggcaatgaggctcccgagaggaagcagagagctcttgtcccagcattcctgccagcggtgggggcaactgctccaggagctggtgaaactcttgggatctcactggatgcttgaggcaactgttatcacttgataaaataaaatgtttatattaatgtctgttacaagcatccttggacaaatcatttttgtttctctaacttagctttttgtagacaagggagagtgaagctcaatcatctcttagaatatttgtaaataaataggttgccaagtaagttgcaaatattgtgctatactaaaattcctctgattttaaatgctgtttatattccagctttacatagtggcaacaaaatagacagtaaagtaagcgtaatactcacttagaaagtgagttgataaaacctacaaaaatgctggttaattactaattcattactgtatggcagagacccacagcagacctctaatttctttgtatgtggttcctttctgttttcgttgatctttagtaggtatcttgattttttagatttggattaaaaattaaacactrtgtatcactgccttcccaaaataaaaataaactccttaaaataatacatttatattagcttcttagccccttctctgatttgtgttcacaattcatattcatatagcacctttcaacactccttccccctagtccaaattctttggcaaagacattatcacattgtaggaaactaaagtcactctgcagttccaggtgagcccttcagaaatcaggtatgatgtctggagtcaataggtttgtagggcctttgaaccaattgcatttcagaagtacctccatttataccagcttcctccaccttaggtttaatcacygaaattttatggaaataacctttatccattcaacaaaaatgtattgaatactttcttgtactattattgtgctagtgttggataaaatagtaaatgaggaagtcacagttactgatcataattgatgctaggatgaaaacaaatagggatgtcacctactttagatgaggggtagttgaggagccctgagactaagcgttgaggggacaccagctattgaaggagctagcattatgggagtgggcagaagagcatcccaagcagaggaaagcacacatccagtgcccccaaggaggtgaagagcttgctttattcaagacactaaattaaaccaaggtggctggaaaatactgagcaggaaggacagtgccaaaagatgaaggccacctggaccaaggacaccagggttaagcatatgggttttgttctgagtttagtgggaaatccttgaaggtttaagcaaggggttagcattatccaaattacattttgagtatgtcaatcttgttgcaatatggagaggctctggattaagacagttggcagcggagacaaaaagaagtgaatcttgagaggcagaattcaaggacttggtgactgactggctgtgggtcagggaaaggaaggagtttgaaagttctatttgactgagatgagcaaaatggggcaggtgagatcagaggcatgggatctgagcttcaattctgaacacatttgctatgcctgaagcatggagaaggagataagtcgggacttggatgtgtgagtgagagcttggaggacagtgagacctgaggtccgagatggagagataactttggaattaccagcatgtagaggaaattttaaacccatggggattctcagaagaagccaagaaaggagagaccgtgattggatgaaccgtaaggaacaccagtgtttggaaattgggtaaagagcagcaaccaacaaaggagaccaagaaggaacctcaaggaaagtagaagacaatccagggccatatggtgttgaggaagctgagaaggcaagaaggcgggccttccggaggaggaatggcaatttgtggtgttgaggaagccaagaaggcgggtcctccagaggagaatggcgatttatggtgttgaggaagccgagaaggcaggccttccagaggagaaatgctgatttatggtgttggggaagccaagaaggcggggcttccagaggaggaatgctgatttatggtgtttgggaagctgagaaggtggggcttccagaggaggaatgctgatttatggtgttggggaagctgagaaggcgggccttccagaggaggaatggtgatttgtgttgaatgctactgagagtttgcagaagatgaggtcagggagcgtccttcgcctgtgrcactgtggcaaaagtcacgaatgaccataatgagcagttttgggggatgcgtaaagacaggagccagagttttatgggatgaagagtgaacagaaggggaggataattccttctagagggtttgctatgaagagaaagagaaatgcagcaaccacaagacagttctttaaagatcgaagggccagaacttgttttacactcacaggaaggattccacagagatgaattaccggtaatttgagagagagatccaagaactgaagaagggaagtactttggaaggcaagaagggctcagatccagcagagagggaggaatcggcccctaacaggaggaaggccactttttgtgttgtgagaggggctggagagggtgagtgcaggtgcaggtgtgttcrtagttgcagggatgtgaagaggagagatgcagtatgatggctccacgaaggaagatgtcatttttcactgctgcgtcttccacatagaagagtacttgacacttagagtgtgcttaggaaacatctgttgagcacatcaggacatcagccatgattcctctctcctcagtgaaatataaagtatggatggctggagagaggcaggtcctacctacattggtcttaggaaccaaaaaattggtgcaactccagataaaagtaataaattcattttcttctataactacttcactgttatcctaattctactaattatcataactattaccaacatttataaaaatatttcttacccttgctatgtgaaaacttctatctcctatgcttttgtaactatcctcatttcatcttttttatttcaccccttttttcggcgggttgaggggaagaaagaagagagaacatgtcactggagaaacacaatacaatcttgaggaagttgtaaatgcccatttgaagtttgtggtccattatttaagagaaagtcatcgtgccattgtgtccagctgcagggctacacgcccagggaaggtggaggtgatgttttccaggcgtggaattttgccatcagataaagaagaccacggaaatctgtgttttccaggcaatgcttctggtggtagatgacagaagctgtcagaccaggaaggaaggtgggcctggagaggcccatggctggagaggaaatatggggccaattaattagacgtcttgatgaagttgaagaatttaagcaatgttcatactttagcaagagatttggaaagataagaggtgatcatcagaaagagacatatttggaattgggatttcagaggtggtacagtttctcaggatgacagagcctggggatggaccgtgcgaatagaaggatgagaaaaaggtcagcaggatgagaaggtaaaacagaaagaatagattgatggtggcttattcatacaggagttcaagtccccagaatgatgacaagaatcggagaaaaggtgagaacagcctaaagctacagtcttcaagaatgaggggctgcatccaggagatcagggggcagcagtgaggaggtgagggtgaagcatgggtctcaaaggagtggtgggttttgcaagggagaggaacccaagcatttgggggcgtcgttaaggagccaagggacaaccatcttcacctctggccttgaaagatgtgaatatgaaatgaaaagcagccttcacttgaaaaggttgcaagggagatggatcagtttcagttaagtcagtgtggacagggaaacctttcaaaaggctgattatacagggcagttagtttatcatgaacaggaatttcaggggacacagaaaaaaggcttaggagagagggaagcatggaaattggctgatattaggaaacgtatggacccatatgggactgacagtttgggtgataagaatgacaggcagcttgagcctctgaagcaatgatgtggggcatgagggatgcattgtgatgatctttggagggacgtaggtggacatccagagcacctggctgttgttacctgtgctcaggtgtgccttggcattaaggcagcttctcggctttcaccccaaaaggcttcctcagtgttagaggcttgtccatttcagatagttataaatatgaagccatctaatacaatccacatgattttaaaaaatattttggttcatccaagttctaattagatcattaaatgctcagtggagctaacccatttcactgccccacccgtagccttacacaaaacttccagacaatgacatgtcacccttccctcagaatcacctagaaaccatcgcagttgcttcaggactggacaaagagcttctagagaataagcagaaagaagagaggtgaaaatactgaattcagggaaagaaaaagactagggagccaggaaggaggatggtggcagtgacctgtgccccagctcctttcaaggaaggcagaggcaacgctcatttatctgaggggcaaggctcttggatttgcagatttaggtgctaccctaacactgtttctctgggatgagagcaaagagtgaaataatttacagccacagacaaccctgctttctgcagtgcgctccatcaggagacgcttcaccaccctgtttccatagtctacaggagtctctgaagtcacatcagctgtaggaactcttgtgaggaaaacagcctttgtagccctcccctgaaaggggagctacactggaagtgggtgctgctccgtgtcacacatggagaggggacaaggaagccagttgatttggatctcttttccagaagattccacaactactagaagatgagatgctttttggcattgggtcacctgaaatatctggaaaaaaaaaaaccaaaaacttcttaaactgtgcttccggatatgatctgttgcttgtttttttttgtttactggtttttttttttttttttttaggtcttgtttgatgttgcctctttgcatttgatttcagccatcttgatagttttttctatgcaattaacaaggtccagccctttctctagccaattcacttcatcagtagctgacagatgttcagggatgaagaaaacattattagcaacagaatagagaagaaaaacagcagggtcatgggggccaccacttaggctgtcacagatgctctcaggctaactacctgcaaatgaaaaaaaaaggaagatgaagattactgacaatctaaggagtgcttcttttttgaaaaaaatttctaatgcgtatagaaaatgggacattatctgcatagcaaggagaaatggctaaatcataagctgatgttcctctctgacgttattatagtttttttaatccaaagaggaagttctataataaactrtttttcattagtttctaaaagatggcagaggaatagtgagctgaattttcttttttttttttttgagaaagtctcattctgttgcccaagctagagtgcagtggtgtgatcacagctcactgaagccttgaacttctaggctcaaatgatcctctcacctcagcctcctgagtagctgggactacaggtacatgccaccatgcccaggtaattttttttwaattttttgtmgaaatggggtcttgctgtgttgcctaggctggcctcaaactcctggtctcaaacgatcctcccacgtcagcctcccaaagtgcttggattacagacatgagtcactatacctgactgaattttttttaatagaagggaataagagaaagaggcagctgggtattgtggaaagcgtggtcttgaaagtttcagccttagttctaatgcagcactgtgggttctctgcctgtgtggatgtcagcaaaagatggcacttctttgtggctccgaggccacatccatcacttcacagagtggacagagaattaaccgagcagcaaagtgtcggtgccgtggtttggttcactgcagtagctcagtgaacagaagcctgatcacgacccctctgctctaggagggattgagggagaagcccagggagggagtccccgaagtgcttttggctgagatgtaacaaaagctataatttatggagtggtgtgggraagcaaaggagacccaagagctgtacctgagtgcccccaaaaggatactctgggaaacactatgacagcacaaaatcaacctccttagcttggaggacctgaaagggggccacatagctcctggatggctggcaagcattgactcattttgacagaacatgtgccatttttctcagacttgagttttacctcggatccctgtacttcacatttcttgtagtttttaaaattagattcttttcttctttttctatgaaagcatgcaaattaagcatcagagtgaagcagcctgttctctcctacagaggagaggccttttggatggtgtttcagtggtgggggatgtttacgcttggtttccccatagccacacttctcaggtgactacccatgttcctttaatgtacttaacatgcagtcaacagccagcaagaaaggggaagttcactggcccttctggggcttgaacgtgcaaccgttccttcattatagaacacttttctacccaaatacaggtctcctaacctgcagactaacagaatacaatatctatttcattatactctcccatgacccattatttaaattcttaaaatacgagtttattgaaacttctatgaattttatgctttaaaatgaatactttttgttcttaagagaatccatgagcattcacataaagactgaataatttactccccaaagaaataaaatagaaagtatagcagtgagtcaggattctacctgcataacgcatactaatgaaatgtattttttgctataatctgataaaatacaggagaaaaacagttattgttttccttaggttcagagtagtattctttgtgaatatttacatttattttcaaatatttttgcaaatattgtacaatmaattcaaaattattttagttgtctgtggattattcactttatgaaagcatatctagaaatttgcaaactatttttaatagcttaaaactgtcagtatagtttgacatgtaaatattagcatatctacacacacacagatgctcactgtgcattccatagacaaaacatgcatgagtgatttttccacttttgagctcagttgagggtggactctatataaacccagttcacattataaattaatcacattcctccaagttagtctgtttataaaatgctattcaatattgataagtaaaaaagcccttggaaccaatacaagaatatcaagggaagtgtttgttcccttccaccaactggggtagatttattagttactttaccattatcacacatattttatactgagataaatacagtattctgtattagtgctagtttgtcacaaatctccattaatgcgctttcaacttcgtgccagtaaatggttaaaaggatctatgaaaactgtggattatatctcgaaggtaacttagtaaggatctttgctaatgatatgtaattacatgactaaattatttccttagtatattaagctttctacaaatactagcacattctttgttccaggtcagtgtttttcttataaatrtcacaatgttaattttgaaaagtaatactttcaataggcatatttcaggtattgtgtgtactttttaatcatcagaaattcccaggcgcatatgttaaaatatttgtcttcctttgaaaaaggaattgtatgctcaaatgctcttgagtttatcataaacaaaataaataacaataatttttaataaattccctagctaatgaatggaaagggggacataatttttaaaattccatcaatatttgagaccactatgaatgcagtcaacaagaatttctaaattgttattggacgttgtccatacattaacttcttcckagataaaagctattgtcatagtaataaaattacctaactaaattaaatagactaggtgatrtgttgtcaaatgagaaaatagtcaattacttaagagcaacttattttaaaaaattatttttgtaggtaaaataatcctgagttactgttattaatttccattgctattgattatcttattagaattatttaattaattgtcacttaatggagttagattttattaatttataattatttactgtccacaaactattgacaagatactatgccaaactcaggccatgtggatgcacaaaaggatagaggaatgagtgcaaaagtctgtaataaggtttaaagggcttggagcactttaggtctcatgcactcaccagatttacccaggcaaaggccctcctcaggacaaagccccacactgagcagaaatttgctcaaaatagaagagaaaaaaaggaaggagatagtccggttaaaaatggggtaacagagttgtgagattgcagaaaggaagcccccatatttttgaacactgcctaaaacaccagaacagaaaagtctacagyttttctgaatcctacctctttgtaaaatttcaggagaactaatttcatgtaaaactgagcaacagcaaaggaacaaggtaaaactctaacagaaaagaagcaaggttcagtcccgtacagggctattaaaatgatgcagcgaatgtagaacaaaatagcatccttatggacaatggaagaatgcctcaaatcaaaggaaagccaaaataaccttttcaaggtgaaccaagttattaggaaattattaggaaattacacaaatacatataatagatattgtcttaaaagaaatagaaaatgaaaagtgaagraaattctaaaaaacacaaataagaaaattaaaaagggatttgagataagctgttggaattagaagtgaggtaaagaagatccaatatatgtatactagaaatgacataagaaaaacatcaaagcaactgaacaaagtgaaccctaaaaactaaattcagtacaactttcctgacacagtatgcttgtgaaaattgatccagaaatgaccagcaccaagatatactctaacaaaattcctggattctaaagaaatggaaaaaattccttgggcatctaggcaaaagagggcaattaatttacaaaggaaaaaaacattattttcaggcttatccataatattttataccagaagaacatgaagtaagagatttcagatactcaagggggaagtatgtataaatataagtgtgtatgtatatatatatatatatatmyayacacacacacacacacacaatccctgtatgtatatcaggattgtatattccttatatgtatactgtaagaaactataattccatatattctttttatgtataatataaagattttttatgcagccaaactcattatcaagaataaaagccctaaataaactgttactatggaagaactcagtgactgtatttcccaggaactcttcctgaggaatttactagagaacaagattcaagcaatcaaaattactgggaaaacatcaaccatcaacataagtactgatggttgtgcctgcatgcgtgtgtgtgtgtgtgtgtgtgtgtgtgtgtgtatagaagtaagataacatgaaggttaagasaaagacagcatagttcgaaatggccgcrtgtgttaacagtgtggatacagtataattattttaaaaattttgtgggagaatgagtagagcatatgaaaacatatttgaagttttcagaaatcataggcacagtgatggtattgttattctgaaattgtgtaatgtgagaaaaagcaaatgagcaattatggaatattgtaattatgtcatcttctgtgttcttgagaaccagtgtggaagaaaggagcaacagaggtaaaacagaaaatgttaagtaaaaaccttgtagttctgagatacctgtccttcaaagtragaactgagaggacttagaaacaatgactaacttaggagcactgaacatgcctagcacccaatttatggtcttgaaatttttaagaagcagtgcttcttttaaaagtaggcaattcctggcctggagcaggaaaygtgtaagatgaacctgagtaattttccatagcagatagcgaggaagctattgaatggtgtcaggatcatgttatggaaactcatcttgataggattgccattggccagagatgagatagttgtgcatcaagaaggaaatcactgcattgagttaaaacacacttaacacataatatgtttaagtttatgagtttataaatgttcattgaaaaaaaagattcaaatattttatcctgcctttcctattcawacaataccactggataaccaaaaaatagaagtattctaactaataaatgaaggaatgtttgaattaaaatatcatttttcaatcccaataaattaatctagttactgaatattaatgactgctaagctttcaagaagagagaaagacattatgatcttcctgatagaagtacaaaacaccatctatgaagtagtattacagagagacagaaagaaggaagaggagaaaggaggacagagagatagagggagggaccaaaaaaggaggaagggawgagaatgaaggaggaaggaaaaaaggaggaaaagagagggggtagggagagaggaaagaaggaaggaaagaagctgaattaaatgaagcctatagaccaattatcaatttataggaaaaaaattatcmaggtgcattataaactgcaacattggatacaatcagcaaaatgaagactgggaaactctgtaggtcacatgtcctgctttcttcaacagataaattgcaaggaaaaaaagacaatggagggtgatggactaaacaacacatcttcaaaacagacaaaatgaactgtagtgtttagaaatgaaccttgagtgataaagaaaaacaagagagtgattacaactttgggaggctgaggcaggcagatcacgaggtcaggagatcgagatcatcctggccaacatggtgaaaccccgtctctactaaaaatacaaaagctagctgggtgtggtggtacacacctgtagtcccagctactcgggaggctgaggcaggagaattgcttgaacccaagagatggaggttgcagtgagccgagattgcgccactgtactccagccgcgtaacaacgagactccgtctaaaaaaaaaaaaaaaaaaaaaaaaacaacaacaaaaccatggtgtcttttaggaaggggtgaaggtgttgtgatgagaatagatacatggagggcttcaggcggacctggtaaagttctgtgtcttggcctgggtagtgtttaaaaagttggtcactttataatgtattaagcttattctatgtgatatttacaataaaaagttttttgttttttgttttttgtttgttttttttttcaatgtggaaggatttggacaggtcaagacaaaaaagtaggttgagcagttcggtgatgcagagctgagggagaggggcttggaggatcaccgtgagatcattcacagtcataggcggaggtgaacagagctgagggagagaggcttggaggatcaccgtgagatcattcacagtcataggtggaggtgaacagagctgagggagaggggcttggaggatcaccgtgagatcattcacagtcataggcggaggtgaacagagctgagggagaggggcttggaggatcaccgtgagatcattcacagtcataggcagaggtgatcgagagatgtcccgcttccttttacaattccggcaaaactgcaaccaaacttaaatccaccattctttctactttgcctttgcagctcagtgttggtgcagagaaacagaagactctgctcacgagttttcctttaaattcatcatctctgacctcaggagggcctgggtgccgcccagcagtgannnnnnnnnnnnnnnnnnnnttttttgtttgttttttttttaatgtggaaggatttggacaggtcaagacaaaaaagtaggttgagcagttcggtgatgcagagctgagggagaggggcttggcggaaactgagatcattcagtcatatgcgggtatgcgggaggtgaacagagctgagggagaggggcttggaggatcaccgtgagatcattcacagtcataggcggaggtgaacagagctgagggagaggggcttggaggatcaccgtgagatcattcacagtcataggcagaggtgatcgagagatgtcccgcttccttttacaattccggcaaaactgcaaccaaacttaaatccaccattctttctactttgcctttgcagctcagtgttggtgcagagaaacagaagactctgctcacgagttttcctttaaattcatcatctctgacctcaggagggcctgggtgccgcccagcagtgataccgacttcctccgccctccccttccttcatcactcatacgtttcttcttcctcaaatcccagtacccctctgcctgtctgcacctgggcctaagcactcagccgggcctcctcttcctaaggatggctgcctgctctctgaaggccaaccctccacacatcctttagatcctcccctccaacctactcaaggacagagctctttctctggcttaaactgtccatctgcgcttctcgtctcagtcctgccttcagcatagtatcatatcgttatttctccattttcgaaaatcctttacaaccccagagtcctatccaatggcctccccgatctctgctcccttttactggcaaactcctttaaaaaagtgtctattctcacttctttgaatttctctcctccgagtctttctggactccactccaaaggcttttggctccatgactccactgaaatgacttttcaagaccgcaatggcagccacacacccagctccaaccacagctcatcatggcagcctccttgagatgtgttcccttggctttcgggacacctgagtcctcctcagttttcacctgcctcataggctgctgctccttagtctcctttgctggtgttttctcaccttccctgcagaggttggataatcacatctgacctcataacatggtcagagtgtcatagatctaacctagtgtcgagctttacgaataatttcaaggatgcaggtaatcctgagactcaggcaggacctggagacgttcaggtcgccagcgcgcctccccaggtccttccttggcatttggggctgtgctgtgggcaagggttatgtatgaagcctctaagaaatctatgcagtaatcactcacaggcaatctctcagttacataaactgtctcatcattcattacytgatgaaatatcttcattgtatcctctggtaattgcacagcttatgacactgtccagagaaccttaccccataaattcagagattctagtttgtttgccatccgaactcttagacctcttttctggtaaaggtgctgtatgtgtatgccattcacacgtttacaaggaggccaggtcatctttttctttctttcctggggacagaagaatgagaaaatggattagaggctcaggctaatgacttcaaaatttgtacccaggacccatgcctttctcctaaactacacttatttattcaattagatactggacattttgacatcgctgtgtaatagcttatcaaactgaacacgagcacaatagaaataattatttcatgcttcaactccctacacacacacacacacacacacacacacacacacacacgtgcacacacacacataccctttcttctaccacagttgtccccacccgctacccgcctcctgtcttctcaggaaacggggaactacactccactcacagttgactcctcttttcctctcacaccaggcatccaacctgactgaaaattctgcaacttctccctttaatttatacccagaattcaaacactcatcctacctccagcactaccttcccggttcaagccagtgccatcttttgcatagatgttgacataagctcctagcttacgtcayagatgttgacataagcttctctgcttcctgcctacaccctggccctccagagggtattccgaacatagcagccaggtggatgtctttaaaatattagtcaaattatgtcatgcctcagcctcagagttctgcagtggttctggtatcttccagaataacrcccagggttctgaaagcagctgtcagggaactacatattctagatcctcacaaactctccaacttcaccttctgtttttttccctccttgttctctctgcctccgccccactgccccccttgttgtaccctgaacagccaaccacatcagcacactggggctctggccccttatagtattctctgcttgtctggaatgcttattcccccagggatccatgtgacttgcatttctaatctccttcagacatttgcttaaagrcacctgctttgtaaggcattctgtaatcacctctttaaaattgaaatctccaccttctttggactctccctcttccctgttgattattttcttcctcacttagcaccattggaaatcctagacattctaacctctcggtattgactgttacagtgctgtggatgaaggcggagaagtttgttcattcactgctgtatccccagcgcctcgatagagtctggaatgtagtaggctctcaataaatgttgcattatttaattaataattgagcaaacctatttgacttgatctgagtttatattacaaataatgtaagatcaaaagtgtagggctgccacaaagaagaccttgaaaatggtctgatggagtttggaatttatttgcaggctggggaaaccattaaaggaaattgagcaaaacggtaccaggaagaaatgacatcagggacacaagaaatcatgctttaagaataagaataatgataaagggaaaatgtgattgtttaacattagtcttcttctagctcattgatattgtgtgggctgccaatattatgaggtggaatgctgggccgattttcaaaataaatataaaaccttgttgaattttaaatagaggcatgacaatatattgctttataagattgatagcgatgtattaaaagtgttcatcatttaatacataaatatgttcctcaaaatgtatatgaaataagattgttaaaatacagttggtagaagcgatcttataaaatacaaaactttggaaaatctattttctgaagacaaaaaagcaaaaagtaaacacacttatatgtcttgccagttgaatttggtagacttttwctgcattgaaccatattcgtcctcccctatcaaccccgtggccctctccctccccctmcacacacacacacacacacacatgcattattttactgaaactggttaagcaagaaatcccatgcactgtagctcctaaccctttggctgaaatttgcagtcagtttgaaagctcaatctgctttttgggttttgcagtacaaccggtaccagcagtatggtgcagaggagtgtgtcctgcagatggrgggcgtgttatgccccygccctggctgtggagcggggctgctgccggagcctgaccagaggaaagtcacctgcgaagggggcaatggcctgggctgtggggtgagtactgcccacacccctggagcggtgtgttcctgtccttgtttgcttttgcacatgggctgggattatatttttattttattttcattttccctttggacttagacatctttgaacttacatataagaaaatagattttaaattcctttataggactccagatttgaaaatttatgtatttattttggtgaaaacagttatatgaagattttctgctttggttgcttatggaagtatttactttaagatgctgtgagccactaggccagacttttaaacttttctcccagcactcagctgatgcagagcaaaaatttattctttcttcagagttgcctttaagtagacaggagtgaaggagaaagaattctccatcagtgacgtcttagtgacattgtttgcctgagtatttcaagaaataaaatgaaggttaatgtggaaaacttgaaatgttattatgtcataaaaatcattttaagtagagatgaacaaaactaatggtgtctcttatggaagcagaataagaaatgtggaaaatgtttgttctaagaggtcaaaccatgtgacctggccggcttttcaaatgaatctatggctgcaagctgatggctcaaggggggaagaagcataactcaaacacaaaaaggcttactaaattataggttaaaatgacaaatggataataatcctgatattaaatttcatgcagcctggaaaagtgagaaagtgtatgtgcatataaaagtctattgaattttgatgagaaacatttcttttaaaattgcaacttcatgaggagttttgtgcaagaaggagcacagatagcagagttgtattagccagtcttgatttggggctgagcactgtaagtcatctagaaataaattagcattggttccccttagtaaagcttcctgtatgtcatgcagtggggctcataaaatcctgggttgagcaatggagtagaggaagtggaagttgaaaaataatgagataccatggtgcctaagtggaaagaaatacctctggattcataatcgtgattgcattagaatgaaaactcaagtgtttactctccctggagacgatggaaatcaggacacactctccagccttagtcattatcatgtgctgaattatctgcaatgattgtgtgtggcctcagcaggttgccaacctctgggatcagaatgctagcaaatgttgtcttttaaaatgagcttttaatgaattgtttttaactactggctaaattatgtgcttctgcctgctaattgcctactgtggttccatcctctaaagctggattttaagattttaacttttcttaggaggtagagacttttgctggcccatcttttgcatttggttgttgaccttgctttaagaatgttgaagggtttatgtaatgtgaaatcttgaatatctttatcttcccttttttatacaagtaaattataagtaaataacatacatacttaagctgcaaatcatgacaaattattttagaagtgaatcaaaatgctgtaatgtctttggattaaaagagtctgcaggcaactttacttaaaggaggatagttatgttctcaaggtttctttgtcctttggcaattgtaggtagcgtattcttaatttatcttaatttgtttcgatttgttggttttggaggtgtgtttgttggtttgtgtattagttatctatgactgcatagcaactccaaattctaacaatttaacatgatagaaatgtatcatctcacagtttctgagagtcaggaatcacccgtgagtggctttgctgggtagttctggctcagggttcctcctgagtttgcagtttagcagggtcacagttatctggaggcttaactggggctggaagatctacttccaaggtagctcattcacatgactgttggcaaaaaaagtcctcagttcctcactggctgttgtcagaaggccacagttcctcaccacatrgcccttgtcttaggctgtttgtccccatgatggcagctggctttccccagagcaagttgtccaaaagagagaacagagagaagctacagtgccttgtaggaccaaatccccaaagctgcacctgtcactctcactttattcattagaagtgagatactagatccagctcactctcaaagggaagggagttgggctccatcttaaagagtgtcaaagaatttatgaacgtattttaaaccaccacagtttgcaatttgaagaagctgaaaaaagaacagagaagtgattttctaaaggatgcactgaactgtatgccttcctttccctccctgtctttttgccccagtctccatacacttttgcaagcttatgtccattcccattgctttggcttctcagcagagataaattgatttcatcattgccctttgtcttcaaatcccaaactttcacagaaggatattcacctaacttgaatgctaaaggaattccacagtgatttaaaaagggtggcgttgaatgtgtgaagttcaaaccctggcttcacaaactacttgtggttttcatctttctcggtttccttatctctaaaatagggtatatatgagcaactctgtataaaactattgtgcatactaaatgagataataagtgtaaaatacttagaatagttcctggcacagagttaagtgcagatttatttaatatttaatcaaaagcttaatgaatatttatccaaagctcacccaaaaacccaacattcaaggaagattgcttacatggcattcattggatatactcttccaaatagtctagaatccaggatgtagtcagatctacggcaggaaactgggcacctagaccttactatttttagcctttcaaataattgcttttcctaaatactactttgccaccatgccatttgtttatattgtgatcgttacacaggaaatgtgatgcctgtggttcaggacatcccaacagacttttccacaaggaaccatggtgactattcaagtctgatctgagtaccaggcacatttatgcttgtcctgaggaaagttgcctttaaggatgttaaaccagctgataaggttttcctctgacagttgactgctagaaaatctaaagctacatctgtgggctccctatagcatatatagaggtcataaacacagtggatttggaaactggtttcctggctttacttgtttccttctttctcttccccttttcctgatacatgttgttttgctgtggtttgtataaccttgtaagctgcccatcttttctgggtttaaggagtgtaatggaaagccattgtctggaagaaattgtggttagattatgtcatttcagaagtagaacatggccaaatacataaaagttagaagaaggtgaatctctttttactctttgctctcacagtatggacaacgaagaacaaaataagctgcctcagggagaagtgagtgcctcattcaatacatcgttcaaggaaaagtcattggtagcaaagctatagaagaattacagagttccagatgtggaaaaagccctagacgtcattaactccagtgattatcaggatgtggttcacagatttattgtaagatgcctgtgaattcacccgtgcttaatttttttttccctcaattatcaagatagaaaaagtacaactcttaccatgtgggtatgcaagaaatgttagctgttacaaaaaaaatcgcgtataaaaaagttgaaaaccaaattctctgtcatttgtgggatttaaaattgttcggagctagacacccatgtgttgagctctgggctccagaggattctaatcttctagtcatttcacccacgaccatgtrcctgggtggtcttccgcacagctgtggtttctgttgtatatcctttccatttgaaggcttctgtgtctttagttcagcttctgtaaaataggtgctatagttagtatttatgactcttttgttcaaacatatgggaatgtccattggaaaatcagattccagacactttgctccactgtgtcacaggcttatctgttccccgaggagcaatgtaccttaactaataaatgaagacagggatttccatttaagtgatgatgtcagtccacctaggaaaggcctgataaatgtggggtggatccagtaaatttattaccattataaagaattatttgaaagtactacctcccagaattcaagctgcagtgttacagtggtttcctgtctttatattcctgtcctaagccttttcattcttcttggtgaatcatgtatttggtgtttaacattcatcaaatgtatgaatgaatgaatgaatgaatgaatgaataaaataaatggttgagtgaatcttaataatctaggagtaatatcaacaaactattacttttattttccaatattaatcatcatttatcccagtattagaactgcttaccttgccccaacaaagagctctttgaaaaatacgtaagcacctttatatacttatacaatatacagtgttttaatagcacacatagtatataattcagaaaaccaaaataacactatgttcagggatccacaaaaagtccattagaaacctgaaagtactgcagaatttacagaattggtgtgctctatcaaaggctacatacacggccaagtaaagagtacattctgatatgtaaaatgtcttactcttgggagaactgagatttcagttttgactcagcacagaatatttttacatagatagaacgcagcagagaatgtattttggtaccaaatactagtctagcctcactctgctaaccctagatcctatttttactactgctcataaaaaaattaattgatttcctaaagaattcatgttatgcattattctttttttctggccttattgctattcatcagaaytatctcacaaactttaatgactccgatgcaaaatgctgacgtgtttagtgctggaaaacagcaacaaaatatggaatacattatactcactgacctgggaatgcagaaagctatggcaatcaaaccttctgagttctctataaataaaacatctttatcttatttgatattatcttggggtattacatgtctgggtgataatttattaaaataatgatttgaagttggataaggaattttctgtttttaattagaaatccagaaacaaaatgtggcaactgcagaaaaatacacatttaaatgaaaatcgaatttcaaaaatcatattagtgaccataagttaaggaaatgcgatagaatttcttaaggcatctaacagtcactctgtccttaaacaaacaccatgctgtgtcgctcggaggcaggtttgtcagggaactaatgaggcattcaccttgggctcctcacttgcatggaccctttccaartcctcttaaccatgttcatcttcttgcattggttttcttaaaaagggtttcgaaaattataaaaatgaagttgtaaagcctccctcaaatgtggttttagacctgtgcaaatacaggatatgacctacttcgtgcaaagaaacgtgtatatgtttttggtgaaaatggttattttgaacgacttatcacaacagcattaaaatactgttggaggttttagtgaaatgagagtctgaacctcattttcagcctttaacgtaggaaaggagtcaatgaagataaattatgatgatacctacccttttactcaaagatttaactaattattgagtttaaaatccaaattaacaaatagatgtgaagctcttttttcaataggtggaccttggaaagagaaaacatgtagatgatcaatatttaataataaaaggaaaaaagaaaatggttacttttcttattcaagccaattttaatttatttttgtaaaaatatgtaatttcattaaattatgcttagatattttttaaaccatattgagtttttttaagactagagattaaaatctagtctccaaatatatgaygttttcagggagacatcagaaagaacaggtgtttctcaggatgactaactgtgggttcatgagccttcactccagctgtccccatgtaagtttgcctcaaccgcctggacactccagcacatagagactggaatcaaatcttgttggtactttaggctttgatatacaagatgttcttcatcaaagagcattttaaaaaagaaagttggtgttatgaaatgtcaaaaatatgcagtccatgtttatttgacatgtgtccaaaaatctaatttaaactctaagatcagctcatttgcagattggaaataagcctcgctagactttctgcctgtgagacagcttgaagtgcaaagatggaaagctttggagagtatttattttagttaaagaaactgttcacaaatgtacaaacaagttctgcataccattcatctggaaagcatctatcagttggcagacattcctagaaagtgttcygtgattttgaggtacagctgatctttgatgagctacggggagttgaggggtgccaacccctcctgcaactgaaagtcggcagatagcttaaacttaactacaatgatccactgttgacgggaagccttgtcaataatataaatggctaatgagcaggtattttgtatgtcacatgtattatatactatattcttatgataaagtaagctagagaaaagaaaacattattaagaaaatcataaggaagagaaaatgtattttctgtttactaaatggaagtagatcgccataaaggccttcaccctcatcatcttcatgttgagtaggctgaggaggaagaggaggggttggtcttgctgttaccgaggtggcagaggaggaagaaaatctacatacaagtggacttacgttctaatacatgttgttcaagggtcagctgcacatagaaaagtatattttttaacccaacacagaccactagctattcttattgtctttagccagtttttgttgaaataaaggtaaatatgaaataattatactgttttttttttttctttttgagacggagtctcgctctgtcacccaggctggagtgcagtggcatgatctcggctcactgtcacctccgccttcaaggttcaaacgattctcctgcctcagcctcctgagtagctgggattacaggcacgtgccactacgcccagctaatttttgtaaatttagtagagacgggattgcaccatgttggtcaggctggtctcgaactcctgacctcaggcgatccaccctcctcagcctcccaaagtgctggaattataggcgtgagccaccgcacctgaccaataattatactctttcaaaatcgtaagatccatctttttgaataatgtgttagaaaatcagttttatggcaaatcgattggagaaacttctttagctttataagctgcagagagctcagaacagtcctgaaaacagacttcttgtgaagattgcattgtttctgtgtggagagcattgtttctgtgcatttattttggtcgtgctctgacctctgtctggggctgtgtgtctgacatggcagcctttagccacatatggctatttaaaagtaaatataattaaaaagtcagttcctcaatcacagtaaccacattccaagcactcagtggccatacatggcaagtggctactgtattgaacagtgcagatatagcccattttcatcactgcagaaagttctactggacagttccagtctggaaaaggacagggacgtctgtccaaggartaacatttgcaaactcaggtttcctgtgttttcaacacaagcactttgagctattcagctgtagttgagggaaaaaaagaaaaaaactttccagaaataaagcaatttcttgactacaaaaatatagagcagcattttccagagtacgggtcatgcaatccaggttccaacagatgctgccaggagcagggcaggagttggggtacagagaggtggagcagagagctgcaatccaagagttggaggcaccaggtaagccagattaaaccaatttctttcctataggacttaaaactttcactatgcaaagatgtattgcttgaacaagcagaacagcacactcagcatttcctaaactctgtagagcaagaactaccttttgtgtggtacattttgtaagacaggtgttttatgaagcaacttgggattcagatggcttgctttatttttttaatccgtagtgctgagttgcatactgctagtcacaatgagcaagtgatacccaaaaatcagagccattaggcccacaatagttcatttctgtagagaactaatgaaagtatgactttttaaattatatggtttatttgcctcaaatgtatttttgagactacaatttatttttacagtaaaatctttttctttctaacactgccattgatatatatttttatgggtttaagatcaattagagaagatgggatgaaattttgtgatcgtgtatgcttagtaactcttcttccaagggttaattaaatgaatatgagagattttaaaatttcatagaataacttatataatgataaataaaatattttcatagggcgagtgtcaccatgtgtcaatctcaaaaacattaactgcatggggcattatgataataacaacaaaaatgacatgtagattgtgtttttgttttccatgtcagaagaagtgcttctgcaaacagtgagaacaatcctaaggatgtagtgcttgggtccagtccagctggggcagacctggcggccccccaccagacaggcagcttgcatctccccaacccccagcattctgaatggtgatcttcccctttccagcactattttgtaatagataaaaatatggaaacgatccacttttccatagtattatagcagttaagtatgttcttgacataattatacagtggaatacaatactctgttatgaagagtaaggtcaatccgtgtcctgatacggaatcacttttaatacacagaatgaagtaaagacagcatgaaaaggggatccatgcacatgagcatwtaagatattttctggaaagaatcaaagacaccccgggaacagtggctgcctttgggtagaggaagtgatgatgtgagggaggaagcttttacttttcagtttataaccttctagaatgtttgaggtttctgaacatgtagttgatggttacttagggactgagtttatgaattactttttttcttaattaaacttagtaatgttacatgttaaaaataaaagcaatgtgaccaataattatattaggtagaattttacacctttttaggcaaagtgtttctttgaggttaaacttagggagaaggaaatatgcttttcactggcagagaccgagggcacagaaaccaactccgtgaaggctcgctgctgttccagaaagagccaggcatgcaggtggtggtccggctggccactcttaaacctggaatgcgtcaggagcaactctcctgtcatacccatgtagctgaatgtcattttttaatgagaatgaagtccactgggaaatttaatttaccttcgcaaaatagggtctctgaaacatgtcaccaaatgtattgagcagccaatgcaaatcagtgatgttttaattaaattacacaaaatgtttaaatagtttaratagttcttacgttataggaaaacgtatcccaatgcaactttgcacatatctgtattctagcaatcaacttcctacaggggattttagtgttgtttttgttcagctagtgccccttgggggtaagggcagagattgtctagcacatgccaagaacatcgcatgttagcctcatggcatgatgaagaagcagcaygccctcactcttcacmcgaaacaggaacaccaaggtcagcgctaagtacctgctgttattcctgttgttcatgacatttaggcagagttcaagggagcccacacagaatgagcactcaggactagagtgacaggcatttctctcgcttgtccaacattccactgggaaaggctaagtcgatcagttattcaatcaaatctctctacaagctcctgggmggtaatarggcttttcttgggtaaagaccagccagtcccatgggcactggtctccaaggatctgcaacagatgtagaaatcacatttcctgagattccaagaaatgcagccatttttcctccttctccgcttggcatctcagtgggccccaggrttctaccagttgaagtcctcaaagactcactttggcctctttttgcaccaagaagtggaaacttgaagtgtcccctaggcaaatctgatctgtcctggcttgacctttagtcccacctcccctaagatttggaggtccttaggaggtacacctggcagagctatccaagcctaccatacaggcctttgtccccactgtccattaagaagttgaggttgtggatagagactaagaaggagatttcttaaagtccaatttatttaagaatttttttcaaggagaagaaaaatatcaagtaactacaaggccatgggtaaggcccaggtcaaatgtataacccttgcctgtctgtttgcccattcttgaaccaggatcagaagaagtgtacaagtgagaaggaacccagtcagaagcagataagcctcactcttgcactctaggaggtaatttgtcargcgggcctattgctgcacttccaaaaagcaattttcttcctcctttctgtagaagaaggccaagaatgcctgtttctttatccartcaaagttgcctgttactctccttcagacagaaataatattgttcctgacacacatcacatttttcttcacaaagcygtgttggttattgaccagagttcagggacagtctgggaatttgatgccaagygattttttcccaattcctctcaaggtattagtgctaaactggcagggctgtaatttggaggaagtctgtgttcactcttccygtggccgcctccccatgtagacaaacccagtccacttgcagaatgtgacatatgcctaaagaattcttacacacattatcaaatgcaagcttttgattgtgtcctaagaatttgaggccgggcgcagtggctcacgcctgtaatcccagcactttgggaggcyraggcgggcggatcacgaggtcaggagatcragaccatccaggctaacatggtgaaaccccgtctctactaaaaacacaaaaaattagccgagcatggtggcgggtgcctgtagtcccagctactccggaggctgaggcaggagaatggtgtgaacctgggaggcagagcttgcagtgagccgagatcacgccactaaactccagcctgggcgacagagcaagaatccatctcaaaaaaaaaagaaaaaagaaaagaaaaaaaaaagaacttgaagcattgttctttatttgtacaagcctgcattttgacttgccctgattatctgaaggaaatagaagagatagtccagtcaacttatgttagtcatttgcatcagaaataagatgaaattttatttgctagatttttaaagaatgtagagcttggaatggatgtgtcctgaaagagaaatttcccagtgattaatcaaccttgtttagaccattcatttaaatggttttacatgtaaataggaagtacgtagaaaagctatgtgttcagaagatagctgctatttggaaagaaagaaatctaaatcaaagtaggcttctcaaaaactcttttatgtgaagacatggctgggctttgtataagcagtattgtattgttgtaaagttcagaagatgcttaatcaataagaaaagttgaagtagaaagataggattaaagagataagatctttgttagactaaatctattgacccagaacttcctgtaatgggatggatgggaactgcttcacattgttaatgtaacagaggttttcgatctcaaaattgctgtttggaggctatgtcactgtgtctatttttagtttcttggtctaaagaaaccaaagattgtttttgcaagacctcagaaaagcacagaacttcccttgtaaacatgatttagataaaacacttactgggtatgcttttaatattctgagcatcacattaaacgtcactgatgtataatcagaaatctgcagggacacaaactacctcagaatgtgaataaaatagccagcatgaaaccgactctataggctatgcaccttccctgtacaaacagaactgcttgctgatagagcatgacccccagcacctggctggcagctggcaggggtaagtttctatcaggtcatggttagaatctctgtgtgcacagcagacagactgtacactaaaatgtcggtttccctcctgacggccatctccccctttctcttgctaacagaacagattttttttttttttcaagtgtggaccagtttgggaaatgacstcattttccgggtcagtagtgagttctgagtagtctaaaccagtcttgctaatcccttgacccttactagtgatcaggtttcagaagatccaggcccttctagagttcattgccctactgagttcatcagctctgaagccactccatggttggactgcctgtcatgggatatgatacatttcctttctatttaagccagttaaattggggctttctgtttctccaatcaaaatctcttaatgggcacacaggcatttatttctcttaataatgaccaaaggaattcatttactaaggactttgggcagatattggggaaaaaaaagaagtatttgatgagagcgttttagtagcaaacaaaatcacctccagattattatattccataatatggttgtgtccactgtaactgtaatcagcaataaaaaaaaaaaaaatctttttgttcctctctggctaaatggattgtagtaggctccattatattattctgacgttagttccgtggtgtgtggccagttcctaagactgcagtggcttaaggggatgggagtttatttctctctctcataaaatgtctggagctgggatgctccactccaccaagcctttagttgccctcatctacatggtgcaaggtggctcagccccaggtccacttttcaaccagaaacaaaggggaaagagaagaggacattcccagtctctttaaaggtcaaatctggaagtagcacacaacatcgtactcgtaytccgacagagaaaagttacttgtgaggctacatggccagcccccaaagcagttgggaaatatctgtattcggggtgcgatgtgcccagctagaaactgttcctatgaagaaaagggcaaatggatgatgagcggacaaatgtcagcctctgcctcatctggtgtcttttctgtctccttttatcattactcaaataccattcacttgtgtgcagtctcagagtttcatattttcatgcaggaaaagaaaaaagtcttctggcatgaaactacttcttttttatttctaacagaattgagtatttccttggttatctttttttgtaacaatatatatttttcactttccgtattcccaggcatgagaaattagacctctaactctcaataatacccgtaaaattgtattcgccccttctattaaaaggtgttgccacaataaccttctgaagttgtgcagataaatagagtttgcattcagtagtgccataaactgaaagcagaggtacaattctagaaaattctctagttcgattgacatttacacctgctgattattttgttctcatgtcacatacaaaggcactactaaaccatgtagaaccacatgtaccacagactaaagcttttggagttacaaattgaatgtggtatttcacgtagcacttgargtaatatcagcttctgatttacatttctaacagaagtcctaggagttttagcttttattcttctaccgcaatcactagaaatcacgctgtttttagcaactaagctgtactcataagaaacatgcaccaagggggaaaattcagtatattctttcttatatttaaaataaatcagtaatacttgtaggggaaaattgtttattctacatgcatgaattggttatccagcatgtatgtggctctctgctagatgctacaggcacacagaggtgatgtcacagccactgtgctgaagaaacacgtcatctaatgggaagacaagacatgtctatgcgaaacagcatagccgcatggcaacacgtaactgtgcaggggaatgtcccacagaaatccaggatacttaagggccttcgtacccagtttccgcatcaccttgaacacatctcatagtcacgtgtatcacattgctcgtgtgcataccacttgcccacacgtggagctgctgtggggccgctggtggggtgagcaggagctgccttctattcatttttgtatcctcagcaacgaygcctgcattcagcacactcatcgttgtatcaatcatgaatgatgcagtgagaaaggaaaaggtttggaatcaagaatggggagcttcattaagcgcactgagggatggagaaatttgacctggaagtggtgactgaaatatttcaggcagaagattctggaacagagtgaagggacagaaagctaggcagctgcagagaacacggccagggaggaatgattagccgacggagaggagtcgtgggctcatggtgcctgatcaagagcaggacagggaaagggagtctggccctgtgggttaaggattcagtacttcatcctgcagacaatggaggccaggcaagggcttccaggggaagtgacrtgatcagatcttttggaaaaagtaatctagtgtgagggcgaggaggacaggtggaaagggggttcactgaagtcacagagaccactgtgacggcgagtgtcgtgtgaatatacagccttcctaccttataaaacaggaatcgctgtttatcttttctcttcctactagtgaagcagcatcgtagtctagggtaaatccccagggttccttatctcacgcyaagaaaattaagtacacagacacgtgggtgggttaaggagtggaaagtttaacaggcggaagaaaggagagaggagggcagctccttgcaagagagagagatgtctgaaaaaaagggttaaggtggcagatcccagcagattttataggcaggcttgaggaggcagtgtctgatttacgtagggctcacagattggtttgaccaggtgtgacgtttacttagcacgcgaagaaggctggtcgccccaccctaatcttattatgcaaatgggctttccacttggtggggctatcttgtctgctccttactggacacgtggctggcaaaaagagaagatggagccgccattttgaacatggctagtcccaggtagtatattcctacgggcacaactgccagcatgtaccygtgcaagcttccagcatgcttgtttgtgtctgcaggtcgattttacrggctgctctttgttggaaaagaaaatgatttgggggctgcttttcattaagaagaaaaccttactgaggacttccataccctcactgcccaagtaatttctttacaactcctgtatcactagtttttcagaaattattttaagaattttagttttgtaatatcatatgcatttaagactaatacctcagggatgtggaagatttagatcattcttttattttagagattatttagaaattgaattcataaccactctctgtataatgtttaatagctaatatggtacactatagaatatttatactcacccatctttattatgctgcataatttgctgccttttttaaatctaaaaatatgagtttaatatttacaagtctgaaatagcaaattttccttactgtttcctcagcatccaccatggtatccaacatacatataattgtataagagggtttcatattgaaaagtcccgcaagtgacaagatttgtagatttataagaggctttctaccagtatttgagaagtggtggcaggtataargggtggacagtgacagccacccttcttgactcagatatcccagcatccacgtgcatgcaccagtgaacatgaaaaagtgaaagacaggaaagaccttctgaccatgacattccagccatattaccacgtgggcgtctctcccgtctcgtaacccatgatttctatttagcaaggatgttttttcctcaactcatttattcaaaaatacaaacaaaagcaagtaaaaaaaccccacaaagctaatttataacaaccctagatattttcaatgtctctrgaacatttaacattagtacactgggaatcacagcctactctggaagagatagagtatggagtaaactcctgagtagggagctgggtccagactcagacacacacactcacacacacacactacatacatacacccacaytcatacacacacagccatatacacactcctgcttcacaaactagatccagaaataaatttaccattttaccaatgaaaamgttatttttttgcttaagtgaaccctaaaacttgcgaattttaattttaatccagttagttttacacaaatcmcagtctctaggcaaatttttctgcaagaagcatcttgtacttatagacacatagatagattatatatatatatatatakagagagagagagagagagagagagtgcaagacagagataggatggatagattgattgatttttaatagaactaatcatagtgaaaattttaaattgaaattagttttttgtttcagggaagrgtaggatggtgaagatttgcaaatttttaccccaaactccttctttattaaatgcttttggcatctatctaatttccttgtagtgcctgtatctctggtatttgcaaagactttttctatgtatccctaaaagtgggatccattgtaacagttccaaaacattcctcaaagctgttcttttataatctmatccttctcatccctgagcacctccatttcccaagcctggataatagacgcaggtaatccacccgcatgtctgatattcaggtttacaattcccttgctggtaagactgacatgatttttttcagagcaccctgactctttccaaggaataggtgccctagagcagcagggacagtgctcctaaatatcccctacacgtttgcagcgtatatatctatgtccactcacacgtacaagccccctaaagagaaaatcttctcctttgagcctattttggattctgcccaggttcctttctttgggatggtcttactgggccacctaccttgggacacttttaactcatttagttgacttcttccaacactgggtcattaaaatgtgggagtgcatcagtttcctcagcaatgttgctgtgttgctgggcgagggtagggggtggcgttcgcacaattaatttttttttttttttttgagacggagtctcgctctgtcatccaggctggagtgcagtggcatgatctcggctcactgcaagctctgcctcccgggttcacgccattctcctccctcagcctcccgagtagctgggactacaggcgcccgccaccatacccggctaattttttgtatttttagtagagacggggtttcaccrtrttagccaggatggtctcgatctcctgacctcgtgatctgcccgcctcagcctcccaaaatgctgggattacaggcgtgagccaccgcgcccggccttgcacaattattattaaggctgggcaaatgatggaacttacggaacttgcattcaggtaaaataaacattattatcagatggtggagtgctatgttctgtttgaagcaataaaatatcccgtaggtagttgaaaatatgaaactgaaatttgatgtgttaggattttggtaaagatttgaattatcattagaaagaaattgttgaagctctctaaaaattggtctgttctctgaagtagagcagcatgacagcctttttctcttaaaagaagcaagccttgggccaggtgtggtggctcacrcctgtaatcccagcactttgggaggccaagacgggcggatcacctgaggtcaggagttcgagactagcctgaccaacatagagaaaccccgtctccactaaaaatagaaaaaaattagccaggcgtggtggtaaatgcctgtaatcccagctacttgggaggctaggcaggagaagcgcttgaacctgggaggtggaggttgcggtgagccgagatcatgccattgcactccagcctgggcaacaagagtgaaactccatctcaaaaaaaaaaaagaaaaaaagaaaaaaagaagcaagccgtataggtcttcttcgacacggaatgaggctgctccaattcctgctggtctccagagcagttaagaaaatggaaagggcaatttcttctaaaagtatgatttttcaaaccagggtacctgatatggaagatgatatgcaatgtcacaggagaaggtgcatttccctagacactgggacaggtctgggtggggaatgatacttttatattgaaccaaacacgtgaatcttcaaaaaatgtctaaatttacaacccttcctttggactatgacctccagacaatccaagtagtttttgttctctttgttctctttcctgtgctgtccaggaacacctgtgagggagagtttgagaagtgtccatttaagtgatggcaagaagcccgtgtgcacagccacggcccagtgaaaaaactgttggctaaaacatcagagtggtgtgaaatgaatgagggttttttttttaaatgcttcttaagtaaaatgcttttgctgctctgttgtttttataacatgctcaataagtttcactactctacaaagtagattaatgttcctgtgttattttattatatatgccgtggaaaaggaactggtccctcaaggattgacattaatttgtgtcaagtggtatttttcttcatcatcaaaatgtaagcaattaaatctccacttctcaaatgtgagaaatatatgaaagaatgtgtaacccatgaaaaattttccagccagagacaaaaatcagttgtaccaataatgtttataaatcttttttgatttcaaaactatttttgtrtcttattttgcagaagacaacttatatgtaggacagcttcttccaaaacagcctcacttaaactgagttgccgtaatcctatgagtagactatacttcgtccaaatatggaggtttagatgttttattactggaactgaaactgtgtgagtttgaagagaaaccagccatttctctgtcccattgctgtgagatcataagtaagccatttcacctttcctgtgccactgtttcccgttcctctacaaaaggaggcctcttccatctctaagactcggagctttcttrcatgctggtattgacattaccagagcagatgggctaatgtgtgactcgcctcactaagcctgtgaacttggtgcttactgcggccccaggtgaggcagctggagggacacagccgtcagccacaaccaggtgtcaacatcatccccatcattgtcttctcaccttccctaaggcatccacttccagcaatcactcatcaaatcagatattcgaagatgagactcttgcctttcaataccctaaatttcactggaacaggaaggcatgcgstgactagggagaggaacgcagcgtagagtctgtggttgtggctcgtatatctcatagacataagacagctgttttaagtagcagactcctaaattaagatattcaaacaagactgttgttgtgaatatcaatgcaataattcaaataaaacaaagcaggattcctgccttctaagctagaatcatgagtcaggcaaactttacttcttcgacccttggtacacggtatgaggccccagagaaggccttatttatttggctccttttttcagttgtggcttaatttccaagaattttcatccagcctcttagattctcattggacttcacctaatcattcaagacaaaaagtcacctccccaggagataattataccatctcctgaggcagtgtttaattccttttactgacaagaagttactcagtgtctaacctcaaccctttactgcagaagtctcaatcccatgtatctcgcaacaacttttcacagcattcttgaaagcaatcagacgttaaaagtatgggtgtgccctggagtcagttgcgtgttatatgagggggccctatttgtacacaaccccatttccacttggacacagttgagaaagaccctgccactctgctgtgatttctaggatcttttctcaatgggagttctccaagttcctgtcttatttcccattttcrctggggtgctggtggatattattgagggcttcaagactgctcacctctccaaaagggtkaaggcatcacctttccttcatggaaggggtggaggaacagctcctggagtgtatgagaggccacattgcgttcccacagctgtgcacccactacagctatggaagactctgtttctttaacatatcaggagatatttgtagctgggaggtttaccagtattcattactaaacagaaagagaaaaccaaaaactaccaatcagaataaaatcctgtctcaatatgacatggctaagtaaagtcacaaatgaaaaatctttcccctgaggattactttaacagtgacattttatgcatatattatatctatggaaattcttctgtcccacaaatatatgttaagtattttgaaggaagaaaagatttctatcttttctrtcttttcaatctcagattaggggaatttattcaagttaactctaagtctctggggactaagtrgggggaaagaaatgtttaaaagcagtgctgtgttaaaggaggcagtaatgcctgtggccttggggtaaactgagctgacctagagaaacggtgtctgtgaaggtccatcagtctcccgcaagggttcttcagacagctgattcagtggcactgtcagaaaagagactccagccctgtagaggccagtstaataaagaagactggagagccggagaatgttctgattagcaatagcttggcctgactaggaatattagagcatcacggaaagaggaaactctcattctagtagtaaaaggaagtgcaagggaagaagatgcagtgcgtgtcctctttgcctccccaccttttagattttacaaggygctactacccatgggcagatgttcctcactccacccctcaggcagagagaggccacagcacttggtagcagaaggcatcttgctgtgaattagaaggcacccctccctcatgtgggcatagcatccagcaggttgtaaggttcagggagggaaatgccctgtttcccagcccttctggccttataggtggaattgtttgtgtgaagcacaaattacagaaatgtacaccaaagccctggctccaagttcatacttgatgccgttggggctcaagacacttcaccccaaaatatgatggtaggagaccagaacatgccaccccagaatgtacttctttggcatattttgagctggttattctgagaagttgcagacacagaagtgcctctgaatagctgttcttttgtaaaagaaatctatatctataaaggaaaataattgtcataggaatctcatgaaacagagaagatcttatcacaggaggtaagattggaggtgataccttacccagacagactctgtcacaggtgatcacagattcttctgagagatgcactgaaacaacttttactactcctgaggctttctatcggtataacaagatagcctttgttcatcatacatttcctcccctcacctttccataacctgtcaccacctcccagccagagaccccaaacctctattcctttctgtagcccagggattctatataaactccaattacctaccccttctttgagccttatattttgagggactctcatgcatatgtatgtaataaatttgtatgtatkttatcgtrttgatctgtctactgtcagtttatttcatagactacattatcgaaccttcagaggataaagaaagtcttttctgtcccctacagtgcttagcaaacatttgcaaatgaatggatgagtaaatgtaaaattatatcagagggtttgctcctcatgtagcaattactgawgctttgagattttatttcattatatttatttatattacttatatttatatatatattttaatatttctattttatttaagatgttagcagagcttctaatggttatagcatgtaaacaagaaagaattagcaagacaggacaacaaaaaagaagacaataggaaaatatcacttaatattttagtttgtgtgcattcgagaaactttttgcccattgttgtagcttaggtacttttcaaagtaagcaagaagcaattattcaatactcaagtacaatacaataagcaactgtaatctgttgaacaggtgtgtttgtgtgcacgcacatgcatgtgtctgaacacatgagtgtctactggaggctggagccagctgtaccaggttcacaggagccagttatgcacatctttttccagctccatgttcagcaacttcatgttggcagcttgaaactgactgtgatgagagtatttatgggactgacctttttttttaggaaggttggaaaagagctggtttatcagcccactattatatgtgagtgatcatttaattgtattcaagcagtggtctttagaagatacacaatactaaattgcttatatacacagatttgggttacaggcaacttaaacctatctttcagttaatcttttctgttatatttgttatatatttgagacattggtataattagatttaaaatatttgatacccatattaataacattatctaagttattgggttgttttccaaaaattactttaaataattattttttattatatctgtaggctattctatagccaagtagtatacagaacatttttagcatctataattagaacacctatttccagattaacatagaagcatttctgatgcaatgcgctgaatagaataattttttaaaatagtatagccttcaaagatcccaagtacagggatactaagtgcaggtaggttctcttgtctctgttcatattttaatacttaggctccgggaactgcctcctacagccttctcataaactaaacttttcctctctttgctttctgatcatttttccttctctgatcttataataaaaacatcccttaaattcatgcagcaccacagttctcctgctcccaatatccctgacctgttggcccttttattccagtatttagagggcaaagctgaaagcaagatgttggagtgcagggagaagagatcagagcagcctactcactggcaggctaggctccaggaggaaagtcctcaggacctgggagaggtggaccctcatctccaggcccaggaacaggacaggtgacactcctaaactttctgaggcttgcaactctacagagcaaatttttagtgtaagatttgttgtcctgttttataaaggatggctttatactatatatccttatggcttcacccgtccatctcacacagaaccctactcacacacacatacacacacacacacacacacacaccttttagaaaatgaatgaatgtgtcaactcaaaaatcttattttcacattaagagatgaaatatcatttgcttaggcagaatagaggtaagaacaagctacaacaaacatatttgatgttttgaaatgtgtaaaagatgtaagaaattttaaaaccaggctgcagaatttcacattgtttcctgtgatctcctacatcaaacggatgcaaggacagcagccagccctgctcttctgacaggctccgtcctgcgtacacctactcattgggaaggaaagcagatgagtgtctccctccaaactcttacgatgttgtgcactgataagaggtgaaggtataattttgaaaacttttaatcatcaagactcctttgcagaaatatctcttcacctccagattcaccattttttgtttagtatttgataaatattatatgctatgcaagcagatgaggttacggttgtttgaggaaattcagctccgaaaagcataatccctctggaattcaaaaccttcaatttaaactatttttggttttaactattgttgagtctaaagatagttttgagcctgggcagcatagtgaggccccgtttctaccaaatatactaaaaaaaattagctgagcacaggggcatgcagccgtagttctagctacttgggagactgaggcaagaggatcacttgagcccaggagttcgagactacagtgagctatgttcatgccattgcactccagcctgggcaacagagtgagaccctgtctctggaaaaataaaaaaataaaatataattctgaaatatcttcctatagatacacaaaacaatttttttctatttgggagcatttcattcagagcacttctgcccaatattatatggagtcatttttcatgggtgctggaaatacaagactggaccacccttgctgctcagggagtccacgatctaaaataattccaacatccttttggaagtgctgtgatagatctatgcacagaaagctggtattattttcttgccttttcacaaatagaaaatagtggaaacaagggatttttatgttaaaaaatatttaatgaaaaaataatgagaactatctggataggaaaaaaattttttttaattcatggattgaattgtgttcatttttttcctcttacttcccaagtgatacgggaaatgttattcccagtctctctcttgctgagaggctctcctctggtcacaggtgctatccatgcttgatgggtttctcagatggtattttgaaaaatggtttgcttctgtgttcaaatgttttgcaaaagaagaagaaaaacagtaacaggagggagaagaggaggaacagagaaagataaaaggataccattttaagataaatacttactytccatgaaattgatttataaaacaatgtcacctcatcaaacacacatgagataggggaaagacctttttcatcatacagtaaatgttagcaatagggacttttgacaacataataatgatagccttatgagctgtcacatagctagttccatggtgaagtgttcatggtaatgaccaattgagttattttgcgattttgtgtctaatgcaaaatgacaccatgaaaagcattgcaattgatatgaatcgccattgtctgtgagcaaactcaagtgtgaatctactgtgtcactttttctgtctctatctagagagactctaacaggagatacatttgtatttttgttacatgtgaacatattttattctcaatttatgtatgaatccctggcaatatgattgataagaaaccacactgacttaaaataaactgatgtatcagtagatattgccaaaacgttttataaaaatttagttatctcccaattttgtaattggtacatgaagctgatttgttatgagaattcctatcaaaaatattatcctagcataaattatcttagcataatagatacactggattcaaccatgtctttattatggaaaaataaaatagaaactaatattaaagtatgtaccaaaacataatgcatttagagtttttttttaaaaagcaagaatatatttttcttgcatacaggctagtgttaggaggtggaaatttaaagggcttccrtttattttgtcttgcmtagcatcaaagatagataagtaagtttgaacatgcaaacgtgaagttacctcttactttgaccttcctcaaacataggtatacaacatctgtcatctaatgttacytatttctttattgatacgatgtcactgggctttttgtttgtgtctttgtgatgggattgagrtagaagggaagtaccctacacaggacctccgttcactacggaagggaaagacacatgaattgaaactgatgttcacagataggacaatgctgctgtcatctttgcattacattttctattatccttggtctgactgtttactagaaacaccagctttctctagcctcaagacagtgagaatgtcttctgtcrtgtacttctcgaagctgttgcagtgccctgtagggcattctagctgttgtcctaaattgagatgacagtgttgctcatattaaattgccttcttgcttggcttggcatgctgggatccatatctattaatgcaggagtgtccaaatgtcccgccaggaaagcaatttgttcctcagtagggagtcagagaagcagctggtctaagaaaccatcagaggtgatgttggggggcaagttgtgtttttcttgatttaatggaaaattctactgatccatcgcctcgcttgtcctcaccacttgtcagcaaggcagcacatatccatcttcagccctctcctctacctccctcgcctgtcatcggtctcttgtggggagtcagcccttcacacagcccaagctttggaataggcattctgacaacaacaaacactttattaatggatttttttaacgtgctggggaggtagcacaatttggcagcattcggttaaatatcacgttgaaaaccaactcggctttttaagaaacacctctcccaggagaacattatatacacacacaccgcatcaatattcgccgtccacatccgttctgccacccctcccagccccaacagagctttctctggaatgaaactaacaaaattcaagatcctcagtttgcatctctgttctgatggaktacatgtctgataatcaaccagaatgtcaagtcaagaacaatgattgagtatcaagtgcatgttcactgggcatcaagtgcatattcattgcatgcaagggaggcttgtctggaagaggcctaatgagcaagaaatgttcacctcagctctcacgggaaagctgtttatggccccagtaatcaaactgagaggccagataatccaaagatgaaaatggacctcccaaatgggtcaagctgaagaccagccagccactccctgaccttcagagcttgccacgttagtaatgtgtataataaagtgttgctatcttaacatcatgggactattcaggatactttaaaatgtagcagtgaagcttatatgaagtgcacagtcagtggttatctttcatttctttgagggcagagtttattcaggtttttgctcaaatatgaaaatgacatgtttaatacttaagaagaaagcaagcttccccagggcaaccactgtatctttaatgcactcttctgtgcagttgagtttctgcataatttccatggaactttaacacaatgggatttctatcctarttttatgctttgctttcggtaatttgtcagacctgcaacaatggatgagcaacaaattcttggaaatgaaaaatatgtaattccatatagtgcaaaatgaatatatgtaggcaaatgggtaatacgttgctcatatatggtcactgtttgcactctcttattcttcattttcttgagaactagaagtctcctgcttcatcaacccaacctaagactcaccyccaactctgacactgtctaataattgtcaatctttgtagctctcttatgactttgagatcctgctgaggacaaactcatttaagacccgggattaataagaaatccctcttcacatacgggagaagaggccagtaaacatgagtttattcgtaataatgaccartgatcttgttatatgtttaattaagctctgtagctttgtgtctaactgaaccctgatttcaagaagcatttatgggtattgaccctatgtcagatactaggtaagcatctgtgatacaaagatgactatgcggagtttcttgtgtctttatgtaaaatgtcttcactacattttgatttggaagaacagctttctcatcataagtcaagcctactcatcagcattrgatttctcttttatcataataaaggtattttgaagattcatctgtagattcatgagcctactttcaaatatgttattcaagtcaccaattaaataagacccaggactcaaaytttwgggaatctttagctgtatcctctttgttgatatttagctattaactactaacctttggatatggtcagatttttttttcctcctcctagaatatttcaaaataaagaattaactattggctgagcacaggggttcactcctgtaatcccagcactttgaaaggccgaggtgggtggatcacctgaggtcaagagtttgagatgagcctggccaacatggtgaaaccccatctctactaaaaatacaaaaaaaattagccgggcctggtgatggccacctgtaatcccagctacttaggagactgaggcaggagaattacttgaactcaggaggcagaggttgcagtgagctgagatcacgccattgtactccagcctggacgacagagcaagactctttctcaaaaaaaaaaaaaaaaaaatgcatagagagatttgagcatagagagaagccaagaaagtgaagaaagctcaggagagtttcaacccatcatgtacccatcatttgtcatcgaagactcataagcatggccttccatcaactgtgcacctgcctacagcaagaacaggcaaaccacagacaatctctactggtgaggctgtttcttggaaacrcaagtttcctcaagctattcctcctccccaccctcaattaatacacttcctccctttagaaagaaattagatcagcttaggtgatttttctctttcaccttctaattgttaccaaaccctgcttctttgaggtggtwtcagactgaatgacaatgtgttcttcttctggtcctgggtgtgggcaggagaataagatggaggaatgcgctgaaggccaccactctatttcctctagattctctaaggtactctaagaattgcatcgtcaatgaagatgatggctaaatgtaaaaatgatcttaccttgcacataaatggaaattattctagtacaccataaggactaaccttatgtaaaattgtaaagaaatacgtaacagataagctcatatctttttgcttgtttatatctcttccctttcatggtacccttgtaagttctccatcacacctgcctrttcctgatctccagcccacattctccttgggctcagcccatccagatctgatcatgctgaatccacctgtctttcactatatccctcccctctgagctctccacgctttggagggagatatgttactaccctgatactaatcaacattgctagaccagtaaaagtctggaggataagcttagtgcccatcctgcagagtaattggcgtctgcattttaatggaggctcctgtctcctcattcagagcaatcctgctggtattttcgactagatgaggaagggaaatgggccctttatgcaggcctgccagaggtatttaaaggtgagcaggattcagaggggaaccttgaacagcaccatccacacaaacctcctctctcctscctacktccccagcttggaaaggcagaccccctccctacttggtattaaacattccacttttttcactaacagtgcaatctccctcaattagcctatactcccaaagcaaagacttggcaagagggcttattgtctctgggtgttacaagtacattgcgctataaatgtctatgctctctgtctgaagtctcgaggagtttatcatttacttgcatctggacacgagtgcagttttcccagagttccatgctcaggcatttctgtggacagagggagattctsttgtgctcagccttcctctccctgacattggtgtggagggctgctctctgagtgagagctgctttctatttgactcaattcagtcagtgttcaccaggtgactcttctgtgcaaggcagctgccaggggctgctagaggtggatgggatgcatagccaagtatcaaggcacaccgccrgccctctgcagcaggcaggaggatgtgtggaaacttgcaatgggcccctggacaggagccgtggttcacctcactagggggctgggtgagcggaggctgggcttgtgctgctaggggraggccgtggcattaacattgaaccaataatgctctttgccagaaggtggtgsaacccagcaagggcagatgtgagyctcggttcasctctcacccagagccctgggattgcacagccaggggcagcgcccagtgccacagcagcctgcacttgaccttgctgcccaggctgctgcccagcctcccaagtagctgggactacaggcgcccaccaccacgcctggctactggctgtttctgggcccttctgctgctttccctgcacaggacattctgtttgctcagtggcagtgggcagctttgtgaagtcctctcatcttctggaaagcagggctgagctgtcctgagagaatttcagcgccagcagatatgcagggtgggggcagtccccctctcatgcacctatgttgccacctccccggccccatggtgtggagtcactgtccagctgccagtgagggaggcagtgagtgcccccggccccatccccaggccagtggccttcatctaaggtatctggagagctagactcgcacatgccctcatagaagccaaatctccctccagcttgaagccactgtgcagccaacttctgccagtctccccgaggaaataatagtcctcttgatttcatgtgtgctttactttttattttgaaatagttatggatacacaggaagttgtaaacatagcacagaaaggtcccaggtacccttcaccagctttttccaaatggctacctcttgcatagctagagtacagtaccaaaaccaggaaattgactttgctacagtgtatgcgtatagctctacttatcacaggtaggtttgtgcaactaccacctcaactctttttttttttttttttttttttttttttgagatagagtctcactctgtcacccaggctggagtgcagtgacgcgatctcggctcactgcaagctccgccttccaggttcacaccattctcctgcctcagcctcctgagtagctgggactacaggcgaccgccaccatgcccggctaattttttgtatttttagtagagacagggtttcaccgtgttagccaggatggtcttgatctcctgaccttgtgatcygcctgctttggcctcccaaagtgctgggattacaggtgtgagccaccacgcccagcctagcacctcaactcttgatttcatcttataactgtgtggctgggtccttacccaagcagaaccccatgaaaccaacagattcagtggttttgatgtacgttttggtgcgctgtgatgtcaccatataagtagccaaatttggtgattctaggttgacttactgctcccagatccataaagattggtcaacacgaatgaacctaaaaagataggtcagtcacacggaaccctgccccagccaaacaaactcacacttgtcaatcatgaactcrtgattgaaaatgtgcttcccagataaaagaagtcatctactcattttgcttccatgttgctgatagaattactttttctgttctggctttcccaaggcaattacaaaacctgtttactccatcgtaagttgaaatcaacactattactataaactctataatactatatttttaccctaactggaagaaattaatcattaaacctgtggattaaatacaacttttaacatgatgcatacaatgagaaacaacttactgaaagcatcaattcaataaatgcatccactgaaatggtggcttatttaagagtcatgttcctgtacttttcttttttctttcttttttttttttttttttttttttgagattgagtcttgctctgtcacccaggctggagtgcagtggtgcgatcttggctcactgcaacccgcacygcccaggtttcagcaattctcctgcctcagcctcctgaatagctaggattataagcatgcgacaccatgcctggctagtttttgttttttagtggagatggagttttaccaygttggccaggctggtctcgaactcctaatctcaggtgatccaccwgtctcggcctcccaaagtgttgagattgcaggcgtgagccaccatacctagcccacttttcttctttttcttcttcttcttcttctttcttctttcttcttcyttttttttttttttttttttttttagaaggagcctcactctgccacccaggctggagtgcacagtggtgcaatcttggctcactgcaacctctgtctcctgggttcaatcaattctcctaccttagcctcccgagtagctggaattacaggcacccgccatcacacccagctaatttttgcggattgtttttgtttttgttttttaagtagagatggggtttcaccatgtcggacaggctggtctcaaactcctggcctcaggtgacccacccacctcagcctcccaaagtgctgggattacaggcgtgagccactgcgcctggcccacttttcttcttaaagtaacactttggaaacactaggaatgaactggctctgttttaaggttatrtagaaaaaagtaatggagttgggcattgtattagcagtaccataatgaagcttcttaaaagccagcttgatggttatttttaayaattataggcactacttacaggtcactgagataaatcacataatgttgaactttgcagtcttataaggaaaaaaaattttctcctttgccagaaattatcaggttattaatttttttcagtgcatgtgtgaaaagccattagcttctcttttttttcttttctttaaatatccagctatactaggtgactgtgctcaaatggtggtgattgccatggactaaaatcccatmagaagaaccttgagacctgtcgaggtgaaagctaacccactggaaagtggatgccatcagatttgtagtagttgataagtgtgtagaagtcaagaagcactgaaaatsgcagtgtactcaattttaacttyatttattcaatgcttaaatcagtcctaaggaggatttgctgtagttatcatagtagcataaygatatactgtttcaaatgaaacacatgtgaagtaacacaattgactcctcattttaaatgatcctgctttaaatgttgagatccagcttctcayagcctaagcatcccacaaccaaatgcctgaaaattaagattcatctctaaaggcagtgtagtcatataagaataagctccacaaaattacatttactatgagtacaatattacaaaaatatatgtacatggakaaaaactcacaagaaatccagaatccagaaaacttaaccaggttaatacggtgttattattggtcacttttgctgttttcattttaaattatctaacgctgttctgtgttttcagataasaggaagggggaaaacagttggatgctgatttctcgttggtacyatgcatataatagatgttcagtagatgcagttggaggaaggtgtaacaataaaagcaggacatgtcagtagtgtgaatgtgccctttcatggcacaatttagaaaacagcctggaagacactgcacgttggcctcatgctttttaaaggaaataagacatgtatagartcgcttttatgcatcttgtgakgaagatattccccctggcccatctttaactaacaattgggcctctcaactgccacctcaaagttcagtgctgcttgagaccaggggacacccttggcttcaggggagaggaacccrgaggactccgtagtaggcaccatgacggcagcactaaggagcttgccgctctggacttcctagtgcagttttcaaggggtgggttcctggcctccccgcagtcctcctggaaccagagcccttctggtctcctggttcccacagcaacaaagttttctttcagcccctagtcactgggtcccctttccctggacctagtctctttacaatgaggtcccagataccagcctctaatcatcaggacaaacggcyatcccccaactccagtttcctccccacccatcacctccctcctaagccagcgtgagtcacagacgcagatccttaaccctctctygctttttgtcaccttgtccctcgcgttcagatctgttcaagctcatcctcaaaatagctggccttggttttattctgttttaaaaccttgccttcttcaccctttttccccataacccctatcactcctcaaaataaaactttacccccaaaaaactgttcagagtcccagtcccagccttatatggtctgaccctgtcctgcagctcagacccggtttgtttctcaagatcatgaccacattcaccatccaactcctgtctgtgcaacctgcctaaagagtccttgcccagttggataaataaatatctttcatttgcagaaatcttgagaaagcaaggactctggggttttgttttgtttttttccactctctctactcctttttctttggttctctcattcattcagtcatttgttctttamatctattgtttatttacagttcctgagatcctagttgcaccaggaaatatactagataataaggttacaaagaaatacatttctgctttgagaagatcgtaattcctggggtcctaaaatacagctgttacagttacacaaccaccaacttttcatagaccttaatgattcccaaaatgctggcacgttggttgtctcaattagtcctctctacaaccctgtcaggaaggtattctatttgtcaccattttatagaggagggaacaaaaggtcaggaaagttaaataatttccccaagatagcccagctttcagtgatggatctgggagataagcccacctcccatgctcgttgtaaagtagtgctttccccgccttctcatgagatgtcttacaggggaaagtcattcttaagttaaaaacaacagcagcagcaaggcccgtacagcatgctcaggtagaaaatcacctcctagaaggagtccaacttcgggttccttcatgtagtggctcagtttgtttacctccttgcccacatttaccttcaaaaatttatcttgtaaacaaatgaaaaaaagcagaaagggctctttcaaaaaaaaaaaaaaaatgtgctgtaatcccagcactctgggagrctgaggcgggcagatcacgaggtcaggagatcgagaccatcctggctaacatggtgaaatcccgtctctactaaaaataaaaaaaattagccaagcgtggtggcatgcacctgtagtcccagctacccgggaggctgaggcaggagaatcacttgaacccggggggcggaggttgcagtgtgctgagatcgcaccactgcactccagcctgggtgacagagcgagaccccatctcataaaacaaagcaagcaaacaaacaaaacatgtatctttaagctcaaatgggaatatcccgtcacagtttgagaatgtaatagcttaagaggcagccaaatttttatttctagaaaccagtctatcattttcatgagtcgccaaataggaaactcctaaacatctgctttcctaagtgagtggaacttgtcctggtcctgacctgagaaatcgaaaccgtggcaagagtggttctgtggaggccagatgggcatttctctgagaggcaagaggaaggcaggttaatgtatgactcccaaagttcttacacctagcagtattgatgaaaccatattgttatggaatatcatcagcacggatattgtttcttaagcctacagctattcaaagagaaaggggaaaaagctgtgccaccttaatttaattggaagtaattatgctaacttccagcccccatagctgtgtgcaccagggaggccaggaggacggcaagtaagagtcaggggcacttgcctctccgcgtttgctctacatagtcacacgtgattgttttctcctcgtgtagaacaatcatctcacaacattaaaaggtagaaagagcttcctcttggttgtgtggttattttgggtgcagagttaatgacaaaccttgtataccaattcaccaggaatttcagtccaagccaggtgtgttcaatatggtgacctgaaaggaagcccgctctgttgaccgtgagaaatgagcagttgttagcacgtcaaaggtgtcatccctaccaacgaggtgtcccttcttgtggtttgttcaatacttctccgcatgaatttacttacaatagcaatacacttcatcagattcatttctatcatattgtttccctataattttattatattgtctgttatgcaccagagcctccctttttggccaagtgtgtttccacttccatttgattttcagggggggtcatttccttagagttgttttaaaccatttttctgagcttgggatgtgctgttttatcatatttgcagcagtcagaggctttagagcattttttactaataaaaatgaaaccacctctgttactgttttagtaatactgttctttgtagacctctttccattttcagacttacattgaatagattaggtacacttgtgttcttattcccatcaagctactgtataatttttgtcactttggctcttggcaggagattctgcatacagtgacaacaatgtaggtgtgtgtgcacatgtgtgtctgtgttagggggaaacgtgggcctgagccttggctgaaccctcacagcaagtctagccttcccgcggatcgtaatgaatggaactgcgggagctgtctccgctaaagtgagatattcttctcccagactaatgttttctgcaccagttagcagatttttttttttttcctaagatcaacccatctgccactttcattctgcagtaacctggcaacttgcagtctggatcgttctttttcatcttgacccctggccttggaatgctgcaatttagtgatactcctttaaaggattgtctggtcacttaggcaggtcagtgctgttatttgctcatgtcatgagggctgggtgttcttgaatagatggtgacagtatgaccataattcctaacgtgtccagtcaattgtcatgggctaaaacctttcacagaaataacggtgtcagatatggctgtggagtccatgaaagatgcattattattttgctcatccttcataatacttattttctttatccttattgccaattccccaggagtctagaaatgaagggatttgtttccagttgacatcacagtcttaggcctcgtgcggtttatattctattggaagggaaaactgataaataccaagcatcattttgttgcaaaagtttaaatcatctgaactatatatgtagcagcaatctagattgtgtttattttcctctattttttaaacttacatcatatttccaatctgacaaattgaactgctcctgcagtgccgtgatttaagcctcataggccaatctcttcaggtgattgttttgtctatttttaaaaatctccacaaagaacatttatttttcttcctagtaaacgatgtcattgtttacctgttagaaatgtcttatcaaattttaagataacctgtcctttgttatagtttgagtccattaccctaagagattacttcattttctatagcaaacaaaagatcagtggcctctttaaaaatagcatyttccatattggaagaagaaaatcatgtctggactggcttcttttgatataacaaaaactatttcccttatccacgctcaatacggtcaacaccctctcctgcaaaaatggccacaggggaaaggagggccattttcagcccacttccaatggagaccaatctctttccaacatatttcattcaaatgataaaggattatatcctctatcatttgcttttacaaatagaacattggaagtcttgacttgctattattttcttgaaggttagcaaaaacataacttctgctggagtaacattgactctcttgggtctcttaatacccagactggttacttatgcaaatagctttgctgtgtaattagggtaaagcattttggttaaattgcctttctatacccagaactctatcctagaccaacctttgtaagggaattgaacctgctgggtttgaaaattagaatactaagcacaagtgggtgcatttcttcaatgggcttcgcgttggtctcagattaactggaaacaacaacttgatgtggggatctcagggacagtcacacttcacgatgcctcactggcgacctcagggacagtcacacttcacgatgcctcactggcgacctcagggacagtcacacttcacgatgcctcactggcgatctcagggacaatcacgcttcatgataccgcacatcctgtgatggttgagttattacaaagcatcaagaaggttcatctccacaaatttgtgtcatttttagtagccactgcatctggaatttcatcattagagagtaaagagcctaggttcctgccctttaaaatctcctcttaaaacacaattttataaaagtgttcatgtgtaaagaacatgcctctcaacgatgcatatgtcttcagaaatttcttatagaaatcataaggacggtagaggattagcctcctggcaagggcatgaatgcaggagcccatgggcaaaaccttgcttgcacctttttgagcccacacagggttgagctgcacaatggattaattaagccattttatatttaaatttaaaatatcgatttgtggcttaattttttttttttttttttttttttgagatggagtctcactctgtcacccaggctggagtacagtggcacaatctcggctcactgcaacctctgcctcccgggttcaagcaattctcctgcttcagcctcctgagtagctgggattacaggcgcgcaccaccacacacagctaatttttgtatttttagtaaagacggggtttcaccatgttggtcaggctggtctcgaactcctaaacttgtgatccaccctcctcggcctcccaaagtgttgagattacaggtgtaagccaccgtgcccagcctttttttctttttttccccccaaaggaagctcctggtgcactagatgggcattctcatgtgaagaaaaaaatcagcttaacatgaaaggccatcccctcctttaaacagcacaggtgcttccaatctgccaccatgcccacctggctgccccctattctccaggctcctccctggctctaaaagccttgagtttcttacctctcttttttgaggctttgccattctttttgatctcagaatggatcattttctctctgcgaggatgaataaacagctaacactaggactaagtgctttttctcaagcactgctgagaaagatctggaaggtagtgttgcccaagaacaggaggtgaaaaagttttctggtgctcttctaatttaaaaaaaaaaaagaaaagtctttagataccaaaatgtttctgtgatgttgtcatagaatcataacacccggccagacatggtggctcacgcctgtaatcccagcactttgggaggccaagactggcggatcacctgaggtcaggagttcgagactagcctgaccaacatggagaaaccctgtctctactaaaaatacaaaattagctgggcatggtggcgcatgcctgtaatcccagctacttgggaggctgaggcgggagaatcacttgaacctgggaggcagaggttgtggtgagccaagagcgcaccattgcactccagtctcggcaacaagagtgaaactccatctccaaaaaaaaaaaaaggaattataacactcaagaactgtgaaactttcctattcttagctctggtccgttttgcattaccatggtgtttaattgagggggaaaaaaagtaggctacagataaattggaaatgattcaactgagagtgacaaaaattattaaaatgattaaagggttgcaaaactgatctgtgaggatcggcttgaggaattggatttatgaagtctgaggaaaagggagctcagggcggatttattmagtgtattaagggacatgatacggaggaagctgaccaaygttttcctgctctgctgaggacagagcaaatggaaatgatcttacaatatggcaggggagaatttttcatcatgtgtaatggagccataaggactgaccctcaggaaaagcgtttccgaggttaaagaaaaakaaaatacttaaaaatattctccttgagacaggtttttaaaggatagacagtcgacaaggagttttatatcttgttctgcctaaaggcagggtttgtgccaggtgacctttgggggcattttccattcctttgagtctacagatttatagaaggtcttgaatctgattttagtgaattcaaaagcaagtacacatcagctcctaaccatcagaaactaaagtacaaggacacacacatttttttgctattgaattaacacctggaatctcagctattcatgcaatcatttcttttgtagtctgtgattgcaaactaacagttattagtcctctgtggcacttaaaaaagggtacagcttttatgcctaacgtgtgcgatacttctattagcaacgtgtttccctggatacgttttatcagaaacttcactaccaaaaataagaatatagaaaggcattcccatgtgtcagaaaaggtaggtcatttatttcatctactattatgtattgagcacctattataaacctggacctatgttttgcactgagcatacaaagatggaaaagtaagtcaacgagcttacttgggtggtcrgggagtgattcaggctggacgtgaaaacccgttatgaaaatatagtttactgaatgtttaaggaggttkyagtgagggtaggaaaatatgaaataccacckaaaatgggattaaattgacagaaaatatcaactgtgcatggtaccatcaggagcagagagaagagtcaagatatagaggaggcagagaatggagggtagggggaagggctcaaaggaagagagcatcccttcctgaacagctgcgtgctgggcygagaggaaagcttggctgtcyccagcagctgtctggaacttccctgaccagtggaatgctagttagcaaaagagattgtagattataattggcggttccccaccccatagccaccttcgagggttaaattgggccatgtacaggcagaccagtacataatgtgatttaataatctgcccaagtcattgtgtcaaaactgagaactgatgccccaaattcacttgataggaaatggatcattccatttcatagagatgagcartgttacaaatgccacactgaaaagatacttwgacaaaaagtcactcgtcttcttagccccacagaatcttaggctgaaaaggaacttaaagcctagtcaccaaacctctttcccactactggaatgggttccgcacaccttccttccttggcaggtgtccaacttaagtggcaaaaagttcagatctttcaggaaggttgtttaggaagagaggaatttttaaaaagttcttccttacgtgaggcttaaaactgcctccctgaaacatgcactcatggcttgagacccactcctgggagctgcttagtgtagctgaacaggcggcctgtgacatcctcttgtgggtctcttctctggaggcttaatgcccctcctcagcctcctgtgaggctgctcctggctccgtggcagccttgcccaaatgggttacagtttgttaatgtctcacagaaggtggttccccaaattgwctttttggtastgcagaccaatggccyagtttacaactgagcaagctttttgggrcagccatatcacacttatctgtaaagaattaaatgtrtaataaatcaatattactcttttacygttagcattattgagcactggctgtgtgcctctcaataagcccrgttaggtccccacagccrcctgccactcctgggccccacccacctgcatcrtcctcctttctgcacttgtctcactcgcctgtgaccctttttgaccagcccagagcagtcattcaatcagcatttgttgatgaattcattaaataggcaacaaatttttcagcctctattgagtttgcaggtaacgtaaatgaaagtttggaagtcaaattgtcactgtttgcagatgacatgattgtatatctagaaaaccccattgtctcagcccaaaatctccttaagctgataagcaacttcagcaaagtctcaggatacaaaatcaatgtacaaaaatcacaagcattcttatacaccaatagcagacaaacagagagccaaatcatgagtgaactcccattcacaattgcttcaaagagaataaaatacctaggaatccaccttacaagggatgtgaaggacctcttcaaggagaactacaaaccactgctcaaagaaattaaagaggatacaaacaaatggaagaacattccatgctcgtgggtaggaagaatcaatatcgtgaaaatggccatactgcccaaggtaatttatagattcaatgccatccccatcaagctaccaatgactttcttcacagaattggaaaaaactactttaaagttcatatggaaccaaaaaagaacccgcatcgccaagtcaatcctaagccaaaagaacaaagctggaggcatcacgctgcctgacttcaaactatactacaaggctacagtaaccaaaacagcatggtactggtaccaaaacagagatatagatcaatggaacagaacagagccctcagaaataatgccacatatctacaactatctgatctttgacaaacctgagaaaaacaagcaatggggaaaggattccctatttaataaatggtgctgggaaaacagtctagccatatgtagaaagctgaaactggatcccttccttacaccttatacaaaaatcaattcaagatggattaaagacttaaacgttagacctaaaaccataaaaaccctagaagaaaacctaagcattaccattcaggacataggcacgggcaaggacttcatgtctaaaacaccaatagcaatggcaacaaaagccaaaattgacaaatgggatctcattaaactaaacagcttctgcacagcaaaagaaactaccatcagagtgaacaggcagcccacaaaatgggagaatatttttgcaacctactcatctgacaaagggctaatatccagaatctacaatgaactcaaacaaatttacaagaaaaaaacaaacaaccccatcaaagagtgggcaaaggacatgaacagacacttctcaaaagaagacatttatgcagccaaaaaacacatgaaaaaatgctcaccatcactggccatcagagaaatgcaattcaaaaccacaatgagatatcatctcacaccagttagaatggcgatcattaaaaagtcaggaaacaacagatgcttgagaggatgtggagaaataggaacacttttacactgttggtgggactgtaaactagttcgaccattgtggaagtcagtgtggcaattcctcagggatctagaactagaaataccatttgacccagccatcccattactggatatacacccaaaggactataaatcatgctgctataaagacacatgcacacgtatgtttattgcggcactattcacaatagcaaagacttggaaccaacccaaatgtccaacaatgatagactggattaagaaaatgtggcacatatacaccatggaatactatgcagccataaaaaatgatgagttcatttcctttgtagggacatggatgaaattggaaatcatcattctcagtaaactatcgcaagaacaaaaaaccaaacaccgcatattctcactcataggtgggaattgaacaatgggaacacatggacacaggagagggaacatcacactctggggactgttgtggggtggggggaggggggagggatagcattgggagatatacctaatgctagatgacaagttggtgggtgcagcgcaccagcatgtcacatgtatacatatgtaactaacctgcacattgtgcacatgtaccctaaaacttaaagtataataataaaaaagaaagtttcacagtgtttggtctgttcccatttatccctgcaacaactcctgacttgtaacatgactcagtcagtacaggtctggggaacacagggttcacccccttttcccatccccgcacacctgaggtttccgacccgccctgcctgaaaccctgctcggacgctcagggttgggaaaaggctatgcctggcagggagtggtccccatggcaatcccyrccggctcttcctcagggagtcagaccttgcccagctctgaggtgcagataacgctgtgttcatgcctttaagtcaccctcattagatttcttgtggttcggttcagcccatccttccagccttggagaccctttgggatctttcttcaagcctctaagttattgaatatcttatggctttttgacmtctaactrtaagaagtcacatcttctgtctctwtacccatgtcatcggtatagctttttaaatatattaatacctttcctcatgtaacaaggacagacctaacactatcataataaactagaagtcaaggctgaaaatccagatcatggatatagcaaagaattaggttgaccacagaggttcttcaatgctttccycctgtctagggtgtctcaatgatcaaggctgaaggggactctggtggtgatataatcatcattatcagaatagaagcctgtggattcctgggggaagcaggcttttcctcacagtggattctaaaagaatgctcacatctgactttgtgtcacggccaccctgtggtgcagtgagtgatgtttacaacctcttttttaaaacagcaactgcaggccggactgcttctggttgtgaccttcatagaagcatagaggctctcgaagcagggctctgggggcagagcaactgccttagaacccagctagactaggtcgcccccatagccccctcagtccagtccctcacctccataaacctctgttaaatgagggtaattaataagtatctacctcctggggccgttgcagccattaagtgagttaaaacatgtaaaagtcttagtgcagtgggggcaaaggttatttagtggcagaggttatttaggatgaaaatggtacttatcccatatatttgtggtgagaatgacctgaataacccacagaaagagcacagtgtgcagcaaacagaagttcatgagtcttggctattgtataaaagacttttttatgacttgttcagacaagattaaaatcttcagaatgacagccataaattcatcaagactctacggtacagcagcagccccctcccgttctaccctccttttagtcaatctagtattacaagtagcacccaggccttccagatcccatctcctccctctacatgggagatcagtttgcctttataatacacacctgctgttagccttgggccagaagacataccctgaaagtcactagaaccattcgttcatcaaccataaaatagtaagatttccaacatattaagaagtttctatcagacatggtgcttaacattggatatgtatcatctaactcaatccttgccacaaatgcatgaagtaagtgctgttctcctcctacaattaaaatgaagaaagtgaaggttaaagcaattaagcgacatccccagggttacgcacctactaagctgtggagtcaggtttttaatccagagccttctactccagagcatgtacttataaccattccacacctgtccttcccacacattcaccgtagagcatggatcagagccacctcataccctcaccgacactgctccaccatcattagtcctagccgataacactgtgttctaactattatctttccataaatgcactggtactccagaggttgctactcccaaatcccccatttctctcttccctgcttgttactggtcccctccttcaggatactcttactatcctcatccctaccagtcaatgcacataaatgacagctcacattatcccattttttaaatgtgggaatggattccagagtygggatgttgcttcagaagagaaggggtgggaaggcaagtagcttggggtgctgggaaaccttgctaatttcccagggttggttagaaggggtcctttaccatcagtcatgtttacttctagaagctctccttttgatgtcattggttttctgcacagccaaacattgttcatgagcttagagaaaatattgttattggcttggttgacagcgtcttaatctctttatgtctcagcgtcctcagctataacatagggataggagtagtgcctctcccaaagagtgcaaacttaatcaattgactaatgataagcatgtgcagtgcatggcccaaaatggacatgattagcaacaatgatgatcaggataatgcatttcagagtygcttcatgtgatccacaaaaagcagtttttaacacaactcataaaaaagcttttatgcccagatgattcagtgatccaggtattccttctcacatggctgataactaagacatgcagactttctctctcatgtcactcactgacagcgcatcttagaaacgtagtgttatatcttcccccagaacagccgcatcttagaaacgtagggttatatcttcatatcttggtgttacatcctcagcctcaggatgctgctgtggctgaggctgtgctgcctgaaggaaacccctgtctgtccaaggcctgtctgtttggtttatagacccacacaacccatggctcaagaagccactgagccttgtacaaattcacaatgtgagatgctatagagaacaaatgaccagtttctccagcatctgagaggcgtggagtacaaagcagaagagagacagttgcagatggcagacaagtcaaacaaccacttgaacatctgggctgggtgtgaagcctgatttctgattcctggaaacagaccaaccattaaaaaaaaagcattcaacagtctgggagaaaatattgcaaaagacctatcggataaagggactattaccaaaatatacaaagaacttttcaaaattgacagtaagaaaactatcaacaagattaaaaatgggcaaaagagctgaacagaaacctcaccgaaaaaagatatacagatgcaaaaaagcatatgaaaaggtgttcaacatcatatgtcatttggcatttgcaaattaaaacaatgagatacctctacacacctactaaaatggccaaaacccaaaacatggatgccaccagatgctggggaggatgtggagctccaggaactctcattcactgttggtgggaatgcaaaatggtatagtctctttggaagacagtctggcagtttcttagaaaactaaacacagccgggcacaatggctcttgcctgtaatcccagcgcttgggaggttgaggcaggcagatcacgaggtcaggagttcgagactagcctggcaatatggtgaaaccccgtctctactaaaaatacaaaaattagccaggcatggtggcgagtaccagtagtcccagctacttgggagtctgaggcaggagaatcgcttgaacccaggaggcggaggttgcagtgagccaagattgcgccattgcactccagccygggcgacagagggagacttggtctcaaaaaaaaaaaaaaaaagaaaaaaaaaaactaaactaaacrtacgcttaccatatgatctagcaaacatgcttcttggtatttacttgaattagttgaaaacttatgtatacaactaaaccttcatacagatattgacagcagatttattcataattgacaaatctgggaagcaaccaaggtgtccttcagtcgatgaatggataaataaactggtacttccagacagtgagatattattccatgctaaaaagaaacgtactgtcaagccatgggaagacatagaggaaccttaagtgcatattaccagtgaaagatgccaatctgaaaagactacatactgtgtggtttcagctatatgatattctagaaaaggcaaaactctggacacagtaaaaagatccatgattgtcaggggtttggggaggaaaggatgagtatgtggagcactgagggttttcaggaccatgaaactcttttgtataatactgcagaggtggataaatgttatacatttgtccaaacccataggaagtacagcaccaggagtgarcctcatgtaaactgaggactttgggtgatgatgtgtcaatgtacattttgcatttataacaaatgtaccactcttgtgrggaacactgatagtgggggaggctgtgcatgtatrggggagaggggagaggggagctctctgtactctgctcaattttgccgtgaaattaaactgtctttaaaaataatctctattgaaaaatgaaaaattctaaaagttttgacacaactgactttagataatagtaaggatgcattgattttcattaacatttcaactgcaccttaaagatgcgtgagattttgtaaggaaacatggccgaaggacttttggcaaagacactgcatgaacaaaagtggggaaggaggagagtgagggcagcattcagaagacaacttggtgttcagtttatctgtaatcttgggaacagctgcggtttcaaataattcattgtattattcctggacaccatttcagaaatcatagcattttggcatccaaattctaccttctgaagggtctttcaaagctagaagagaataaaaattctttacccattcgtagaacttggttctgaatatatgatgacctcagccacagagcagtaattctcaagattaattgtgcctaagaattgtcaagggaaagggttacttatggaaaatgcagaaaccaccaccacctcgaatccagtaggtctgaaatgaaacctgcaatctgcatttttcacgagcaactcagctaacttggatccaggtggaccagggaccacattttcagaagtcaaaccatagaggtagatgcaagaggctagaagagaggtcccacattccaaagccaataagaagcaacaggtgacatgaacgagagaaatgaggggtgggaaacactgatcttagcttttcactttcatacttaggagaattatgcactccacaaagaaatacactctttctcttacttttagaaaaacacagccctttcccacttttgatagagacatgggacagaaatatttccctatatgcaacagacatttatgtgtaatgacaaatagcaactgaagggaaggagtggaggcccagggtgtcctcattcttcactttagcaagggaagtttaggatgcatcttttacgttgatctcccaatctgtaaatgttgtcttagattcttttcaagcactctgtgagccaaaaaaaaaaaaaaaatgtgtgtgtgtgtgtgtccasaccctgctcacaagccaccagttgtgacctttgaacgaaaccctagctgggaaggttggtttggactagatcacagggtttcagcctgagttctgagaaatgtgcggaggttgcaaagcatcgggggcttcagtagaagataaagaagaatctcaatcctcccccatccccatacacacacactcaccccatctcactcttcaacatgaccatctctgcttttattatgtataggtgttccaaagcatatttcacttgaaaaatagaatgtagccgctmgaattcccaaagaatatcctggatgtattagtcagcacagactaaagtctgttgcagtaacaaacaacttcaacatttcagtggtttgaaacaacaaaggtttgtttctcacgcgtaaggcctgtccaatagggttggcagggagactgatgtgacstcgttctccatcagggtcggcaggtggagcccttccttcaggaagcaggatggtgggagggatggagagttgagtgccagaaattaaaggctctggcctcaagttacacatgtcattgccacccacatttcattggccaaacaaggcatttgacgacatctaactgggttaggacagcacacccttcccacaagcnctcagggagaagggagctgaagaccctgtgagcagtgtgaatggctggcacggcggggtcatgtggtgtgttgggaggaggcttgaattccaaaccagagagtgagcttttatttactgaggaataggaattataatgggatcgttgaggagaggagtaacataacaaatgtaataaatacaaacactaattataaaaagctaaatattccatttattaattaatacactctataacatgatactgatttgcagcctgaataaaaatccccttggtgagcagaggtttctatcagctraattatgaatagtataggttagaaattgattaacaataatttgtcttttttcccacatgtgaatttaaccaatctaataagagctttataaataactaatgaaaaaagccagtctcagtgcttgtgagtcctcccactgtggaaaattagacccatctattgaagaacaaatatcccctcatggaagcaaaggtttcctctctcccgtcatttgatcagatttagaagcataattaccatcatgcaatttgaactaaatatattaaagtatttctttgaagtgaaaataattggaaagcatcaggaacaagcctttctatttgagacaccttgggaggagagttagcctcaacaaaggctgaagcagctacagctactgatccctgctgccgacttcccacccaccttggcaacagaaccaggcagaatcctggtctcatcttgtttgcatttgatgtgaattctgtcaaaaggaagagataattgagctagagttagccttctgaattgaaagggaaaggagcgagaagagcagctgaaaatactttgtggtgcaaagtattcagtctgtaagtgggatatggtgtgtgtgtgtgtgtgtgwgagagagagagagagagagagagagacatgtaagcactgtgcacacacacagacttgagaattgtacccttgactcttttcaatgggaatacagagttttaaaaaggagtaatatctgtctcttatctctcctaatttattcccagttcaagacagaggagcaagaacttttttttctttaaaggataacctttgccagagggtctgttttgaaggaggaatgtctgtgagagctgaatgatgatgtctctctttcttcctgtagtggggacaccctgtcctccactcgcccttacctgggaagttgtcctaaggaggtacaaatcccttccactccttggcagagcttcctgtacttctttacctgacttttcatgttgggagtgaggaagtactgataagtgcccctcctgcaggccactagccagcaatgccgcctggccctggcctgtgggctgacccctgggaacaggctgtgsagtcgtagccaggaggaacgggcatgccagcaggtttgtgacgggttttctgccttgatgtatttgctcctagggctgccattataaagtgccacaagccgggtggcgtagaacagcagaaatgtgttgtctcacggttctggaggccagaagtctgaaatcaaggtgcctccaaggtcatgttcctctgaaacccatggggaagaatccctccttgcatcttctggcttctggtgtttgcaagcaatccttggcttgtggctgtgtcactccagtctctgctcccatcatctcatggccaccttcttgctgtgtctccctcctcttcttctgaggatgccagccatgtttcagttagagccaacctactttggtatgaccttatgatatggtttggctgtgtccccacccaaatatcccttaaattgtaataatccccacagatcaagggctgggccaggtggagataattgaatcatgggggtggctttccccatactgtccttgtggtagtgaataagtctcacaagatctgatggttttataaaggggaggtcccctgcacatgctctcttgcctgccaccacgtaagacgtgcctttgctcctcattggccttccgccatgattgtgaggcctccccagccatgtggaactgtgagtcagttaaatctctttcctttataaattacccagtgtcgagtatgtctttattagcagcatgagaccagactaatacatcttaccttgactaattacatccacaatgacactatttccaaagaagatctcattccgaggtactgggtgttaggacatcagcatatctttgtaagggatacaactcaacccatgacactcaggccactcgatcctcccagctagccttgcctgtgtgcactgtcattctgatgctctctaacaggaaccaggaaaatctaaagagattctgtattcccatcaaaccgggaagggcaagagcacatcacttacatgttaagcctcttaattacatttattctttgaacaaatgtttggcacttctatgtgctaagcactgtgccaagtgcccagaagatggtcacagcatgcccccatgacacagaggtctagaacgaacaccaacattaaataaccctgtgcacggatgctgagaaaggggaagctcagggtgccatggtagtatggagtgagggctgtaacctagtcttcagaacattagaaaggcctccctgctgaaataaagcttcactgagacctgaaggaagagttgggtctaaccccaccaagagagcacggaattagattctagaaatgatgaaagtaaatgaagatgaccgtgcttgtcatagatgaacaatagttgtgtgaacaaaacaggaacctctttctctcaggacatggtccccatggctggctctgtggtaaggaaacagaagctcccgtctgtggctctgctgtcccttgagcgtgctcaggtggttgaaggtgactggcaccatacctgccttccagcttgcacaaagagagaaggagaagggctgggaacatgccttctttaagggcgtaacccagaaatggcacgcttcactttcgtttacatctcaggtgccagatccagtcacatgggaccctgagtgcaggagaggccaggraatgtagtctgtacctggcagacacgtgcccagtgaagscttcttatactgcagacgggaggagaagatacacatcgggaggagaagatacacatcaggaggacaactatgagccatagcatgttgtctgacacgttaacaactaaggattccttccctcccctaggatatgccgggcaatgcagtggccactagccagcgtccttggagcactcaaaatgtgggtagtccraagggaggtgtgttgcaaatgtaaaatacaaaccagatttcaaagacttaataccatagaagaatataagatatcttattagtaatttttatgctgattacaggatgaaataaattttttgatatattgtggtaaataaaatatattatcaaaatcactttcacctgcttctttttgctttcctaaagtggatattaaaatacaatttatatgtgtggctcgcattttatttccaatgtatagcaccactctagaatcgtttaacrgtgtagagggcaagaaagatgtcaacaacagagttcaaggcggagcaagggagaggagtcctagaagactggggaaaggctggggaygaatcctagaagaacttgatgttcgcctggagacttggatcttacaagttcactggaagcacagagttcatcagatgcacctcagccagctggagcatgttcctgaaacctctccagcccatttctttgcccgtaagatgggaatacatgtgcttattgcagaccgttttcatactgattaaatcagttaatgtgtgtaaagctctcacacagtatcagcacattaaaatsttcagttttgttactgaatgaaggaaccagtcgatgaagaaactagaaattcagttcaatccagtgcctccttgcacaaacagatttgaaatctttggatagttttgaaggaaaaagcatcattgatcattaaacttcatagaaatagtttcttgaatgcagaatgtaagtaacacaaggtctccactctccttaagattcagtcccttgttccacaggcatgaaaaggaccagtcaggcttctcagctgacgtggacacctgataacatggtgatggagaacatttttgttgaggctttgaagtagtcaagtatattgaccttgacctacctggagagcaggtgttggatagagttggggtaagagttgccaagacatcacaaagtcctgatgatacggtattttcattgcactgagtaacccagtgggcatttgctatttatttatttattttttattttttaaaagctgccaaataattatgaaagtttgaaatgttctattaaatatggtataaaactaagtataggctgtgtctgcaagcacccactaaatcatacagtgctgtcaaaaattatttttcagtttctgtctccatggtaggaagaaagcatttgtttagtttagtgggtggacccgttaacattgctggaaacggctgatcgagcgtccctgccttcccggctcttgtcttgtctgtgcggagatagccctgtgttctgccttctggctgtcacttctttagtcacttacagatggcattttgaaggaatgctaattgarggacttcactgttcacttctaactaatcattctgacagaaaacatctcctctgcaaaggaagaggaggaacccaagagaagaagcttttgcttctctgtgctaatgcacgtcgttctgtttcaccctaagatgctctatgcggaatcaactcaaagaagagcagtgactgaggtgttgccagcgtccctccctcatcggccctttctgcatctgctcttcrtgtaatctgtrcccttctttgttcattgccacatattcaggcgactctgtgctgcaacccccgttagtccttccgttcgtccatctatccatcagttcatcaactggataaacactgaccgagtaccttccattagcagaggcagtagagtgtgatggtaaagaacacaagctctggaaccagactttctgagttcaaatctcagccctggcacttattagatgtgtgatgttggccaagtcatttaaaccccagtgagtgccagtgtcctcatgggtcaaatggaataatgatagtgtcaaaattattgagsagttttgatggttaagtgaattattaaatataatgggcttaaaatacttctttaaacaagagaacattcaataaagattgtctactttaattattacatgtgtgccagacactttgtgggagatggaaatatgaataggctatgatcctcccctttggcatcttaagtcctcttataatatgaccaagaagacatttcagataggtcaccttgcaataagtacaatttgaagctactttattatttttatctttggtggcatttaactagaatttaacggttatgttttataactatgtatatatgcatgaatacatttttataaaaattaagactatattaaaaatggtctgtacagcctgctatattataaaatcataaaacatgatagggcccttagaggtcagctggtctaacatgacacccagtgtgagaatcttcccacaatcaccagcctctactcagatccactgggaacascacrttcatcaatgcatgccattttggctgcagagattactactgagttttttcttttgtgaaattatattctttctctcaccagtacccacttctctgtcacagtttcactttccatgctagcaagaagcatgtataatccttgttttagatggcaacttcaaacatttaaaggtccttcacccaccgtattttcaaaacastgacttgccaaggttctttctacctaatataataaggccctcctaatatgtggtgtctagaacaaagtacaaaatttcaactatcttatgattagagatggaatttagcagttctggtcttcagcccaaaacagcattagctgaccatcaactaaaacccccaggaacttttcacgttgactgcttccaagctgggtctcctcccaggagttcttaatgcacctcmtttttgaacataaaagaaacttttacttttaccccttatcaatttcaactgtcaccataatcttggtcttgtccaagaccataggccataatcttggtcttgtcctaccaggagwcccaccccgggcctgtgccatccatctgacaagaatagcttctacatctttaaatcattggcaaagttactgaggagagtagcatcaaggatgaagcaatactcaacctcatcattataataattaacattgatttaggtcttaaagtgctttcacttatagagtgatatttaatttggttctcaacaacgagatggatgacagctaacatgtactgagcatttacttgatggcagttcttatatgtcttatgagttttaccttacttaattctcccaacaatcctatgaggaaggtaatgttttgacccttgtttagaaaggataaaaaacaaggttaaagaagttaagtcataggccgggcacggtggctcaygcctgtaatcccagcattttgggaggccgagatgggtggatcacctgaggtcaggagttcgagaccagcctggccaacatggtgaaaccccatctctactaaaaaatacaaaaattagtcrggcatggtggcaggcacctgtaatcccagctactcaggaggctcaggcaggagaattgcttgaacctgggaggcagaggttccagtgagccaagatcgcgccattgcactccagcccgggtgacagagaaagacttcatctcaaaaaaaaaaggaagttaagtcactttcccgtacaaagttccaggagcaaatgaaatggctgggatttgaacttctctacatgccactctgaaatgtgtgtctttacctaataysccagcactgaaaggtgcagagagtggatttgcccaaatcacaagctttgtaagttgtttctccaagattccaactcacattatactcttagactccctctccctttggactaacaagaacaacccaacaaacgatgttcagccaggtgcagtagagcatcctgaaacaaaccccatcaacgccctctcacgctccctgtgtggttcacagagcaatcgagaaagccttggggaaatgaatgagtangatccttcttccttcaggcatcaccctgcccatcagcccagccacctacccaactgtccatacgaagttttctaagagaaccaaatcatttcaaaagatcttgaagtcatctgatatataactgaaagtgctcgactctaaagaaatctgaacacaggcaatggtatctgtaatagttcatcctcgcactgctataaagaaataccggagactgggtgatttataaagaaaagatgtttaattggctcatggtttcacaggctggataggaagcatgatgctggcacctgcttggcttctggagaggccacaggaaactttcaatcacagcagaaggcaaaaggggagcaggcatctcatatggcgggagcagggggaagagagagagggaggagagataccacacttttaaacaaccagatctcacgataactcactcatgatcacgagaacagcaccgatgggatggtgctcacacaagcatgagaaccccacccccacgatccagtcaacactggggattacaatttgacatgagatttggtggggacacacagccaaaccctctctgtatctatgaaaagtagagagatctggccgtgcacagtggctcacacctgtaatcccagcactttgggatgccaaggtgggaggatcacctgaggtcaggagtttgagaccagcctggccaacatgaagaaaccccatctctactaaaaatacaaaaattagctgagcgtggtggtgcctgcctgtaagctcagctacttgggaggctgagacaggagaatcgcttgaacccaggaggcagatgttgcagtgagctgagattgagatcatgccactgcactccagcctgggcaacagagtgagactctgtctcaaaaaaaaaaaaaaaaaaggaaagaaagaaagagagagagagagggagagagagagagagagagaaavcaagcaagcaagcaagaaagaaaagtagagagatttacgtagattagagggacagaccaccgccatggcacttttgtgctgggagcgagcatgccaaagatggctctccacacctgggtaagagttcaaagcctttgtgaccagggatactccttggccttatgtttgtcagctcctcttttcttcttcaacttsactagaggaggaaaatgcttacgtcattgtattgtaattgctggtctaggtcctcctggtaagacattaagttggaatatcctaacagctaccttctttatggggcttgatgccactgcaggaacagatgggcaaggagaacccaggagttactgtggaaattggatgcccagcttaaagtaattgggagcagtatggcaggagccatcggaactcaaatgaatccagaagttggtgttagcataatcagcaacaagccaagaactggggagttcctgcagagcctggaggaaagcctttgtrtaacagcttggtttttaacagcattcctttcccttgaaaacaatgtcatccttcacctaataaatcaggtctcaacaattcaaggaaraaatataccataagtgttgtagtaatgacaatctaggaattcctgcataaataattcatgtattagatccctagtaggttaaaaaaaaagttccaagtatagcaaaaaaaaattattacatacatcatttttaaatatagaaatttgtttttgttttgggtttgttgttgttgtttttgagatggagttttgctctttcgcccaggctggagtgaagtggcgccatcttggctcactgcaacctctgccctccggagttcaagtgattctcctgcctcgcctcctgagtagctgggactgcaggtgtgtgctaccatgcctggctaatttttgtatttttagtagagacagggtttcaccatgttggccagactggtcttgaactcctgaactcaggtgatccacctacctcggcctcccaaagtgctggggttgcaggcatgagccactgtgcccggccagaaatttgtatttttatgattatattgcccatgtttttttttttccagtatgaatgtaatcacttaactgacaaggcaactaaaatacaaaatgtataaataaaacaatttctattaagaaaaggaaggaagggagggataggaagaaggagagtgaattatgtcttagaaatcagtatgccaaaactggttttgatttttgagactctttttaaaaagtattgtgagaattctgaaaactcttagcccccttttctttcatgtttttcttctagtcgcctcgttcctgagaaatgtcatcacagtaggttatcagccaatggtaaatcgtgacctcttcatctccaagggtctgtgttctattttccattgccttaattcctcttcatcattcaatgtrtcagccatccttttcctggttaatgtactgttttctttcatggtcccctagtctcttagtagtcaagattcactgtcaaaaattccttgttatgccaggtgtggtggcttacgcctgtaatcccaacacttcaggaggccaaggtgggaggatcacttgaggccgagttcaagaccagcctgggcaacatagtgagaccccacctctacaaaaaattttaaaaattagccaggtgtggtggtgcatgcctttagtcccacctactcaggaggctgaggcaggaagatcacttgagcccaggaattcatgcagtgagctatgatggcaccaccacacttcagcctacgtggcagaggaagaccctatctctaaaaaaattaattaaaatataataaattcagatgtccttctcggtctctgttatcttctctgctcctctgtgaacattacttaaattccattataatttatactaacagtttaagcagctccactccggagaataaaatttggagttcttctcacactacaaagacctatgtgacctggccttctgtcctcggcccgatcactttccccttgttgacaatgctccagtaccctggcccttcatggtgttctctaaatgaagcagacttgtcctcttcctagggccrtgactctcccttcctggaggaccttccttcagctttttgcatggctgcctccattcatttagccctctaaacaggtgtcccctcccaggagaggcctgcttagaccatgccttccccaaccactgcacgatctcaccctgtaagccagccctgctttcttcatcacttaccactaactggaattacattattcaattgccttgcttattttctgcctttcccctctctccaccccatttcatgggagaatctcattggttttagtcatagaagttttgtaggtattcagtaaatatgtgtttaatgacgggagggaagaaaaagaggaaggaaggtagggggaggtgggaagggagggaggcaaggagcagggcaggaaattccattcattcattcactgaacattaatgggaaattcctagtgccagacttcatgctggaggcagggtatgcccaaagcaatgagcatggtgcctctctattcgcgagcctccataggcgctttttctgaatgaatggaaaagaaggcacaacccctacctcctacatgaatacacatattatcatatcagtagtcaatatttaatattattcaactaatttctccttgtagttgtttgcaagtctaaaatagatcttagtttacctaagcgaccatcaaaatgtgaataagatggtctacaaaatggtgaaggcttagaacatgggctaaaatcctttttctggcttttcaagctttacccaaactaacctttccaaacccatctcattaccttcccaacacacactcttagttctagaaaattcctttgccatcccacaggccccagactgtcttccttgccttggctcacacagatgggcgaaggggcagtataggaaggagacagtagtgtgatctgaaccaggcaagtgctgggagtcccagccccttcactgagcagttgttactgagcaagcccacttcatgggtctatgcctcaatgtcttctcctgtaaaaagggttgagggataggacttcactcagaattgcttttggattaaacatgatccatatacagtcctgggcacagtgtttatcaggcaatggttcataagcattagtcattcttacctcatcgcccctcaaccaggacacccatctttccccgtctcactccgtggcacctattcactaaactcacttgcccctaacctccatgaagacgagctacacctcccctaaactcttactcagacactgatgtgcattgttactaatatgagctctccttaattaaactgtgagcttcctgaggggaaaaatcaggtcctgctagcacaaagcaagttcttgaaaaatccttgattaaagagtgtwtgatagagctaaaaaattggaatgcacaattcattctgctctggtgctttaaattaatattaaatatgtctgtaacatataaatcctagactttcacatttaatcaaagtcttaatcataatgagcagcatttatgaaagggcaattaacagattcccaaaagaactggaaatagtaaattgctaatagcatccctaaggttttgctttttgctctgataaattaagtaatttaataatagaggcagtgtgaaccaaaaagaacgcaggcttaaaaggcagaggacctgcattctgatccttgctctgccagcctgtgactcagcaccagtgacttatctgctccgagcctctgttaactcacctcttatgtgagaagctgtattcayaccactgcttgtcagaacacgttcctaaaatccttatggttctatgcatgaaatctgacttcaaatttcatttttaaatatatcatagactatttagaaacaaaaacaacatatacatactcttagcagaaactgaaaattcattattttgtgcagccttgagctaaagtttctgtttaataaagtgmattacaaaattgtaaaatgaggtgtttaaaaaaaaacacataactgtttgccacacttatctgggtatatcagtgtttgcttgatctaggcaacgtaatgaaatatagaaagaacgaaataatacatgattacatgtgtctttcamaaaactaaatttcaaaagtttgtgttcaccaaaaataagcttaatttattaaaaataaatagtttatctrtttctaaaaaatgggtttctggacaatattttctttgctaaaaagtaaacatctcttctacataatcttaagggaccttagaactttcacagtccataaaattatagtcttaaagcctaatagaatcttacagtttaagataaataaacttatatgtttaaaattctcattagattcatcagtgtttccatctttaactgattttcctatactttaagagctaaaataattccatgaaatttcaatataaagcaatatatatataatatataaagccttatatattattgttctaagtctccagattatcccagttcagtctaaaatattctgtttttctcaggatacctctctctacttgaattttcttcattctctcaagtgaatctgtccaaaaaaattttgatttctaactaattcatcacaagtagaagcttctctcttatacatattgcatctaaattttagaaacatcttcgtattcctctaaactttgaccccctcctatataaattagagtggtttgggaggggatgaaaactagcctatggactttaaaataaatatagtttactatggtaatattttcatttctaactccagttgttaccattgattagaaaatcagccctgtctgagtgttcacattgtccattatagaacacaggcaagagcaaggtgaattaggaagagggaaacaggacacaggttttatttcaaaagagccaatggggacattacaggaatcatttgatggagatgcctattcagttttttatcacaccacacactagtataaccaggaaatgcaaggcactctctgcctactctgcctagcctaccaaattaaatctaatttatttcataaaaagacctaaggcatatagtcatctgaatgactggctcggtacacaatgaattccccagaatattaataggtttgttatagcctgaatgttgatttactgaaagtgtcattccagcctatgcatattgattctcaaaagctaatatgtgaccaaaatgcttggtctgtcaaagctgtcacatgagctgatctgactggttcctttgccactgatgctagtccgacctgatttttgcctcaaagaagcagggggaagccggcggcagcaaaggcaggtggttaggagcagacacctttgaggggcaggtggttaggagcagacacctttgagaggcaggtggttaggagcagacacctttgagtcagagcagtggtgctcagttgccagcgattttgtccccaggggatatttggtcatgtctggagatagttttggtcatcacaacagggggatgcttctagcatctagcgggtagaggcagggatggtgccaaacaccatgcagtgcccacaacgggcccgtgagaatggcctggtctcaaacttcagtagtgctgagattgaacaccctgagtcagactccctgcgtttagttctgatgccgtccgtacccacagcttgctttgggaaaccttcctaagcttcccaagtgtcaactgtctcatctttaaaaagagtgaatcccatgtcctatttcacagggcaaagatggttgtaaaaatgaaactaatcgatgcttactaagcacttgggacgctccctaacacgtaacgtacccagtgcatcttagttattgttagtaaaggaaataatgatacaaatagcagcaacaagaaaggctttcttcaggctggatggcccatctagaggtttccagtgcgtctcagcattccaagaggactttggttcaaaagccagttataggagttcagaaaatggccatgtgcaaaacccagaaattttctttaagctgaaaccctgccaggcagggtcttttttaaaaattttcttcaacttttcattttaagttcaggggtacatgtgcaggatgtgcaggtttgttatataggtaaacgtgtgccatggtgttttgctgcacagatcaacccatcacctaggtattaagcccagcatccattaggtattcttcctgatgctctccctccccacaaccccccagcaggccccagtgtgtgttgttcccccatgtgtccatgtgtgctcatcattcagctcccacttataagtgagaacaggcagtgtttggttttctgttcctgcattagtttgctgaggataacggtttccagcttcatccatgtccctgcaaaggatatggtcttgttcctttttatggttgcatagtattccatgatatatatggaccacattttctttatccagtctatcaatgatgggcatctgggttgattccaagtctttgctattgtgaacagtgctcctgccaggatctcactatgccactcccatgccttaagaaataagtagaagaggtcacagtgagtaatagcctatttgagctaccaatgtgctctctattggggatgaggggcattaatgtagatgtcacctttagggatgtgacatgtgaggtaaggatagaattgtagcttattgaagtttagtgaattctgtggaggatccatgagtttatacgctgggaattaatgcaagtccatattctatgagctatgacccctttcctgaccttatagatgaggcctgaaagttcatgaaggcaagcatcctggggctaattagcacttacgcatgacaagcctttcaaccacgctcaatctttatcatggattttcagggggaagccgacatggagcactgtgaaacatttttataactattaaccagtgctttggagttggcctgaaatacaaagccaattcagtcaattaatgcatagctatgaaaatagttatctctatttcacctaactctaagcatctctggcgaagtctcattaacaatgcatgtttttttttttttttgaaacacaattgttagttgtcacgagccggaaagaacatttatctgcagaacacatagagagaaattgctgagaagtcccttgcatcttctccctagcatacttttacaaaaccaaattcactctcaaacttaaaaagaagccgagggagaaggaagaattctgtactgccagacttcgtgattaaatttagtgaagatgctgagaatgtctgtggaaattctcaaaaagctatgaaacattaaatatgccacagttactaaagtctaagctaaaatacttaaagtgcttatgaaagtcatattgtaagtctattataagatggccttttgttttaataccaaaaagttgtgcaagtcctctaggaaacccttgtaaaaattcaattaacctttgtgcagaaaaaaacaagacccagaaacaatgccagaattggggtcattaaccacgtgctggcctcatggtggagaacagccacgtactcagttgaatgctctgaaagtcaggctagcttgcagggaattagccgtaacatagaaagcattcttcatgcttccctgcccagctaatgtgcattgtactttgttcccattttgttttctaaaacattccaaattatgtagagaaagtatgtatttaaaagccagttctcaaactaactagctaatctatggcggctttctcccttaaagaacttagtcatattatttcatgcatctcttcatattcatattgatgacaatgttttcttgacctaagagtagggacaaggacaactttttatataagcttcctgagggagattgttttgatcctaacagaacctaacactgcacgctggcatgctgacaaatattcttcacacagtcaataggtcatgagaacctggttagtaaatgtttgccacacagttcctaaagcattaatattggagccataaaactttaaatgtatcatttgttgtgaaatctasttgagtaacatgctttaaattattcttgtttttatgttatctatttgaatatacagttttcaaaaattgataaattttgttaacaattttacttgagattgtttctttgaaagccacctacatttttcattttaagtgactgctgaattcatcattgatacagtatgatgttgttgcagtctcccccaccccccgcaaaatgaacatatttatggaccagtgtggcactaatgttctaaagtgactccaacaaactcaatccttgtttcttttggcttcccccctccctcccttccttccttctttacttcctttcttccttccttctttgaaaaattgcccaaactaagtttatatgaagagaagaaaatgacagaggaattgtgccaattcactaatgtgttctagggcacaatcagtaagaacaataataaagtgctcaaacagagtgataggatttcatcttgaaactcaggatttaatgacagctgccttttaaaattaccagattcactacctaccctctttgtgcggcaaaggttctttttttccttgtttgtttttgtttttttgtttgtttgttttgtttttttgttttttgagatggagtcttgctctgtcgccaggttctagtgcagtggtgcgacctcagctcactgcaacctccacctcccaggttcaaacaatcctcctgcctcagcctccggagtagctgggactacaggcacacgccaccatgcccagctaattttttgtatttttagtagagatggggtttcaccatgttggccaggatggtctcaatctcttgacctcatcatccgcctgcctctgcctcccaaagttctgggattacaggagtgagccamcgcgcccagccaaaggttctttttattacttttcctgatgccttctgccccctgtactgggtacagaggtaggatatgttgggtgggagagttgataggaattctttaggaaaaaccaatgtgattttaattggtagagccctttctaaaaaaatcttgatacggtttgaatagcttttaaggaatatgtagaaaacagttctatggtggcrtgtaatattttcagttcaaaacactgcccttgactggaatatgccaatgttctttgtggcatctgaagtcaggggcagtgcctgcccacttccacgtgctgctgcctggagcccgcgtctcgtgcttccctcaggaaccccctcttcgtggctgtgaagcgcttttctccttgcccggttaccatggagaaagctgcaccatcagctttcctttccagttaccaatgggttgttagcacactgcttatgaaaatggtttctctaatgctaattagttatagcaatgaaattaaaagcggtgcctgcttttctttattgatactttcagcatgtgctgaggcaggtatttcagataaggcctgaaattactaattatactttctggcaagagaaaacattcacttagcatgtaatgggttagacgttaactctttcttaccttccattgaaggttccagttaggtgatttcctacaaaggagacgatatttcctgagtcttgtctgcttcctgtaatagtgtacttggctccttgtgccccaaagcccagaaccaggaatgcacaaaagacccatcatcgcagtgttattaataccaatggaatcaaactctcgcttctggcattttgtgagtctgctattttaagcaagctgtttaagctctcaattttctcatatgtgaaataagagaattaagattcttttccaggattgttgtgatggtggaataggaaaatagggccagcttggagtgtgcgacctgtacagtcayacagggccccatactcacagggccccatactcacagggccccatactcacagggccccccagagtttgaggctctactgctaatatcttgaaatgctaaatcatttttgaagaaggggctctgtgtctttgttttgcactgggcttcacaaattatatagtcatgatcagataggaaacgctgcagtgataataaatactccaaaatctcagtggcttcacccaacaaaagttcatttctcgctcatgctatggcctgcacacggctgaaggctgccctcctcatcaaggccgaggctgacagaggctcaccttcacctgggcttccatgatcccgcaccagagggaagggagcaaggaattgtgtgctggcccttaaagctctcacctggatgacacttgtcactggtgctcacaactctttgtctagagcaaatcgtgtggcctggtctaacttcaaaggagatgggaagtgcatttccaccttgcacctggaaagcagaggctagggaagttggagaccagccccacactgtcacaayayagggagggggtgccccagtgaccccggctttgtgcaagccacccttcagagggctacattgtaagattccagttttctcctaaaacaaagccaagccaaattgctcaaaagtaaaatcacttaccttttaaaagaagcccttaattttcttattttccaagaagttcaagattcccttgactgtcgtcttccccggggacagagcatatgctcagaaagttaatgttgcagcgtcaggattaaatcctttccagccaaactgagacactgaaaccagcattgctggttccctcattacacttcctcaagatggaartggcattgctgcttgcgttctgattatacaatataaatgtattattataacacattcaagcaaaatgaaaaagtagaaagttaacataaaaagcaaaaaccagtaagatcaggaatctcactacttattattacttatctttctaggcattttaggatacatacccacacttgaaactttttaaactattagtattattatacatgtgaatgcgtagatagtgttttatggactgctctattatgggcatgtacgtactaaatatagtgataatgatgctatttttcaaatgtcatcattgtgcgaagtaatcacctaccacacarcaatcatacggcatacagaacgatttagttccctgtcctcaggcctcagttacaggttctagaggcagccacttagcgttgttattccagaaattttctgcacatctataagcaaatatatcttttttctttcatccaaattgttacactctatgtataaattgttttcattgttctatagtatttcattttatgaaatatcattatttgtttaatgaattacatatttatatgatgactatagctgcatcattgcattagtatatccacataaaacttatttacttgtttatttgatacatcatttttgttttgtttttgccacaaagtctcactctgtcactcaggctgggagtacagtggcgcaatcagagctcactgaagcctcaacctccgaggctcacgtgatcgtcccacctcagcctcctgagtagctgggactacagcacccgccagcaggctaggctaatttattgtatttttttctaaagacaaggctttgccatgttgcccaggctggcctcaaacccctggactcacatgatccacccacctcagcctcccaaagtggtgggattacaggtgtgagccactgcacctggctggccacatcattcagaattttttgaagaagccagataacagctattattttgggagttaaatgaaataatcctttggaaagtattctgtagatcaactatcacatgtgtaactatactgatggtaaacagtaattatttgaccatatgtcctatctacttgtgttattttattaataagtgcaataatataattctgcatctacaatgtgtaaatctcacattcccgtggaaatcatactgtaaagagaggcataatacatgtgaaaaagagacacataattgtggaactatagcatgagaagtggtgggagccacattactcagtttgcccgaggcaagctgctttatgcccattgttcaggagtagctgctactatgttccctttcactctcaaatttgttcagttgaacaataaatcatattgtcatttgatttatgagtaaatcaaccaggccccaaatcttgaaagagacatccttaatctgcctgtgtatattgtcattttattgtcctcagaatagctaaaatggaacacattgcaactgctccttgttaaattagttcactgtgatacagctcaggtacaaccgttcatttgcactttacacaaatctgttgatttaaagccacttttcatgccgctctttcctgcttcggagactggtcgccatcttgtccctctctattccatcctgccaggctgattatcttcccctccagataatactgggaagcaaggaaggcctgcatgagccgtcttcaatatatttgctaccattatcaggatagttacatttgtaatgcttatgcattctaataacatgatgtatctatttaattttcctaatttcccatttgtgatacagaaaactaaaaattatttctaaaaagtattctgaaaacaacttatcctttcacacttccaatgattatccaccaaacaaagttaattttcttctatgctgcaactgaattaagaaaggccatcttcatcaccttgattcattaaccttatcctaaggaaaagtaccagtattttttttttttttttttgagatggagtttcactcttgttgctggagtgcaatggtgtgatctcggctcaccacaacctctgcctcctgagttcaagcgattctcctgcctcagcctccgagtagctgggattacaggcatgcgccaccacgcctggctaattttgtatttttagtagagacggggtttctccgtgttggtcaggctggtctcaaactcccgacctcaggtgatccgccygcctgggcctcccaaagtgctgggattacaggcgtgagccaccgcgcctggccaagtcccattatttttttccatcaccaatacaagctgctgatcgcctgcaagaagagtcacttcatgtttttaatacttttaaagccaaatrtcttttcaaaatgctgggtaggaaactacacaggaacagcattctctgataattaaccacactggtgagttaagtgctgttggcttttcctcaggatacctcactctccaacatcatccaagttaattagctgacatcatgcgcacttccgtgcctgccttactgcctcattagaactgcatgcactggtttgtgtccaagccatttcacctcagctcgcccaccagtttttctgttagcagctcctgtatgctggctctcggtttccattgccttccttttcatgctggataacgtcttcacagaggatgcgagacagcaaagcacagtctcatttcgttgtaatgacggaatgtcccagtcagagccaaagagtgtagaaattccacactaattccagcacatctccagtgttctcagaaatcgatcactgtgtgactaaaccgccagtgtcaaagaaacaaatcggtgggtcttctgcctcccggctgccctgacttcctgacaactgttcttttcctgggagccatttttaatggcctttttaatcaccatcatcaacagtggggaactctcaataacatcttaagctttaaaatgtttttgaaagtgagttggagacgcataaatatttagattttctcaaggaaaagtgtcttaagtgtctgagttctaaatttgagccaagttttctttgaaaatgtatcccaattacagttgtaaatagtaatcccacaaacaaaagcttcggggggaagttactaaaaacagttgaattccctaaatgttgatttccccacacatcagaagcagcagctttttttaggatgtaattattttcctgatatacattctcacactcctgggaaagagttttagccattttgtactagagatccatttggcagtttgatgaacagtttggacactatcttgaataatttttttttttttcctgagacagagtctcactctgtcgcccaggttggagtacagtggcgcgatctcggctcactgcaagctccgcctcccgggtccacaccattctccggcctcagcctcctgagtagctgggactacaggcgcccgccaccacgcccggctaatttttttgtatttttagtagagacaggctttcaccgtgttaaccaggatggtctccatctcctgacctcgtgatccgcccaccttggcctcccaaaatgctgggattacaggcgtgagccaccgcgaccagcctatcttgaataatatttttaaatatataaaatatataagattgaaaggaaaatgcagttatcagagtaataaaaagaaattcatggtttttaatatgtgtttctttatgaatgaattaaataacaagtcaggccaggaacagtggcccttgcctgtaatcccagcactttgggagaccgaggcgagcagattccttgagctcaggagttcaagaccagcctcggcaacatggcaaaaccctgtctctacaaaaaatacaaaaatgcctcagctacccaaaaggctgaggtgggaggatcacttgagcccaggaggtcaagactgcggcaagttgtattgcaccgcggcactccagcctgggccacagagcgagacctcgtctcaaaaatatatgtaaataaaaataacaagtcaataccgtgcatttaaaatatagcaagttaaagtaaaactttattgtttaaagaaataccagtgcaaagaacatttttgctgagtttacctgggaacaataaaccatgcatgagaatgagtaccctccttcctcgtgatgaccaaaaacaaatcgcaaatgggaatactggaaagcaacgtgaatgtctgggtcaccagtgtgggaagaggtgactgcattcccccaagttggcagctccatcacaccagttgataggacagcagcgatcacatgcaatctactataagtataggtaatagtgggtcaggcatggtggcttatgcctgcaatcccagcgctttgagaggcaggcagatcatgaggtcaagagatcgagaccatcctggccaacatggtgaaaccctgtctctactaaaaattagctgggcatggtggtgcatgcctgtagtcccagctacttgggaggctgaggcaggagaatcacttgaacccaggaggcggaggttgcagtgagccgagattgcgccactgcactccagtctggtgacagagagacttcatctcaaaaaataaaaataagtaatagtgggccgggcgtggtggctcacacctgtaatctcagcactttgggagtctgaggcaggtggattacgaggtcaggagatcgagaccatcctggccaacatggtgaaacccagtatctactaaaaattaaaaccaaaaaaaagttagccaggcatgatggcgagtgcctgtagtcccagctactcgggaggctgaggcaggagaatggcgtgaacccacgaggcggagcttgcagtgagccgagatcacaccactgcactccagcctgggcaacagagcgagactccattgccgaaaaaaaaaaaaagtaatggtgaacatagttggtatttcaaggtgtctacagctgctctaaaatcatacgaagatatctgtgattctcatctatgactaagtcacagataccactaacactactgatattcatacctatgtttataactgaaggaaacaccaaacttcaggtagggattagtgatattaaatatataattaattcccatccaagttcacaagctccacggactcctgttaccagtctcaatcttataggaaacaagaggcttggtctatggttggagcaggaaagacaagatgaaggagaataactatggggtagccaacaaggtaagagttatgaagagccattacacaccaggccctgtgctgggcacttccgtggagtagccaattcattcctcacatgactgcaccatttacttgtacatggtactagtaaacagtggcgccataatacaaatccatgccaccacaggagaggtggagtgacttactggtaagtttggaaagagtaaactgatcatgctccacgcccatttttttcttggtagcagatgctctgcagagaacttatattctgctctgtttttcgaggaagtctggctctgcctaagcttgggtggatagatttccacaagcataaaatttgatattagaaaacccgctagtctacatacacaagtcatgccctccatcctagcgatcttgtatataaaaatgccactccacctgctctcctttcttatttacttatttttctattatatatagttaaggtgtacaacatattttgatatatttatacatagtgaagtggttactatactcaagcaaattaacatacttatcatcttcatggttacttttttcatacgtatacagtaatagcacctaaaatctacttttttgcaaattttcattatacaatattataattatagwcctctagtacatttctagaatatttgtcctacctgtaactttgtatgctttgacccatatctccccattttctgccacaattccccccaccacttccggtawccaccattttattctgtctctatatatttgacwttttttttttaagattccacatgtaagtaagatcatgcagtactttttcctgtgtctggctcagttcacttagcataatgtcctccaggttaatacatgttgccaaaaatagtagaatctcctttttaaggcttgataatattccattttatatatatatatgtatataaataaatttatggatatataggtatctatatatataatgctcccctctccctaatatatrtgtatataatatattccacaatttctttatccattcatcctttgatgcttacttaggttgtttgcatatcttgctattgtaaataatgccacagtgaacataagaaggcagctctgtgaggtgctaattttacttcttttgagtatatactcagcagagagattgctggatcatatggtgctatagttctatttttttattttttaaggaaccttcgtactgttttccataaaggctgcaacaatttacattcccaccaacagcatgtcagggttcccttttctccaacccgtgctaccgcttgttatgtctttttgataatggccatcctaacaggtataagttgctatctcatggttttcatttgcctgtccctgatggtcagagatgttgattaccttttcgtatgcctgttggccatttttatatcttttttggagaaatgtctattcaggctctttgtccgttttttaatcaggttatttggggttttttgctattgagttgtaggcatttattttacattttggatattaaccacttatcaaatacatggttttcaaatattttcttccaatctgtaagctgccttttgattctgttcgttgcttcctttgctgtgcagaagctttttagtttggtgtagtccagttgtttattttcacttttgttgcctgagctttggtgtggtatccaaaaagttattgccaaggcgatggggtttccctgtgttttctactaggaatgttatgatttcaggtcctatgttaagttctttcatctatgttgagttgatttttgtgtatgatacaagctaagggttcaattcattattttacatgtggatatccagttttcccaataccatttattgaagatattatcctatccagataccattgtgtcttcttggtgcctttgtcaaaaattagttgacccatttttcttttcaagctgagacagggatagtaggtgtcatggattgggtttccttaaactcccaacacgttctgcaagtaagacttgctctcttctaaaggcatccattctattttcaaacagttctgatttttacaacgtttttctttatrtctagctaaaatcaacctccctctgttgtcctggggtacttggaagccttagtccttctgtgaagggcttatccttcagtcattaaagcaggccatgaagaagattaccaactctacaaaacaccctggtccaaacatgcatgtgtccttccttcttaacatggtcaaaatactagattaggtttttcaaaaatttttcaaatgagagagaacttcttcttcataggcttcagtatttttttttaatgtctcccaaagttggtattgaaattaaacagattccaggtgaggtcttgccaccacatagcaaaagaaaactatccacaccttcagtttatgctgtatttttctattagtgttaccttagattaatttaatctttcatagatgcatttattgtatgttaattatctttatgacacatgttctgttaagctataactcccacagccaatatagctgttacatatattctagtactgggatttaaactcttctctaaaagtcggttctgtaatcttgttagattacccagtgatgtcagacggtggggggatgtttttgaatcctgattctgtttccgatagaccatccaattcaagagcatatagaaattaggtcatcattctgtcaaggtctattttcaagttgttaatgaaagtgcctaagaggatacattcttcattacccaatccatatttctccatttctttctttttcatgtcttgaagatttgttgttttgatttggtttggtttagtttggtttttcatcctagtctaatgctgacattatactgggaacttattgaatattcataagtttgaattcataaacaaatattttcttattataaagctgcttacgtaggtgtatatctgtaagtgaaataaaacaacatccccataaccccaaaactcagacattgcagactctgctaatgtttggctatatttctttctaggctttttgaaagagcatttttctaatgtacatttttcactctattcattacctggcctttctctgtctctccctctattgagagggagtggttagtccagtcctaacatttgcaggacctgggataagaagacaagtgtgggttcacatggccctcatctcaatgtttaaaaattctaaatcacactagcaagctgttaaataaaatacatgctatcctcttaccttaaggagtacaccttcataaggaccttagaggccagattctaacttagaattctctgacccctcagaattctttaccagaacttagtggaactgggagagtcagcccagaccccttctcttgtctagctctgccctgcctagaaggttctctgcacacacataggcagacacccagcccacaaatctcagattcatccacatcccctacatgtggcagcccttcaggcagccttcgggctcagggtaggcacatcactggaacagtccactctcagaaggacagatgggaggaagctgcctacacaagccctgaatcaagcccaggccatttgggcagggaattctggggctcaggtgcctggggcatagtctgaagggcaagcatgtgctgttgtgggtgcagctttttagctccacagactctttgctccaggaagaggggtgtggccagaggagggccagggcagaaccctctaagacataggacatctcttgagtgggtcaaagggttagactgggagtgcttctcaggtaatccagagtgtcctgctctcaggaagttctgatccgttgagaattactcttgagtgttcataatgggagttccttctacctagaggaaaacctcaggtcttccaccactcccagctccagcagaagrgtgatgagcactgggtagagccgttgaagaggggaatgaagatttagatgagtgactacattaaataataccctaatgggcctatgacagcaaaggtagtaatataactaaagcatataatcaaacacaaaaattatgtggcatagactgtacaccattattttagtgtaggttacaaggctcagactgyctaggtttagaccctagccagagttcacttcctagctatgcaattttgagcaaattaacttctctgtggctcactttcctcttctattaaatgggtgttttttaagagtgcctaccttggtgaattgaaggaaactatgtatgttggatgttcagcctagcaatgcccggttcatagtaagcactttgcaagcattagctaatttttaagcggaacaattattattaccactattattaatgctatgctatagcttctatgagaaaatgcaggctagtggtcctctacctctcacagttcagtaatatgtgtattagtttccagtggttgctgtaaaaaattatcacaaatgtcatggctgaaaacaacacagatttattttcttacagctctgtaggtcggaagtcctaaagttaaggtgtcgcagggctgcattccttctggaggctgtgggggagaatcctcttttctcccttttctggcttcttgaggctgcctggattccttggcttgaggtcccttcctccatcttcaaaaccagcaaagtaaccttcaggtttcaatctctctctctttctctttctctctctctttctctctctctctctctctctctctttctcttgttcactggacccacctggatagtccagaattatctccccacctcaagacccttaacctactcatttctgcaaactcccgttgcgatgtattagtctgttctcacactgctatgaagaaatacctgaaactgagtaatttataaagaaaagaggtttaattgactcacagttctgtatggctagggaggcctcaggaaacttacatcatggcggaaggcacctcttcacagggtggcaggagagagaatgggtgcccagtgaagggggaagcctcttataaaaaaagtcagatcttctgagaactcactcactatcacaagaacagcctgggggataccacccccatgattcatttatctccacctggtcccatccttgacatggtggattattacaattcaaggtgacatttggatggggacacagaaccaaaccatgaatgctaccatattcataagttccagggatgagtacacagacatgggggaggtggcagtattgactctttggcagcattttggtggggagtcattaggagatgcatgaaggaattttacttggcctgtagggagcgcccatttgtgtactgctgggttttaaagtaggaggaagttgccttggttgtagtcagcattatcagttaaccaggttggtgttgagtatgtcttatgggaaggactgacaggtgtataggctgacagtgagcatgagggccttcaactgtggccacaaggacaacttcacaaatgaatgaacatacactgtgcatgactttcctgtccttgagaagaacatacccaagtcctctgaggctggatcctcccggcagctgcattagtggtaaatagcagagtaattccccggccatggatgcaaggacaggagatggtaacttagactgtggtgacaccttcacttaaatctgagccttcctgaaatatgagtatttgaaataatagcagacgacattgggcagatttcagtaaaggatgaatgcatttttaagtttctaaacatgttaataagcacatgtcaataaatggggagtgaggcaaaaatggagtcaggctgaagtacccccttgccatttaaaggatactctgtaggatttgacatttattatggttgacttttcaaggctgagtattttcccagacccactgcctcttctctcttcctgtctacacctggcgtagtacactatttcagattgaagattaggtttggctgttttttttttgtttttgttttaaagtatagggtaagaggctgggcatggcggctcatgcctgtaatcctagcacgttgggaggttgaggcgggcggatcacctgaggtcaggagttcaagaccagcctggccaacatggcgaaaccccgtctctactaaaaatacaaaaattagctaggtgtggtggtgcgtgcctataatcccagctactcaggaggctgaggcaggaaaattgcttgaacccggaaggcagaggttgcagtgagctgagatcacaccacttcactccagcctggttgaaagagtgaaactctgtctcaataaaactaaaaataaaaataaagtgtaggctaagggagtgagaaggaatagaattttactctttctcacatgaaaaaaaaaagctggaagtatgcaactgacggacagtgtgggacctccatggtcacaagggagccatggccattcctcctgagaatgtagctccctggaatccccaggaaaccctctactcacagctcactgatcagccctaatgcaagcaaggctggaaaagtagaattttgctgggcacatagttggtgttctgttactgaggaagaagaggaacatgaatattgggcaggcatttgcagcctctgtcgctcctgcacatcctttgagactcctctcaagcgtcatcatctccaggaagccttccctgtatcctccttttaggctcagcacctctcaacctgcattcccatagcaatctgcatgtttctctgttatacaacagtaaagcattgtattaaaattgtatctaggtcttccccattggaccatatgcttacagagaaatgcccatcttactcgtcattacactcttaaatgcccagcacatacaagaacttggtaagtgtgtgctggactgaacttatcagttaataacgtatatactccatagggctagaatcgtgttcgtattatatgtgtctatatcaaattcaccgcacagtgccaggcacacagtccactctcaataatatttactgatgaatgggtgaatgaatgaatgaatgagtgaattatacttaagacagaagggtgtagatggaagaagtctctctcaaaatgccactttcccagtacattgaaaaaaacaactattcgtcagcacaaatggctcccccagcagcaggacactgatgagcagtaatgagagaggctttttaatccagaggcaacagtgagaagaaaatgaaatcagtggcaaacaatcctggtttctgggatgtagaacattctgcagagagaagttggcttgtatataaggacgcgaatctagacaggaacctcttgatgagatttcattcctttgccctgaaaagaatattttatttctgccaccagaaacaaaagaataaaaatccctcattaactaacttcgtgtgactgtcccagaaaggaaaaagcttgtatgcccatctgagaaccatagtcttgccaagagaaccctgagattccactctttttgggctctacttgacagctttgaaataaatctatcaatcacttgtcagaaagcctgtccttgggttgtttgtatgtctgtgtgtctgtgtgtggatgtttgccctagcagtatggctgcatatttatttaaggttaggccctcctgttactttgagtgcagtccttaccagagaggatggcaaatctcagagatgtactggcytatcttttaatatgcaaactgtaccttcatcctaacatccacagtgtctgagttagttgagcaagcagaattgtttaagcttctgcctaaacagatcagagcagatgagtgcaaaaatagaaactagttgactggaggagaaatgataaaactattttctagatttctaccgtaacaaaaagaacaagccaaacagcttacatagtttcagagattttttaacccatcagagagctgagatcaaaaaaaacctaagtgaagaaaattactaaaagtaataagactttcctggaagagaatgttatcagaattgactaaatcattcaacaggttaacagaagactgagcagaagaggtaagtatcaatgatcttgaagagcggtcaatataaactgttcaaatagaaacacagggggatctaatgtacagcatggtgactagagttaataatgttgtattgtgtacttgaaatgtgctaagactaggtcttaagtgtcctccccacacagacacacacacacacacacacaaagataactatgtgtggtgatagaagtgttgattaatttgattgtaattattacatagtgtatacagatatcaagtcattattttgtatgtgttgaatatatgattattatttatcaattatacctaataaagctggagagaaaggaaacacaaagtgaaaaaaagtaataaacatagaccagagtatccaagatctggtgaatatcaaacactgtgtaattggaatccaagaagaaaaagaaagagaatgggccagaagaaatatttgaaaagataatggtgaaaacttttccaaaactgatggaaaacatcaaattaaatacccaaaaagcacagtgaatcttaagcagtagcggtacaaagaaaacaatgtgttaaaacaaattgcagtcaaaatgctgaaaacacaagataaggagataatgttaagagctgccagagggaacctcattgtatggagagcacggtgataagagtgagggctgacttctccatcaaaaacaatggaagccagaaaacaatggaatgatatggaaagaaaaaagtatactaaaattccatgtctagtaaaaaaaaaaaaatccccaaaagaaaggcccccaaaaataacattttcagatgacaaaagctgacagaatccatcagacttgtactgcatgaaatactaaaatcacgtctgcaggttgaaaggatatgaagtgaagcccagatctgtacgaaggaatgaggaacatcagaacgtataaaaatgtaggtcagctccaagatgattttttaaaatcccaatgttaagaagtcatcattattaccaaaagaagcaagccagaaagcatgtcgcctttcaaaaagaactagagcagtaagcaaacactgaggcagaaaggcctaaagcaggtcctgcatgggccagtctcgacggtatgaaagaagactcaccgtctagactgctgtctctgtcgctgcgactttttgcatactccaagctgcaagagtcagtgattgaagggctttctaacctctgcagctcacctggagaggatcgcagcctatcgcttttgttgaccacaaggacctgagctctgcagaagcagttgtcacctccttgaagagctaaggcttccaaggagatattttgtgggtcgaactggctaagcaaaggggagcaagtgacccagcaagcaacaggtggggaagccaaggtggaggaacttgtgtattgcctgatggttttacctgacatttgactaattcgtttcactggggattcataagagaccttaggggcctgtatgtcagaatttgaggtgtgacttactttggagcccttcaaggcattatttaattatttggtaattcatttttctatttgtctgctaatgaacatgagtttacactttctgagaaattaccaataccaagactgtagttacacaaagaagttcaatgatttccttaggctaggtgggcataggatggtgttgactgcagatgggcgtgaraaaacctttttcagaacatggaaaggttataaaatacatcctgattgtagtggtgcatatattgccaaaactcatcaaagtatacaattaaaactgrcatatttcatattatataaatgatatmtagatgaagtttctttaaaaaagaaaatctgagattcaaagtttccaggaatgaaatgtgacttccataggaattggccaactccatcagttttcccaatccaatccctggcttgagaaagtaccagctgggcatggtggcccacgcctgtaattccagcactttgggaggctgaggtaggcagattacctgaggtcgggagtataagaccagcctgaccaacatggagaaacccygtctctactaaaaatacaaaattagctggacgtggtggtacatgcctgtaatcccagctactaaggaggctgagacaggagaatctcttgaacccaggaggcggatgttgtggtaagccaagattgcaccattgcactccagcctgggcaacaagagcaaaactctgagccaagatcacaccattgcacttcagcctgggcaacaagagcgaaactccttctcaaaaaaacaaaaacaaaaacaaaaacaaaaaaaaccctaaaggtctctgtatgttgatgtctaccatcctagctctatggagtacagtatcttaaatataagtgaataatactataatattgtgggatagttgcagggcttggatttaggtgcttccaaaatttggatggaaatgttggaaaagtgatcactagataaagattatacttccaaagtggacacttgatctttaccactgtgtatgcagttctgatgttgctttagctggggctgagtttcagccaagtctttccagcttatagtacattgaatttctcattcatgctgaatcaaaactttggcctttacctgtaaagtttcagtccatgggaaccaagaaatkggaatactccatatctggatatcaagatggtcaaagaaagcatctggtaggtatagtgtaggttgatgtaaagatccctccaaccttggtagttgatgccctcagaaaagtgctgccagatcccaaatgcatcctgtccaaaatcaaggaggggcaggatgatatggccaatttcaggatttttaatgtcttcttagactcagttgacctctggaaaacatgattcaagagccagttaggcaggatcagtaaggataagccaggtagaaccaaacagtcgtcattctgaaagctgggaaagttttggcatccttggtaacaagggaggaggggtcaggagaggcaccagctgacagtgaagctgacctggcagtcaccttccagaggccgtgctgaatctggatgcctcaggaattctactggtgccccatgccaccttcttcaataatatatcactgaccactccagccagaagggctcacactgaccttggaaccccttggtgctcagtcacccataattctcattaggtagttttttctctatttagtatttatgtaagtatttatctctctgactttcctgttgcttccagtacattgcagtctactatacatagaacttctgacatcttcatgcccctatagcctactgtagtgccttgttaatactaagtgctctaccaaacaaaaaaactgagtgaagaaatcctgaggaaatagaaaatattattggcctcagacctattaagccagtttagaacaaaaaaatcatggattatttaaagtatgccaattttgggatgaaagtgtattctgtgtgtttttattgctaccrttctccagagaaacagggtgatattttccagctacagaatgttttagcagcaattcccaacgaattcagcttatttttcagcaagttaacctctgttaatgacatattaaattttgatttttttaatatgatcaccctggggagacattcaaagtagaccttttaaaataagggtgagctatattgctgatcagacatcatggtgtcatttcacttcagagaatatttttccagaaagacacacattttaatgactggtcaaacatactaaccatcttatctttgctttgggccatataactaatttagctagtcattagcttcaaggtaatggaagagcacgttctacagtattaactgaataccaaatcagctcctaaaatacctctccctgtggtatttcgactgaaaaatgccagcttatgccagcttataaaccacagatagctggaagttcaggtgattcagaataaaagcatgctgtctagataacattgttagatgtaaatgattcaggctcacttttgatctgatctctctagatggactagactttggtcatattggaagacagtagaggctaatattgtgcaaagatgaaaaggatgagacaaagcatgtgtaggtccctaccgtagtgagtccccgctcattgcaggtggcggcatttggcactgttgactgttccctcccctgctagcttgtgggtgcccttctcacccacctttccagccatcttcccccaccattgccatccttcacagcccacattrcaagctagtcttccacctgccctttaaccrctgttattttcaaggtgaccatccttggtcctctcttcaagccaagccctccctcagaccttctcgtgtatttctgcagttctgactgcctatagttgataggccccaagtctgtgtctctaactagaccattctctagagctcctggattatacttcacattgcctactggatacctccatttggaattttcataagcatttcaaatgtaaaatgtcaatatttgagctcatttttccacctcttccctcacccacatgcaaccctgtcctgtctcttcttacctcggtccttgcaatgagtggcacttagaatcctccgtgcatgtattccagacccttttatctccagtggctgactgataactgattgattccagaaggccagtgattcctgcatccacctcctctttcctattaactcagggtccccactctttacctcaactactggaacaacctacactcttcctgccttgagtgtattccccctagtaatccatcctttatccccataccataaaatatgctcataacaccccccataaagtgattccctagagcttaaaaacctcagctccttaagaccatctactttgttttctggaccctctggcctcatcttccacctaccctccctctccaccatccccctcatctccagcgacaccttatacttaactcatgttgaaccatttccgggtccggaactcactgagtacttttcagacctccagacctttgcacaggccgctgcttcctctgagccactggctagcaaaactctttctctgtccctgaggacaaacttgacgttcagttctgttttctgaaaaactgatgcaggtggaatgtttatggggttaatagacagtaagtacttatgataaagatgactcttggaccgggcatggtggctcacacctgtagtcccagtactttgggaagccaaggcaggcagatcatgaggtcaggtgatcaagaccatcctggccaacatggtgaaaccccgtctctgctaaaaaaaaaaaagaaagaaaaattagctgggcgtggtggtgcgtacctgtagtcccagctacttgggaggccgaggcaggagaattgcttgaaccagggagtctgagattgcagtgggccgagattgtgacactgcactccagcctggcgacagaacgagactccatctgaagaaaaaaaaaaaaaagataactcttggttggtgtgtgggatcttgacaggcaggactgtaaatgaactataaatacctgggagaagccacagctgtggacatccctggaagtcatgctcacggcgatgaagttgtgtcttcttcagcttggccttgtgcccccggaactcctgccagcacatgtggcacctggggcttctaccccagcattgctccttacctaccagcatgtctccttccccaaacccaagtgatcacgggggttcagagaagtgtcccctggcccttcctgctgatatgctgcttcttgtcctgtgtccttctaaatgactccaatgccaagtatagcccattatattccagagatcctaaatggatatttgggcctgagactatccagagggagtatggcacctcctttgcccattattcccaagcaatatctaacccacttttcaagatcttggtcaaaggcactctcctctgtaaacacacggtgcccatcaacaagaattaaataaaataatcttttgttgcaacctctgtgacatcctaaaataacacggattatattcctattataaactttggttgtattaccaccaaaatctgtcctctaagcagatgacttattgagggtaggatcaattgctgtttatatttgttcgtactattcctgcaccatgcctgcttcaccctgtggggacacattaaaagttgaatggttggatgaatggatggatggatggactgatggatggatagttgaattaaaggaaagaagcatatgtgatttgatggataaatagatttttttttttacaaaatatcaacagccattttcttatctaaataaaataatgtaagcagcaccaagaaaccaactttcaatataatagtttctgctgacccatttctgggccagaaatctcccattaggggtaagtcattgaaagcctctaaattatgaagaaggagacaaagagaaaaccaaataactgaactgttataattatagcaaatgttatggtggcaccagttagctagtttcctaggaccctggacaaatctacatataagtggaaacctctaaacagcgatgagaaaaacgggaaaatagcttgcttgtgagggagttctagggctgacagcaggatggatctcagagaagctggggcatcaggaaggcctgctaccctgtgtgccagaagctctaggcattcctgtgaacagatccagggattcagggaattccatccttcccactactttgctcagaaccaggtccctgcactccacactaagaaatggtggctccatttgtaaacaggcctctgatttatttcaacatgtgcacagcttggactttctcaaaagtaaactaaaaccaaatgaattacttaattcacaccatattctggaattaatagtcacttcaagggcatttctgagaatgttctcattcttaagagagagaccacagcatttcctttaggttgcagactggcaggaagagaagcccacaaacacactgactgtcaagttcgatcaggtttccactgtaattaacctggagaacaagtcttacctgaaaaatggtgatcactgagggcaggtgctaagtaccacttctgaaagtagcttcttttggctactgggccactaacaaggccctggctgtcagcagacactctctgaggaaggaagtgcttgtagctttagaaagctcagccttgccttaaaatccctcctggatactatcatggttttcattcctgtcttccctccagataagatgaagggatttgaggctgtccaaataaagatatgcactttaaaaagaaaaaaaaaaacatgaaaatggcttctggtaattataaggtttagaccaaggatactagcaagtcatagtgaccatatgctcttcactttcctaaaaatttacgaatttctggcaaagtcagtatttctccattgacaagcttgcctacccacagcctaacacatgcagactacagaattccacagacatggagttactgtcatggtgagcacgaagctaataaatttagtgcccattgctctgtagaagaaaacaaacatatattttaaacacaaactttgagcttaatggctgaaatgtttttgtaccttggaaatgctcctttgctattaaatcaagggtaatcatagttcatttaaatgtaggaaggaaataattgatgttttcacattactgagcatttggttcaaacactggctctgcagtaaacagcatgcagacattttaggagacaggcagccggcaggaggtagacagacggctgcctccaccgcggcgagggccagggagctgtgataacggcttccaggtttgcatcagctgcacttatggtcgatcacaccaggcacccgagatgctggatgaaagtgcttcacaattccccctacttaataattaaaatttcaatcatattctccaataatgatcatgattaaagaatgacaacacgtttctgaaatctgtaagtggcagcagagacaccaggccttctttagctcgataagcagctgcactaagatttatttatgttctgtcaaacccaaaggttttcttaaaggaggctaccctttttctttcaagctaaaggaatctgaatgtacaaagagctgtatttctctttttcttcttataagtattcccataacagctaggatattctatttttctttccagagttttgagcagcccaagtaaatcagaaggcggtcattgtctgcatgacagttcagcttgtgtcccataaaagcccacaacccttgaaacaccaaatcaccttttctgcaggtcttttgattattggcgtccttttcccaaaaaactacaaaggaaagacaaaagaaggccactatttctttaacttacatgtgcggtcatctacaaaatgttggacttcttatcacacatgttttcatattaagagtgtggtaacacacacacaggaagttggtggttcccattctccctattttcagaaccagtctcttctctagagacacgtttgtacctaacagtagattttcatattccttgattttgctttctgaccttcttggagttttcagtaatgtatcttcagccctcagatcacagagcattcattaattcattcatgcatccattcatcctcccatccatctatccacacattcagcagtcatgtcttatcattgttctaggcactgtacataaatataaacatgaattttgagttatttatatgacatccatgtatcctttcagaatacagttgtatcattgtagggcaattagaagaggtaatttctattaaagtagtagcttttttatttgatgttttcagtagaaattactagagttctctattcagtagggatgcattcagagttagtgtcaatatattgtgtaagtggaggaatcttgaatagttggatcctgcattggcccagctgcccatcctccttgcaaagtgcttaacagagacacatgtgtaggaaaagtaatggaatgcattattattagccttggctttattacaaaatctcatgggtttaactttggtaaaactgggtgtaccgagtggagaactcctggactccaaagaaccaagcggtctggaagagagccttgcgtagcgaagacgctcagtggatatttgttaaaggaggaagttggactattcagccttgctctcacaccgcccttccacgcccaaacccaggtcctgaactcagctctctggtaggaccacagtggaggcaaaggctctgagagggcaagtgtttggcttcaaagtccaagtaccactccaggcctcttccagctgccacactacctctgtttgcctaggagaaaaggttccctgagcaatgagaccatctcttctcctgaggaagccctgagctctctgggcatgtgggtggaagaggaagaggaagggtcatgtgcatgtaccccagaccctttcaccctctgaccacccatacaaagcagacccaggtcagcattcgcaaacccaaagagcagctttcttttggtacagttcagtgccctgtccttgatcctctttattcttgggcaggattcaagctggtgatgtgggagattattagtcagggttctctagagggacagaactaattggatagatgaatatatgaaggggcatttattaaggagaattgactcacacgatcacaaggagaagtcccacaatagactgtctgcaagctgaggagcaaggaagccggtctgactcccaaaacctcaaaagtagggaagccgacagtgcagccttcagtctgtggccaaaggcctgagagcccctggcaaaccactggtgtaggtccaagagtccaaaagctgaagaacttggagtctgatgttccagggcaggaagctttcaatgcgagagaaatttgaaagccggaagactcagccagtctaggccttccacacccttctgcctgcttttatcttagctgcactggcagccgattcaatttcgcccatcctgactgagggtgggtctgcctctcccagtcccactgactcaaatgttaatctcctttggcaacaccctcacagacacacccaggaacaatactttgcgtccttcaatccaatcaagttgacactcaatattaaccatcacaacacaggagccctttgcttcccctagaggccaacgttctccttaggaaaacattttttcatagtgattttgaactggaagaaactataaacacacatggccagccttgaaattcttttcaatatttgtttctctataatatgttgatatgagttaaagtatgtgtatatgtatttatttgtatgcacctaatttttttttttttttttttgagacggagtcttgctgtgtcgccaggctggagtgcagtggcgcgatctcagctcaccacaacctccgcctcccgggttcgagagattcccttgcctcagcctcccaagtagctgggattacagacatgtgccaccatacctggctaattttttgtatttagtagagatggggtttcaccatgttggccaagatggtctcggtctcctgaccttgtgatctgcccgcgtcagcctcccaaagtgctgggattacaggcgtgagcccctgcacctggcctgcacctaatatttctgtaacttcatggcaccagggaccggatgtgatttcctccactagaatagcctacactgataggcctctataaaaaaaggaatgattaggatgctttcatttgaaatttttctactcactgggtagcatttagtaggctgatgtaaatagcaagtcattcatgcagcaaatatttctgcagtgttttctgcatgctggccattgtgctgggtgtttagaacacagcgtgtcaggccgggcgtggtggctcacatctgtaatcccagcactttaggaggccgaggcaggtggatcacaaggtcaggagttcaagaccagcctggccaagattgtgaaactccgtctctactaaaaatacaaaaattagtcgggcatggtggcaggcgcctgtaattccagctactcaggaggctgaggcaggagcattgcttgaacccggggggcagaggttgcagtgagccgagatcataccactgcactccagcctgggcgacagagtgagactccatctcaaaaaaaaaaaaaacacgtgtcaaattaaaccaaactgacagtccatcgtctcaagaagtctatgttctaataggagagacaggatatgacaaatctagatgtaatataatgtctagagaaaccagtgttatgaagaaaaatatagctggggaagaaaagacagagaaactgagacaactgggggagtggaaggatgactttagacaggctagatggttttactggagaggtgatgtctcagcagtgacctagatgaagttatggaccagagaaagtcactcaggaatccaagttaagtgcaattggcctccagaaagtagtcaacctaatgggacttcagtagccctaatggtgggctggatttctcacactggctttggtgcttttcaacccacatattctaaatttcagtataactacaatgctggcgcaaagttcccccaaaataaacttgggcttgctccaagaactaacagtttcaaaaccccagatattaagaaacttccatgactatcattatcattgagttagagagcacaccaaaagcatagaccaagcttagaacctggaacctggactcaagaccacgaatgaactgctgttcctcctgcctggttaaggaaggaattggaaaggattcctcaagcagtcaagggtttcccaaagccaccctaaccccagccagtgccttcttcaagaacttcagagtatggagaattacccaaggatctaataacgtgagcctgaggtctttctttcacaggacctaggataacatggaaagtgagctcaaaagacacaggctatgtgccgtcagtgctaatgccaccccgacctatagaacccatgctgccgttctgtgacccaaggggacatcgccaaaatgctgctggcaaccctagcgagttgtgtacattgttacttttaggtttccttccatctcagaaagaaagaaataaaaagaaaccatgtgtggtctgtgcttgcttgacaaattagtctctcaatgtatttactgacatcagaatttgcattgcagacaccaagaaaacacttctgttatatattgtagtaaagaatagtaatgctcttttagttcctcatctcaytaaataaaaaataagatactaatctttccctctgaagaattcaactaccaactggtacattactgatttttctatgtgaataatgtgtatagtaacaactagtattcccagaaagggtaatcataaagttaactttttttgaatttggggagaggggaaggggaggggaggggaggggaggaggaaaggaaggaagggaggaaggaagggagggagggagggagggagggatggaccgaccgttgtgcattagttggagttctctttatttcaaagaattgacttacatagccatggaggcccccaagtctgaatcctacagggcgggccagaaggttgggaacggagcaggagctgatgttgtaatcttgaaacagaatttcttcctctgagaaacctgttaaggcctttcaactaaatggatgaggcccgttaagattatcaagggcaatcccactgattgtagattttaaccccatctacaacataccttcaccacaacacccagagtaatgtttggttaaaaaaccrggtactagagacaagccaaggtgatagaaaacacacgttgtttatctacacaggcaagagtctgagaagtatctgaaggatttaataacacatgcacacacacacattgtgggagtttctatagcatgatgattaagagtacgaaatgagtgacagagccacgacgttaagcccaggcagtctgactccccgccctcctaactgctactcagtactgttcactggttcaaggctcaggccctcattggctataaaggattgaatattccattttttaaaaactttcatcaaatagattgtgggaatgaatggccttagaatttgcaactatcaaaaatggctatgagagatatcaaaaatgcgattgaatacacgaagaatgtgtgtggtcctgtatagactttgacaatacagaattttattaagcctgacgtgaccttgagatggaaatatatttatatcttaagagcacaatagtgcaaaattctgccaagtgacttgaatggaggtattttatatatatataaaatatatatgatattagagagagagagagagagaatttggatttaaagtcaagggctccctgcccctcgcctgtgggttatggaatcatcactatggcaactataaatagggctccatggaacccacttggtcaccatgaagaatctagtcagcaccccagctaaacgttttgattataacgcaactacaagcaaattgagaggacaatcccaaaaataatacaggaacatcacctaaaatagttgtgtgggatggtgcaatagtttccttagtagctaatcatctttcaccctaaaagatttagaattaagtagagaaatgttttaaagaattaaaaaacacagaaccaatattttgtattaaggaatttatacatacttgaacttctaaaggaatgtggttaattagtgaaacagctcagccttgtgacttagcttgaaacacaattgagtaattgactgaggctagggatattaaattgaactctgacaaagtttgtaaacagtatcaaagcctttcagagaacttaaggcgcactatatctattgctttgatttatttataagttatttaagtcctcaggaaaaacaaaactattttttaaatcagactttggaagtacttaagagtgtgttaaggccgggcgcagtggctcatgcctgtaatctcagcattttgggaggccgaggtgggatcacttgagatcaggacttcgacaccagcctagccaatacggtgaaagaccatctctactaaaaatacaaaaattagctgggtgtggtggtgcgcctgtaatcccagctactcaggaggctgaggaaggagaatcgcttgaacccgggagggggagggtgcagtgagccaagatcatgccactgcactccagtctgggcaacagagtgagactccatcccaaaaaaagaaaagaaaagaaaagaaaaaagtaaaagaaaagaaaagaaaaaagaaaaaaaagaatgtcttaaatttataaatgtagtttacaacgtttaaaggtgacaccatttttctacaaaattaagggacctattttgagggttccatggactggccaggaaatctgccaagaccaaagcagtcccctaattctctaagtttcactcatgggccacctgctgtcactgttggcagctgcctgtccacccaagcttgcaaatgacgcatcctggatggcctttctaatatttatccgcattgtacaaaaccactgttgactgccactttctcttggaatcatcttgctcatattcttgagacaggttactctggccattcaaggatgggtggtgcctcagctttgggactgggtaggtccctctgggagcagaggctgtgggcagcaggttccctcrggtgggccgtgggcaggtggtatcctgaggctgcgttgcctcctgttgatggagtctgttgatggaagtgtagtgacaggcacaaggaaggcttctcagtactctgcctatgctaatcaggccacatcctaactttatattcaatgcttggtcccaaaatcaagagggagctgacagaagacaatgttcagacctctccagagaggtcttctcgtggaagtcattgaagaaactggaggtgttttatctggaaatgagatgacggtaggataaaagagacccctgtttttaatagttcatttgttgcaatgggagattggccttgggaggtgttcaagatgattttctgcggtgctgggacctaagagaaataacatggaaacacgtcatgcagaagttagccccttgccagttctctttccatcggttctgttctagtcctcaaggcttctctattacctgcttacctgcctctttaaaaacaagaatgcaggccctgggctcttccacaggcaaaagtgtttgactttcatatcattcatattgttgattttttgcagttgtcttctatgtgtggcaagtaacacaattcagtgttttctatttacattaatggtatgatatttattttggaataattttaattaaattaagaaaacaagccgggcryrgtggctcacgcctgtaatcccagcactttgggaggccagggtgggcagatcacgaggtcaggaggtcgagaccatcctggctaacacagtgaaaccctgtctctactaaaaatacaaaaattagctgggtgtggtggcgggcacctgtagtcccagctgctcgggaggctgaggcaggagaatcacttgaacctgggaggcagaggttgcagtgagctgagatcacaccactgcactccagcctgggtgacagagcgagactccgtctcaaaaaaaaaagaaagaaaaagaaaacattaagtaaatcatggtatgagtggtttatagatatgctgaaacttatggagaagtcaagaaaacaattgggcattggaaacaccagtgcagattgttatgtattgcaaagtagggtaaatggtatcacttgcatgtggcatgtcagaggcagccggcagggcagaagttctcacaatagatggagcttcgcaacatgggatgtgttcttacctgtgagcttctggttgagtcagggaggcgtaggaagacatcatttttcaagaatgctgcagcaggggtcctgcatgcctctggatggtccctaaggctcagcgtctttgccagtggcaatcagggcaagtcctcctttggccatacaccttccccctcttcactcctctctctgatcttaggagagactcgaaaaggtataaaggaacaccaagaggccttcttaagctcaaggaatcaacagtttgtttattttcakttccccatgtattttgaggctggaggataatgcaggcagccagactacctgtaccttacctcttgggagccaaagctatgaggcagctgtagggagaatgagtaatggatcagcaaagaggcaggcaccgttggctctggaacagctaaagtctcgtgggtgggtgtgggggtcatggcagtgcattgaaatggagaaaccaaagatgttccattcccaatgcttctgttttcctgcactttcccattgcttccctacacctgtctgtgtagaacaataaccatgaatgtcattataaactagaaagtatggctggttacggaagtctagtcagtgcctcactgtcgctgactcagtccaacacccaccatctctggtgggacaagtctscactttggttctgatttcctctttgaggtctagatgccagttttcagcaactaccaaacagtttttcttggctgagcctcttcaacacgtgcacttatgggtcagcttattttattgttgctttgacttaagatttccatggaatatgaacatgaaaagagagtctttttgtcaaacactgggagacatttcacatattacggccctgagtacgttcagagttaccttctttgaataaaatcgcctttccctggggcccacgatgagcagtgggagagtacatacggatagatgagaaaagatttttctctatgtcaatcttgaaaccttctttgagtttatgtttctttgtttgtttttctccctagttacttgtgttttaagttgttgaaggcaagtgatctggttggacagttattttgcttagaggacatgctaaatcgtgggacaaaatccaatatcagattttgaaaccggggcattactattttatattggcagaattgactgagcatacaaattataaattgcaagcataaaccaagaaattgtaataataatacacacagcttcttttctatcaggttggtccagatcaataaccacaaaccatttatcccagacaatgttcttacccgagccctgatggtctcattcataacacctgtaagtaagccatccaccttttgwccccttatcactttattctgagcagtcaccatctcagatgcaccacctttttaatgtgaccttggggagaacacactgggcttcctgtgttgccagagtcccaaagtcatcctctaccttgaacgcttttattttaaaataatagtgccactcatttgggaaggttaacttggactccagcttataaggattgtccagcaaagaaacgaaagggtagaggaacagctaatgctcctgtggctcatggcttcccagatctgcagggagtgcctttccagccagagatgtctagcctcttgcccccacaaattaggaggaagcagataaaagccttgcacgtaatgtgtagcaaaaatgcaaatatttggatggaaaagatatacgggaacgtcagcatagatgctacctcgggggacagagaaagagaaagaagagaagaaagacggaagaaactgggataagagaatcgcaagatctttatgtctgtaacctttgctttttacaaatttgaagcaaaaatgccccccgaaatcagcattaaatctaagatgtggatatgtgagtcctgattacattagtctttgtattttctgtgttttggaacaatttcattacatatgtgtatgtacacatacgtgtatatgcatgtgtatatgtccatctaaaataatcaaaatgcttaggatccagttaagtaattcattcaagggctgcrtgrgagtggccattcagagatacgcagacaccaaagaatgatgaatttctgatattccaagaatccagtgaaatattacggtgtggggaaaagtgaagatcttttatggaggcaaaagggaggcgctgaacagaatcacggtgttttccatacaacggctaacacacagatgtaagatttgattggctactgttgacttcactctaagggggttgcttagcattttattataaagagataacaatgaccaaggtccctacctcccacatcattcagtctggtttgaatgaaggctataagtctggttaaggtctaagatctcaacacaaaaatcaggaagcagtggtcacgcaccagagagaaaaaacagcctgctctcacaactccatttccagggcttaactttcctctaggcctgtgaaatttggaaggtcctgaaattttcttttgtttttacatatatgtatgtatgtgtttaaaagaaaaaggaggccagccacggtggctcatacctgtaatcccagcacattgggaggccgaggcgggctgatcatgaggtcaggagatcgagaccatcctagcttacacggtgaaaygctgtgtctactaaaaatacaaaaaattagccaggcatggtggtgcatgcctgtagtcccagctactcgggaggctgaggcaggagcatcgcttgaacccgggaggcggaggttgcagtgagctgagatcactycactgcactccagcctgggcgacagagagagactccatctcaaggaaaggaaggaaagaaaggatggcagaggaatatgggagattattctccaacttgtcttctttacagggggccttttctaaacttaaaccaatacacagaagaaaagttatttataactaaatcaaaatgtaaattcatttctaatgagttcagttctgaaaaggtttggggaattctgctgttaggagtttcgaagtgaattttagggtttagccgcgggaaaccctagattgagcatgtcagagagaaccgaagaatttagacacgcaggaaaagctggtcaatgaacagcagcccattctctgagtgaaaaagcagctttcggttaacttcacagggggacttaactgtcctagtagcaggaaagatgttgctatagtaacgctcagtgtggggtgagaaggaaaatgggattaaaaaaggatattttccttgtattgacttctttccttaaagatcattaagaagtcacctacccatagctaacagaaaagaaatcctatttagccttaagggggaaaaaaagcccactttttcacctgggaaggataggagctgctcccatgtcctggggtacagagtagcttttaactgaatgtagggatatttggttgagggagtggctgttgtccttttctatgtatacagcagaaaaatgggttgatggatggaattaaatggcaatttaaagaaatccaaagagctgtctgttctgcagttgccacctcccacgtgaacctccctcattcctggctccatattcctagtgtgggaggatggttataaattagatgaggatgaattgtttcgtttgtgcagagctttaatttgatagaaaggggaggtctaataaatcatgggtagaaaagaggctgcatttagtttcaatcttaaagtacagttcaggttaacaaggttaaaaatagattgctccaggaacaggtatgaattcctccatgacgctcagccatcacaaacatcctactccttttatgcttctacacaaagtcagatctggctcagacgccaggcttcagggcaccagagtctgcatctggtagcggggagggcctttcccctccyacagctgcataggtcccaagccaggcccctttgggtckcagtgtctgctggcatctcccagttcctctaagtcacacttggacctcgaaacctccccaaaggcctacaagcatggtgctccctgctcagccccaggcagcctccaagcctcccttcccaaagggagaaatcagagaaatcccttctccaatttttttgttttgttctgagataagatctctctctgttgccaaggctggagtgcagtgatacaatcctagcttactgtggcctcgacctccccaggctcagatgatcctcccaccaccccaccaccaccccatgctccagatacctgggaccataggcatgtgccaccacacccagctaagttttatattttttatagagacagggtttcaccatgttgcccaggctggtctcaaactcctgggctcaaacagtttgcctctcctctttgtttatgctgctgccctctctgctctggtccctatccccgccactccatctccccacaggaggctttccagaactaaggcctctgaactctccgggcaaaggaaaccaccaccctgcaaggctgtcgatagggargggaagggaagggaagggaagggaagggaaaccccttgtattctttgctggcggccaatagcaggaaagtgggcccagctcatcactctgtgcagtcacctggccccgcacgtgaagggagaccatgcactctgccctgtgacacgcagacctggtgcggggcagctggcctctatcatgctgcaccgatcccattcagctgcagcacgggtggatgatacaggtggcctctttctcctgctgccctgtcagacgctgggatggcagccagctgacacttcgatgccttgaagtccaggaaaagagtcacagtcatcttccttcaagcttggagaaaggacagtcttcccttattccactcagaggtgtccatgtgtaggagaaaggggagggtgggcctcagctctcagctcctctgatcaatctacgctgcttgactcggtggccaggggcaccactgagcccctcatgagcccccagcaactgcattccagcccaagtggccctcctcccctgggtcagtgccgagcaccagcaggtcacatgcggtctatgttttacrgtcctgtctttgtggtcaggcagcctctaagtggccgtcagaaagttgagccccctctccccgttcctgtctgactgctgtacactcgtgcagggggagctgtgtcagcgccgcggctttggagaggctgagcacgtcaagttcaagaattatgggttttaggcagatgtgccagccctggcatctggtccctgaagcccagtctactcttggaatccagagtaaaatgtaggcaggggttggttacctagagattaaaaaaacaaaaaaagatattgtgccaaatgccctttttagaaaagaccatgctaaggataaatgaaaatgaagactggagaggtactggctttttttaaaaataaataactattacataccttagcaaaacaggaataaatctattaaactgataacaaatacctctggccaaaaccacgggaaggcttttttcaaagcatttgaaatgcaaaataaacgacatgtaaagattctgtccrtacagcatgtcaagagtgccgtttcattcatcaaggggaacaaatgtttccaccgccacgcggtagcgmtcgtgcaaagctcgctgttactcaggagccctcgctacccgcagacaggctgagcacagtgaattagcctctcaggaggaactcagcttttcagagcacarcctcaccacgtcaattaatatttgctgactgaatgcctgctctgcgtctcccactaaccaggggctgcagggacttcttggagcatggcaagcaccccaagcgctagtttagtctaaatggaaaaagcatgcatggaaatggaaatgccggagtaaattcatgagatctaatgaccttgaggacttcacacagacatacacattcctggaggaaggtggtggggatgctttggctaaacccattacagagcacattctgttcatcagagaatgtgtctttaaggaagagaatctcaatcgtttgctaaataggaaagacaagttgacagatgattgggagcctcttccaggcaagaggatttccttaggaagctcactcagccaggcccatcccatkaagctgccctgggatgggtcctggagaagtggtatctgcagctcccacccgctgggcctggcctggccgattcccagtcccccagtccaggagccagaagctccagagctcaccggccccacccagcctcccacacttttgctctttgtctgcctaaggcctaagcctggcgcctcctagttagttcgtgcacactgaatcgaatttcatgtaaattaaatgctaacaggctgctgatgccagcatctctacctttgtcatttaaagtcacaggctccttaatgactgcaattaggcagctccgttattacttgagctagagacgtttagagaggcatctgtgatggcaaaatgctcagcgtgctccactctttccattaaccccttggctctgcctaccggggcatcagtttaggcaggagtaatattagcagctgaagcacacttgtttctaccaaaggtaaaactgactgaactaatgactgcggaggatttctttctctttttttctttttttttaaatggttatgaccatttaaaaaaactgattgttcttataaattgcagtatgtactgtccactctgggttatctatttaccattaataatttatatggtgtgatttgtaaaactactgtcaggcttctttccttacaatgttacaaagtctgtgcgacaatgaacttatcttccagcgggcattgcgtgagtacctctcaggctcccacaccctgtggcgcttcgtggtaccatcaaactcctgcgcttgatttaggcaatgcacgccagttcccccgccccatgcagggcatgtggtaagtcacagtgacatagtataagaccacgcgtgttggaggaacttcactccctgattttttttttttttttttgagacggagtcttgctctgtcacccaggctggagtgcagtggtataatcttggctcactgcaacctctgcctcccaggttcaagcaattctcctgcctcagcctcccaagtagctgggattacaggcatgcaccaccaccacacccagctaattttgtatttttagtagagatggggtttttccatgttggtcaggctggcctcgaactcccgacctcaggtgatccaccygccttggcctcccaaagtgctggtattacaagcatgagccaccgcgcccggcctcgctccctgattctaatccctactcattttcttcacctcgagcaggtcagttaacctctcagagccccgatttcctcatctgtgcactggggagaatggcttgcctgaggagcagcgtggacacattggcagtaagtgagagggtttatgttaaactgctgacagatagtgatataaatgttatgtttagttgttacgatgtccaaaatgaaagggaagagaacctctcttttgcttcctggcagaggctctcggtaagctgttcgtctccacggctgcattctagyaacttcgttgaaaagcattcatgggtgttggtgtgtaagcggggccccgaaggaacagctaaattccaagccaccttcagctgggagtccagcccgtccagtccaagacagcgaaggccacccttggtccaggtcgccaccttagatacaagcagtgctgcccttccgcttggtggtgcggaacggcacgctattcagtgccttcttgtactcgcccactaaggagaaggtcatgtgaattatccaaaagatgaagcccgagattttaaaatcatactgagtaatggttctgaataaaagccatttgttatgatcactaaagtaaacctgtttgtggacagtaagaatagtgtcttaaatctagccttcaagattaaggactttaaactcatttcatggtgtattttttgtgctaatcattttatgtttttacttatcgtaggaggtggaaagccccttcaatggctctgtactgacttttgaagtggagaaataattctccttcaatttcagagaaattgaagtttacttaaagatgattaaaaatctttctgacagactttgagaaggtctctcttctgactgctgtaattttaaataattcagagccagcttggcacatgtatgtttattaaagtagggatgaaaataaaactcactcgtgtggctgcattagcccactgaacagtatttcrtcttacatcgtctctataacttctgaagtgaaaaccagaaactcattggcgatgtcctccctgcttgctgggctgattggcatgaggcagggccagctttatccacttcctgaagaccattcctccatggtagcccctttgccagccgccagacgctcttctcagagactcagaacagcaggccagggatggagggagggaagatgccggatggccgaggagcccccaggcaggtggcagctgcagccttggcccttcctgggaccctgaggcccctgggatgccttggcagcagaacctgtatcagcaggagcagctctgggaactgcggggaagaactggagctctcaggaccccagatcctcagatcctttttttttttttttttttttttttaagagacagagtcttgctctgttgcccaggctggagtgcagtggcatgatctcagctcactgcaacctccacctcccaggttcaagtgattctcctgccttggcctcccgagtagctgggatcacaggcacgtgccaccacgcccagcaaatttttgtatttttagtagatacggggtttcaccacgttggccaggctggtttcaaactcctgacctcaagtgatccgcccgccttggcctcccaaagtgctgggattgtaggcatgaaccaccgcacctggacaggaccccagactctttctgtagctcacaaatcaacaaaattagtaagtatgtgaactgtgatgcagagcttccaaccacatcccaaactgccatggactgcgcttctcttcacgctcgagcagtgatggctgagcaccatgcttctccgcagagctgagctgctctttcttgctcctcaccaggttctctcctgctcctcctgcggtggccacagctttggctgtgctgtgttttgtgccgcagataggccctttctgactttatttgactaaccccccagaacccctgatggtgtttagctggccaaaattcaaaaatccctctgagatgcttgtagttcagaacatttttgttaggaaaatcctctctctctttaccaatgagattttgcaagaacaatcccatctttctctttgtctttcagctgacattttagtcttaaattttctagggacaccttcagttcagcctcttatcacattagactcttatttgtattctggagagatgctggtctttaatattctcgaagacaaataaagaaccctcagaaaacccagggccattctactttctaccttcagtcctgaatgatgtcagggagctctcaggaccttcaggtggcattggaaatatctcttgggtttggaaagggcaatttagatccaagcaatctcagaatgcatttgtgatagatatgttatgaatttttactgcctcacctcttcacttcctccctgtctgcgaggtagaactaggattttcttatccatttccagcaactcccagacccctggtgagggaaccctctgtgtctgccgaccatgtctttgcagaacaattcaatctatcccgagaggcagcctcccagaggcagcaatggggaaatgccaggcttctcaacctccgtgtcagcattcttgatatttggggtgggataatcctttgtcagggggactgttctttgcattgtaggatgtttagcagagtctctggcctctgtctgctagacaccagtggcactctgtagtgtgacagtgaaaaatgtctccagacattgtcaactgagaacttctgacataatgggaagggtaaaaacttagggccaggccaggcgcagtgtctcacacctgtaatcccagcactttgggaggccgagacgggcggatcacgaggtcaggagatggagagcatcctggctaacacggtgaaaccccgtctctactaaaaataccaaaaaaaattagccgggcgtggtggtgggcgcctgtagtcccagctactcaggaggctgaggcaggagagtagcatgaacccgggaggtggagcttgcagtgagccgagatcgcgccactgcactccagcctgggcggcagagtgagactccgtcaaaaaaaaaaaacaaaaaacaaaacaaaacaaaaaacaaaaaaacctaggcccaaaatactgatgctcgaatctcagctctactgggacgaccttgaccaagtctatctgagctcatagtacctgccccacgagattgcttgcataattaaactcaatgatgtggtagctttcagtacatgtttattgaagccaaatctcttatcatctgttttcttaattaatggcaagaattacgttcagatgcgcagtaagcaataaaaaaaaatctagcttccttgtttcaccaaaggtacacttctagctctttggcacaaaccggtttagttcagtgtagatrgaatcgctcggagatctggcttcatcacgggagagaggacatttcacttctggtggtatctctcttgtacccgttgagagctgctcccacgcagttaatggcgcccagataattacagacggagctgccttcgggttgtaaacagagctttgggtgattgcacactgccatttatccggcctatttgcattcgtacttatttgcatttctacatctcccacagctgacacttgttttttcattttgtgattccaaagcacttttctgattaccctgtgcctgctaggagtgctccccatcaggcgagggatgcagcctccttcccggctctgccctcttgatttcctccatgtttttggagggaggccagttgttgggagaccgcatctgccgtgagcccgggactaatgagtcattgttcttctgagaagcccgttggcgtcagcttcctttcagctgcggcatcgcaggaccttgtctgccttttcctccgggttacacctgggacctgctgcattatgttactatgacaagggtcaccttactttctcttttcgaaagtgagattgactttccttctgtttctgaaagaaatgcgacttaaaatttgagtctgtagcaatcagcttgagatagcctactctgaaactgctraaagaacagtttccatttaagaatttagctgcagtgctgagaacatacaacccctacctttttaagcctctcatgtgcttatatttcttaaacaaaatggctatgtctattccttgctttcagtaaraggcatactcgtcagtttaataaaatgtatgttaattttcctaagccaatttacaagcagcattggtcaaatagctacatgcgggatgatcacccgaatatcwaataatgatagagcacttaacggtttactaattccttaacaacatscatcatctatttttcgattttcttctctctctcggtttccacatgacccatgcattgaaagatttagatttcctatttygccgaattgtactgttttcccttcccytctgagtgaaagtaagaaaacctatgagtttaaagtatgtcttctgccctacatgctgtatgtaaaatttaacagaattcagccgggcgcagtggctgatgcctgtaatcccagcaccttgggaggctaaggtgggcggattacgaggtcaagagatagagaccatcttggccaacatggtgaaaccccatctctactaaaaatacaaaaaatagctgggcgtggtggtgtgtgcctgtagttctagctcctcaggaggctgaggcrggakaatcacttgaacccaggaggcggaggttgcagtgagtcgagatcacgccattgcaatccagcctggagacagagcaagactctgtctcaaaaaaaaaaaaaaaaaaaaattaacagaattctccctgtaagtgaatttgtaagaaaacaagaacattgactattccatttaataacaaaacttctgggacagaccagctccctcagtggattagttaaatgatgtgcagattatattaacccatggaatatagcatcacggacccacataccatcatcctgacttagtacgactcacaccagctctgtatttaaacggatgaggatagatgtgggctcatataattactgtgtcaattacaagggaagaataaacaaatgtttaccaatcaagtagtcaccagcaacctgcctttggtagatatactagtgttcctatttggggaaaggtattatttattttaatagttgcataatggtcactttcaaaatatgcctttgactacgttatgcttattttctgcatgtcacagactagccctgcttaggtgagcttagtagatacactaatgttactactttgagaaaggcattatttaatattcctttcaggaacacattaatatacgatgtcagaattatgatgcttggtttttatacacagcctgtcccagctcaggtgaggtcacatcccttggccatacctgtgtaaaaagccaaagggggccccttttccagacagcaaccagcctagcccaggctcccctgccttgtggcatccacgccaccagtcactgccaaagcgcatacaggagtccccgcttatccatggtttcgattcctgcagtctctggtactcacagtcaaccgaggcccgaagatattaaatggaaaataccagctcaacacttcctaagttttaaattgctcactgttctgagttgtgcgatgaaatctcacaccctcccacctggatgtggatcctccctttgtctggcatctccacgctgtagacaccacgcgcccagaagtcacttagtagccatctgggatagcagagctatagatcacaagaagaaggatgagcgcaggacaatgagatatttagagagagcgggagtccacattcacgtagcttgtgtcgtggtcctcgcaccattatacctgctctgctgtagcactgttgtgaatgtcttactttgcttaatttataagttaagcttcgtaataggcatgtatgtgtaggaaaaaacagcatatatagggtcggtactacccgtgatttcagcatacactgagggtctgggaacgtatcccccttggataatgggggtgactgtgatggtaacagaagcatcctagttgttattttcataggcactgctaccaagcttgtaaacctcttcactgtacccagtagtgagacagagctgcagagggtgaccggtctccctaagtgaataccaggtggaacctaacacatagagagagaggaaaggccaatttcagacactgaaagctactcttacagatacagacatttcaatagccaggagaccctgaggaatggctcttaatccaggtggcctgtgtatagacatgcctgcaagtagccaaccaggataataagagtcatcccccggaagggatgaggtcagagcaggagtttcaatttgacccacgttcccatcatgcctttctctctttctctcccatcctcacttccaaatcacagccattcacccaagcagttcatgaatgcaggaacctaccaggacattacaaatcattaaaaatttaaccctcccagggagcaattacaactccaaaaaggcattatttgcactctccgcccacccccccccaaaaaagtcttgagtttgcagagagtggccaaaaacattctagaacttcatgtctctatgccatgcctcctcttccatcccagcgaatgaaatccacctgatgagggcacacagcaggccctcccatcccgcctcctcctctctgccctcccatcccggcccctgctctctgtccctcccattccactcccctgctctctgccctcacatcttgccccctcttctctgccctcccatcccaccctctgctctctgccctcccatcctgccccctgctctctgccctcccatctcgccccctcctctctgccctcccatcccagcctctgctctctgtctctcccatcctcctcccctgctctctgctctcccattctgcctcttcatctctgccctcccatcccaccccctcctctctgtcctcccatccctccccctcctctctgccctcccatccctccccctcctctctgccctcccatccctccccctcctctctgccctcccatcccacccccctgctctctgtcttcccccactccctcctccccaagtcattgctgggaggagtgggtcggcctcagggcctcccaggcagtccttgaggaaaccacacacttcatgaggaaaggaaatcctggaggagttttcatgtagatacaggttttatttagggaaaaaaaaatccagaaataaatacaactgcctggaaaactaactatattttacattttggaataatttaaatatcattcctggtaaaggaagtgatgcagaaaagtcaagagagctctgaaggcagagagagctggataagcgggtcctgattcatcagtgaccttgagctggcccctgacacctctgaaattccatttctgcaatggtaaaacggggatagcaatgacacctacattattatatttaaaatgarcacattttatttttttaatgcgccaatatttgtaaatattcataaagctcatatgaatatttgtaaagctctctgcacaaagtagaagctcagtgcttctttataaacaacattaacaaaacgacttcacttaccttcacacgatccctttgcattagggattatcgccaaccaggcaggaggcgtcagagcatggcttgataaaaatagagtacaactatgcagggagttttttaggacaatgggaatgtaaccgcttataatgcatgtccaaaaggttccttgtaaaatattatcttgcaaaatgattttagagtgaaatcatctctcttttttctggcaaatctttgaattccacccaatttaccttcattatatccagctgcacaaaagcccatgtgttatttcttcccatgctgtctcaccagayctgtctgttcacattaacctagttaccagtggaacaaaaatgcaattggccaaaggttacatttctttgtcatgagcacaagagagcaagatcatgccgggcaaaggctttcagtaaatttcagccaagaagttgggcttcttcccaggaactctttaaccctcccctctccttcctcccagaaacacacatgctacgttacccttggtgtttttccgcgccaaacttgtggtctttttttgttttatttttaaagatgaatrtattacagaaagraatgatactgaatttccttcagcatgccccccaattttaggaccttgaagattttcatgtttcaaattgcrttaaacttttcaaagagctttctttccctacttcagctataatcctgaagagacaggtgaaagatgctttgtaaatcctcattttacaaatgagaaaattaaggctccaggagatgatatgacttgctcagcgattacacaagtaggaaaataaagaccccattgtgtgttgattctcaaacggtctgcattatagtcttgtgtctacacaagtcagcgcacaccccagccttggagaggatgttgttctgaggaatcggagtccagttcctgaagcttgggcggctctggcttcatgaagacggagtctgggtrcaaagcagaaacttagggaaattccccaacagccggcaggcagatgccaccctccctcaccctgcaccgtagacgttagcctgggataatggcagaggaaaaaagcacacagaaaactaagcagacacagaaataagtaatcattttccctatgatctatggcaatgttgaactcttccaagagcatactggcaaaatctcttgagtaaaatagcaagtgaatagaatgcttactattggaatggtatggagtggtggtcttcaaactgttttcctaataatatattccccacatacaaaattttgaaaacaatgtacctcctcacaagtgtttaagtccatcataaaattttaccyaggcttaagtagtagcaaaaagtgaaactcctggagtgttataaaaactgacaattttttttttaatggagtttcgctcttgtcacccaggctggaatgcaatggcgtgatctcaactcactgcaacctctgcctcccgggttcagataattctcctctctcagcctcccgagtagctgggattacagacgtgtgccaccacgcctggctaatttttgtatttttagcagagatggggtttcatcatgttggccaggcgggtcttgaactcctgacctcaggtgatctgcttgcctcggcctcccaaagtgctgggattacaggtgacagccacagtgctcagcctaatactgacaaatattttataaaagaagagagacagcaatcttttaaatgacagaaatagaatctgtacaccagagggtccacatcattcattttgtaaacacatgaatgggctcttctttatcaaagggagtttatatcgggcctcatactcctagtagtccatttcacttctcttattctctaacatgtgtttatatttgaaaatattttattggtcatccagtayatatttctgtaatgaaaatatgtacaaagcctttaatttttaatttctagaattaaaaacgaggttctgaggttaacattttttcctacttgagttattaaaattaattattagtagtaaacagttaatccaaacaacaaaaatacattataagttttgttgactacttgttaaacaaaaagtgaaatggtaatgggaacatccaacttactgagatgccgcggacgcatactgcttacagctggaatcagacagccctcaatatgaatttcttccatttttcattttaattaatgtaagcactaaataactttgttcatataaataggtasattgcaatggaagaagtcttttagcagtatcattctattttttaaaagtcatttgcagttatatgccaaaatcacatgatagtctatcatcaaaacatatttttatttttcaaaatcttcaggaacaaagaattagaagcaaaagtattttttgccctttgccatgaaattattggcacgctgatttaccttttcagttttttagaagtatgccataaaggttttatgaggatcttacgaataactattaattgtaccttttattttgtgcatttagaaacccttcatttaatacattcagaaagagttgaaaaaatattaaatattgttattttcaatacgcctttgccagtaaagcatctcttgataaaatatttttgtcatgtgctttaaatatattcttacccaaatggaagttgctgagtcatttaatttatagaaaaggtaaaatatttaacaaactcagtcttcacaccaatagctaaaatcagaggctaggtgcagtggctcatgtctgtaatcccagcactttgggaggccgaggtgggcagattgctggaggtcaggagttagagaccagcctggccaacatggtgaaaccccatctctactaaaaatacaaaaaaaaaaaaaaaaaaaaattagctgggcatggtgatggcgggcgcctgtaatcccagctacttgggaggctgaggcaggagaatcgcttgaacccgggaggcagaggttgcagtgagccaagatggcgccattaaactccagcctggatgacaagagtgagacttcgtctcaaaaaaaaaaaaaaaaaaaaaaaatcagaggaagtgaatattgttaatgtaaaaatatgctaacatgtgttccaaggaatattgttgggggtcactaaaaagtagatatctatcttgcaagatgagttatgaaaaacagtcaggatcagaatgacatagaatattcatttaaccatttcacaaagtttaacaaactaaaataaatctatctgttcttgtacttgatttgtaataaaggaatattatgtgttgctgaaattacagttatttatgaagcaaggatagcctggagtcctttggtgggtacacatgtgtgcatgcattaaaatgcaccccagtgtttggcatctgtgaataattaagtaagagtcatgtaataaagagaaataactttattcatgatcaaacattgtcaagaaagtgaaaagcttaaacgtagatatrgctatagatagaaaatattattgccggatgcagtggctcacgcctgtaatcccatcactttgggaggctaaggcgggtgtggattgcctgaggtcaggagtttgagaccagcctggccaatatggtgaaaccctgtctctactaaaaatacaaaaattagcggggtgtggtggcaggcgcctgtaatcccagctactcgggaggctgagccaggagaatctcttgaacccgggaggcggaggttgcagtgagccaagatcgcrccattgcactccagcctgggcaatggagcaagactccatctcaaaaaaaaagaaaaagaaaaagaaaagaaaagaaagaaagaaagaaaagaaaatattctgactcagcagctagcaaacaattttaatttgttgttaataagaggtggaaaatattaaacactttataatataaaatatgagtattgattgcactgggaataaaaattttatgatatgatttaataaaacaggttttaactaccttgttaaataatgtgtaccacatctaaaaggaaccacataaaatgtttatctgctgatttgatctagtattaaatttaaaaatttcgtagttcctaaaaacatttgttatgtttgaaagactatttaatttatagaaaaagccatttcttcagtggctcaaggtttatttctttccagttaatgatatactctacaaataagcattgagattagctaatcataattgctcacattaaatacatgggaaaacgtagattttagcagtcaatatttcttttttttttttttgagacagagtctcgctctgttgcccaggctgaagtgcagtggagtgatctcgactcgtttcaacctccgccccccaggttcaagcaattctcctgtctcaacctcctgagtagctgggcttacaggcatgcaccactgtgccgtgctaattttttttgtagttttagtagagacagggtttcaccacgttggccaggctggtctcgaacttctgacctcaggtgatccgcctgccttgacctcccaaagtgctgggattacaggcatgagccaccgcacctggccagcattcagtatttcttttttttttttttttttttttgagacggagtctggctgtgttgcccaggctggagtgcagtggcgcaatcttggctcactgcaagctccgcctcccaggttcacrccattctcctgcctcagcctcccgagtagctgggactacaggcgcccgccactatgccrggctaattttttgtatttttagtagagacagggtttcactgtgttagccaggatggtcttgatctcctgacctcgtgatccacccgcctcggccccccaaagtgctkggattacaggcgtgagccaccacgcccggcccattcagtatttcttatccattctctctgtgtttgctctcaccacatttttccccaagagcagtgcatttactgacaatcccaagagagaacaggttaagcaattaaacagaagttggtgaaaattgctatcattctgctgtggtttcactgttctctccaaaactcatgttgaacttcaattgtcagtgtaatagtgttaagaggtgggacctttaggcartgattargtcctaaggactctaccctcatggatggattaatgccctgtgtttcataacatagttacaataataatcgtacagtgaacagccttggaagatagagatactgtctctttccgcagcagaggggaagtttgcttataacaaagacaatgtctccctctgttgacaatggcagkcctgctcacggcccattataaaagactcagattccctaaagtcagggtcctcacacctgtaatgcaacccatgccatgtgcagctgccatctggtccatttcaaaccaccctgtgagaactgggatttgagaaaccagcacaggaaaaaagatattgctgtaaataatgcatggtcctttgtctctgacccaggaacctctggtcttctcctggcctccgtaaaactgagcagactaacttgttagcttgcaaagaaagcaaaatcttggatccttcacagttcctgacaagaattaaaatgaagtcttctcttggtagctacctggagccatgaatatttccaggtatccaagtggccatactcacttaggagtattctgaattactgaagaaaaggcccattaatgactctgaaactcaccctcctcccacacaccctcggactggaacttctggattcctctttcttcattgatctacttgtggcccaaacctgaaaccagcagccatctccgtggcctccctggccctcccgcttcacatccaggttcttctagttccatctcagaatgttttctgagctctggaacttgcttccatttccttcttctagcaacatcctagccattgcaaggtctcagctctggggataccaccctgcctcaccacattcgtgttatttctccgtccctcttaaccatggctccccaggttgcctgttttcccacacatagagcaatagcacttagggcactgctgtgttataatgacctgtttacttgcccatgactgactataagctccctgagggcaggaactttctcaatcttgtttaccattgtattccacacctagcccagcacctagcatgtctcagcacttgatcagtatttgctgggtaaatctataaatgaataaatgagtaaatgagcaagaatatataaattgtatcttacatcatatgaagtgtgatataggtgataggagcattcactctgaaggaaaggtgaatatctcaaggcacaatcaaggttagcaaaggtgccatctgcaggtgtcctgtctaagagaagtttagcttcaggaacatcttacgttatctcttggacatgagcaaaactttcccccttcttgaaccagctgacctgagctggtctgccagccttccagtcttagggcaggaatgtatgcctggccatcaggaagaaggtgggagaaaccagggacccctagccataggtcagcacatgatagaggcctgcttgaaacactggcagggtggccatgtaggacttacacagtcatctgcctgcaaaaacatgacttgaaatccatgaatgcttgcccatatatgacaagatggaggttttccaaggtagaggtactcaggcagaaaaatgaaagaaaaaaaatgtgaatgtgctttttttggttgtgagctttattatatgtgtgaattgctgattctttagcaagacagtagcagttgacaaagaatcgcccttcagatgtgtggaaaaacactcagagaacacagcaaaccgccaaacaatcaaaggcagccacaatgccacacacttagagatgcaagaaggtgccacggcctttatggctgctgccctgggcacgggcatctgcgatgccagccaggttmgaagatggacggagcagccgcctgtctctccrtgaggctcgtgtggaccctgaagctcacagactccggcggatggcaggcttctgtctgcactctccaccccagcagcccgtcctgcctccctctgcccctctctgccagtcccagcaggaatctgacaccttataccttcctcaatatcaggtagcagtcaatggaaggaaaaatgctggagtcttttgataaaggattggattcttttaagccagttattaatgtatttcattcagaatgtgagtagaagaaagaagttgccctatgttgccctgagatggaggcgcacggctttgaggaaggcccccacagtgcaagtgccagaagatgcaggtggaagagcatcactcatgcgtgtgagctgtgtccaaatgccgagctccacggagacacactcagactgcagcgagcttccttctgcaaccatgcaagtgtcaccctctgtcgggaccctctgagcccatccccgcaccaaagcttctctccagtgctggaaacctctgttttcaggtatatcgacaagagtgatttcagtctggagtcacgcctggagtcatgactgatttgcttgagaagccagtgcaaatcgctgagccacagcatatggaaatctgcagattgcaagtgaaacgtgggattcatcaaaagcctgattgcgtactcttccatgacacttgatacatgggattatgatgtgactttatctatctatttgaatacttccaacctcagcaaaggcctaaatgtagaacacagtggcagtgaaacaactctaccctcaagaaatatatactttacatccatgtcacaaaacgtcttccaattgtgtttcactttcacatgtcagatttcatgtaatgattgctaattactagcaacccagacaagatatagacttatgaaattgcctcatgagtttagtgatttttcagcaactggaaggaaatagaaaatccttgggtcagttctacctgagttctaatcccagctgtgtcttttacgagctggtgggcttgagtaagttattcaacttttgtgtgcctcagtttcctcctctgaaaaatgtggatgataatagtacctaccagttagggtggctgtgagaattaaaaaagatgattcgcataaagcactagtttagggcccaatagtaacatgtaatatcccagcattttgggaggccaaggcttgagtccaagagttcaagaccagcctgagcaacatggcaaaatcctgtctcgtctaaaaatacaaacaattagctgagtgttgtggtgcatatcagtagtcccagctaccagggaggctgaggtgggaggattgcttgaactggagaggtggaggctgcagtgagctatgatcacrccactgcactcccacatggtggaccagagtaaaaccctgtctcaaaaatataagtaagtaggccaggagtagtggctcacgcctgtaatcccagcactttgggaggctgaggtgggcagatcacaaggtcaggagatcgagaccatcctggctaacatgaaaccccatctctactaaaaatacgaaaaaattagccaggcatggtggcaggtgcctgtagtcccagctactcggaaggctgaggcaggagaatggcatgaacctgggaggcagagcttgcagtgagccgagtattgcgccactgcactccagcctgggtgacagagcgagactctgtctcaacaaataaataaataaataactatattagggttctccagagggacagaactaataggagatgtgtgtgtgtgtgtgtgtgtgtgtgtgtgtgtgtgtgtgtaaaggggagtttattaagtagtattaactcacatgatcacaaggtcccacaataggccatctgcaagctgaggagctaggagagccagtctgagtcccaagactgaagaacttggagttcgatgttcaagggccggaagcatccagcacaggagaaagatgtaggctgggaggctaggccagtctagtcttttcatgtttttctgcctgctttatattttagctacactggcagctgattagatggtgtccactcagattaagggtgggtctgccttccccagcccactgactcaaatgttaatctcctttgacaacaccctcacagacatacccatgatcaatactttgcatccttcagtccaatcaagttgacactcagtattaaccatcacaatagcatagaatcatatccctgaggtacttcagcacgcccctttrggtattcaggggcagtgggacatctcattttctctcttgctttttacaaatctccgtttttctctcttcctctttttgttttcctttaaatttgtcaccccatcacattttttgctcctacaacgctgtacacaggcacccccttaaccacttgggaggccatcactcatctttgttaattcccctgaacatccagtgtgggaacactccactgtcactcctgctcrgtgttggaactgaggctgggtattagtctctaaaaggaggacaggacagaccactgcacttttcaggaatcctgtgggcccaacatgagctattaaaaaaataccatgtcttccaaggaacaggggcaccgtgtgaatatggggggaattactgatgtggcaaggcgtctcgtctatattatacaacctactgtgttttacaaagcacaaaatttgagtatttggacaaattcatctcctcataatactttacaaacattttgacccaaaagatacttagttgtaatcttgacttccccctgaagacacctctccagtgggtgatgaggcacctttatcatgtctgactggggagyagccaagggggactagtccttgatctggtgcatcagaaatgaaaatctgtggattctgatctcaaaagacaaggacaactgagacatttgagaccagcgttggacaccaatcggaccacggacctacaccatctctccctgaagctcattttgttgcctctgaaataagtcaatggagactctttctgaagggttgctggtagacaggacaaacaagtactrtgaactttcagatcaggattgcaatgggtgcagcgataacctttcaggaggtgcatttttgatgtgttgtaaggcaacgctgtgagtagagaacctcaatgcagtttgtactctttgcccactgctctctaacacgagtcagtagaaagctggtgggctgtacagttcaatctaggagggagtttcagctcttccaagactagtggggtcaaagtagttatatgagcctctcaggatgcagtttcctcctatgttaaagtaagtgtgtgtgagagagaggagacagagaaaagagagtcatgcctaactcagcacataggcactcaataaacattgggttctccacaccaattcacagaaacagaagacacctgtaggcatcacttacttaatgtgggcctatgagtactttcttaagtgtttctgaacaaagaaactcccatagtctccctcgacagtacagtccaacttttcagagcacatttaactaggaagttcttcccacatcgtggctgctgtctcttagaattaagatgtaaagacgcttcacattgctgtcacacaccaaaagcccttccaggtactgcagaataaggaacatgcattcctagatgagttaattcctttgatactttgattgctcacagtggttttgcctacatcctctccaaattctccactcctccttttagtacagggagtggccaaagagctataattacactcttaaggacagttagaggtgtcctgtggttcctgctgttaaagtaattaaatggaagcctgctagaccaaggtggccccaatgccctgagttcctgtgtctgcaatctgaaacccaactcagtggtcatgttctaggacaatctgaaacagccagctaagccctaacttgggactttccactgggatgaattctttgccttgcttctgagttcactccataaaagccttcctctttgccccttctgtggagccatgaaccacttgtgatccagagctggcccacccatgattgctgtttgctcaaatcaaaatcaattcttttttttttttttttttgagacagaatctccctctgtctcccagaccagagtgcagtggtatgatctcggctcactgcaaccactgtctcctgggttcaagtgattctyctgccatggcctcccaagtagctgggattacaggcacccaccatcatgcctagctaatttttgtatttttagtagagacasggttttgccatgttggccaggctggccttgaactcctggactcaaatgatccacccaccttggcctccgaaagtgctgggattacagacatgagccaccatggctggcctcaaatcaactctttaatattaatatgcctcartttatcttcaacactacatgccgtactccagtctcaataccagccttgtgctttgacattgaccttcattggccagtgcttttcttgtctgtagactttagaaaatcaccagaaacctaatagtaaagatcatattcattcatttaactgatctgtgttcagcactgcctgtaaactgggcactgttctgtcaattcatacacaatgatgagacctaggcagagtcccctccctcttctagacaaatggtggagaaagatgatagtggttgtgtgtagcctatgagaccaggaacaagagcagtggaagggactggtgggacaatgagccatggtaaggccctgctgtagctagagtgtgcagaggaagcttccagaaagaggcagctttaaacagaccagccaattttatgaattccagcttgggattgacaagtcatctaaatctgtaaatgtcttgcttgtcaytggccccaaatcaaggaattttaagatgtcctttgtcatccacattccagagcttgacaaacactgcctatgcccctgttcaaatgtgtgttcttcatgcatgaatacgtgcagaaggttcccccataaaattcaggtggttacgacgtgtaactgcatcgcagtactcacctccgaattatttacatgtaagctgcaagttacacagcgtgtctcagctgctatccgtttgcatgtagacacctctatgtacattagaaagcagagagagcatgacaacccttcagatactagttgagaaaaattaacgtgagtgcctccctattcatttgggggccacgtcttctcagatgaggacgtcccaaccaaacccatgcaaggctggcatacattaaagatgctgatatctcacacccagtgcagctgtcaagtctgctctaagagtgctgcagctcctgatgtttcaaggccttctcatagtgcgtgcatttctcactacgatactgacatgtaaatggatttataggaaatataaatgctttctaaaagacacaaataaaatgtctgaatgcatgcccagcttgtctcatattttggtccacatgctgtgagtgatgtggcagtcgatgtcagccctagaaaagggctgctgttggcgtctcgatcattggcatcatycccgtttatttattgaagtctggaatgcaaggtcagggcactgggaaattaccagcctagaagaagtagctttgaaaatatgtcatttgcctctggggcattttttcctttttctctcttccttccttgctccctgcctgcctgccttcctttcttccttccttcttccttttttcctctatttttccttcctattttcctctattcctttcaaattttcttccttcttcataattctttcagcagagaaagggggaataaaaaagaaacaagaaaatgaagcataaacagagcatctatgagaatataggcgttagtcaaagaaagagaggagataggtgtaaagttaattttctcaagattttatttgtgttgtctggccaggcacagtggctcatgcctgtaatcccagcactttgggaggccgaggcaggtggatcacttgaggtcaggagttcaagaccagcctgactaacatggtgaaacsccatctctgctaaaaatacgaaaagtagctgggtgtggtggtgggtgcctgtagtcccagctgcttgggaggctgaagcaggagaaccacttgaactcagaaggcagaggttgcagtgagccgagatcatgccactgcactccagcgtgggcaacagagtgagactccatctcaaaaaaaaaaaaaaaaaaagattttatttgtgtttccttagtcggttattttgggttattactgttttgctttcaactggaactaagtagaatccttggctaataagttttatgtggatcctgccacagttatctcaaatgatttcttggagtaaaacttgaaaaatattttcctttactagattatgtttctataatgataactcgttaaacagaaatgctacatagaaatccaaagaacttcagttgttcttttctatcaaaattctttacttctgaaattcactaaattctaacctttttccattatcatagccactctgttgctgaagaatataccaagaatttcttcaacaccactgatagtaaatctctgactatactgaatccagaatttcaagaacatatttcaaaattttaactttttaaaaaatactttttaaactcttcatgtgatttcttctgtgtagaccctgcacaaaagttcttcttatgctaactttatactatccttaayttttyccctaaatatctaatgtagtctctttagaataatatacaacagccagggttggaaacagttcaaggggtaaacgtctctatctgaacaaactcttcctgtgatctccggagtcccctccattcccccgttaatgctacatggggaaaggaagttatgctgtaactacagaagatacaacatactctctatccaccctcatgctggtcctgcttaatttttagtgaagatcaaatgtgatttctgcatgaactcaggacattggttctgacccagaaagtaaactccaggcctaactgccaaatacccaactcccttctaaccacttttctacaacttttggatggaaattctatatctactcattaattgtctagaaaggactgatttttgccattcaaagtcacctgagaatttccatttatgttgggaattcagcacgtttcaattaatacttaagtacccccactcaagcatcaattcaaaatcaagatgaggaatgcctcaactctcctggtgtggggtatgggccctcgagtgcctggagggtaaaggctcacccaggtgaacttcacatgattttcttacatcatcactcaaaggcataaggaccaggaggatccttcctttctctacttagtttattgctttctctcttgctgtccttttgtgctccctgtctccaatggttcacatacaaaattaggggttagcaaggaataggaatttcagagaagcaagctctgtggagttgaggaaaaccacaaatattgtagcacatgatttagtacggcaaatggaaaaaacaagatccagcagcccggcaaattctctcttcagctatgtgaccttggacatgtaacttcatctttgagctttcttcatttgtaaaatcaggatcttaatttttaaaaagtaaagaaaactgaggctgatgtrggggggaaatcactggagcccagaagtttgaaaccagactgggcaacatagggagaccctctctctacaaataatacaaaaattagccaggcatggtggcgcgtgcctgtggtcccagctcaggaggctgaggtgggaggatcaccgagcccagaaagtggaggctgcagtgagatgttattgtaccattgcactcccgcctgggtgacagagcagaatcctgtctcaaaaataaataaagaaagaaaaaaaagaaaataaaggaaactgttcatcatgccaaaagcccatgagccatgcctggcaccaacagttggcatctctgttcatatatagtcattttatccagataaactgaggccactccagcccttgcacctttgaaaactgcttaagactaactcctgacctctcataacgcatttcagaaaagaatgctttattgcatattcattactcttaatttatttcaaaaatcagggttttttactttatcaagttctttttttttttttttttgagacatagtctcgctctgtcgctctggctggagtgcagcggcgcatgatctcggctcactgcaacctctgtctcctgggttcaagcaattctcctgtctcagcctctcaagtagctgggactacaggcacgtgctaccacacccagctaattttttgtatttttagtagagacggggtttcaccgtgttagccaggatggtcttgatctcttgacctcgtgatccgccctcctcagcctcccaaagtgctgggattacaggcgtgagccaccacgcccagccttatcaagttcttaaacaagtgccttttacgtgccaggcgcagtgctaggaactttcttaaacacggtatttgaatctctacagcaatcccacaagtagctaccaatttccccctttcacagtgaaataaatggaaattcagagatggtaagtgaactactcagagccactatcagtcggaagtaggaggactagaactgaactccggcctggctagaattattcaacacaagcagaatctaattatttcccttacaaaagtcagaggaggctgggcgtggtggttcatgcctgtaatcccagcactttgggaggcagaggtgggcagatcacttgaggtcaggagtttgagaccagcctggtcaacatggtgaaaccccgttttttaaaaaaatacaaaaattagccaggcgcagtggcgtgtacctgtaatcccagctactcaggaggctgaggcaggggaattgcttgaacccaggaggtggaggttgcagtgagccaagatggcaccactgcactccagcctgggcaacagagcgagactccatttaaaaaaaaaagaagaagaaaaaagaaaaaaggaaaggccctctgtgttgtggttaggacctcaggttctagggccaaaaatctcctggttgactgctagttggtcactttctaccactgtggcgcagggacctcactgtcctctttaaacatccatttcttcattgtaaaatggtcacataagtgggggaacaggtgagatcacgcacaagaagcatcaaactctgtgtagcacgttagctcgtaaaggattctcaccattttcattgcatagctacgcatttagtgaacactaatgaccttacatatttgtgtgtcactgtgtgaacttataattccatgtccttcatgtaaacgatgtgtttacatccaacgtattttcagagactcgctttactgcctcacttctaattttctatgatatacgattgtttctgtgtaggcaacaccagacattgttttctgatttaggctggaacgctagaaaactccaccgcctgtatgtgaaaatgccaatgcattttataagcaaagtcaaccgcaaaatgtttatagggtcaggcagttagatctgaggtacaaacatggtttagaaggaattcttacaatggtgctaaagctctagaagcaaatactatgtgggaggccatagaaagartgaattgttgttcacacttcagctttgatttggagacacctgtgaaagaaaataatctttttcccagtacttactggttattttatttccagaaaacatgcttgttattttagccgaggtaattgccttgcctttcgggtatggtttgtgctaaatgaacagtgacacctactggcggaagatgatcacgtttatttactaaaagaagctcctgttctcactttgctgggtataatcccagaaataatacagaatgttttgatttcaaagagcaaagaaccaacactggagttaaaaagaaaaatcaaaccacgtcaaggccgatacatgaatatagacagattcactttctggagtgaagattgctcttttcttctctaaaaatgctgggttcccccaaccaccaccacaaaaataagcttgtcagagctgctccaagtaaggcagttcaagtgccaaggaaagatgtttggcttgacacacctgttcttcttctctccgtggagtaaacagattggcagaggctgcttcaaacacgttatctgtctaactcattacatattaatacttccaaagtaaatctctccattctgtaactttatttaaatatttttattratatacagtaatacttttccagatggccttatcagaagttttagtgagaataagcagctgaaaacacaacagctgctctgctggcagcctgagagccctgcgctgtgatactgccaggccccccatggagtcagccaggcctgggggccaggcccaggagggagcgtgggaagccagcctgcagctcccagcattactcatgcccctgggtgggccactgagtctgcgtctaggtttggagtggaaagtaggaggtctgtctacattcccccagctcagctttgcctagggccctgtccttgggggattattagacactgttgatttacaaaagctggtattttcatctaatttggttctctaggtctagaggttaaaacccaggggggccggagggatgactaattggcagcctaaatttccaatgtgttgtgaaagttatttaacctgagtttccttgcctgtgaaaatgtgtgtattgagtactgctgtgacaattacaggaaacaatagatgtaacccccagccccgtgagttttttcttttctaagacacaaaccccattctcagagttatgggagaaggtacatttatacactttaattcagagacctttaattcagagattaaatcaatagcgtgtggtcttggaggcattagatgactttttttttttttttttgaaacggcgtctggctctgttgccaggctggagtgcagtgacgccatctctgctcactgcaacctccgcctcccaggttcaagtgattctgctgccttagcctcccgagtagctgcgactacaggcaggygccaccacacccggctaatttttgtatttttagtagagacagggtttcaccatgttgaccagaatggtcttgatctcttgacctcgtgatttggcagcctcggcctcccaaagtgctgggattacaggcgtgagccactgcgccaagcccgttagatgactttacaggccatcaaaaacccgctgccatcagaaactctggacccacaagcaagctctcttcttgctcttggcccaggtctggagcttgaatgaggggtgagcatgagctagcatagccacacctcctactccttcctcggccccatctccctccagagttctttcctccatcttcctttcttctttctggtacctcattccagagctttagctgcttccccaatagacgtggctttcaatgcaaatcctgcattctgacctctctcctgggtgctcagcatctgctggacgtctagatgggggagtcttcaaaacgccaaggcccctgggcaggaggacgggtgacagttcggtgtgtatcaactccgtagcacggttgatacaagccttgccttgaagcrctttgtcttatggtcagaaccatgaaccatcctttctggcccatattaataagattaaaagctggtagcttgcctttttccctgcctggtttttatgagcaaatataggacactgtctcctgcgaggcagcagcggatgaggctggtcgggggtcactggtaagaacgggtctctgttgctattactctctgttggtctgcctgggtttgaatttggatgccgagagctgatgggcctatcactggagtgactttgggtgagttgtttagcaaatatatgcctcattcacacatttattcaacaaatatgaactggcatcatctacgagccaggtcctgttctaggcactgggaggcgtcagtgctcaaaagaaacaaagttcctgccccccagtgtgtgcgctctcctcgggggaaaacagaccgagaaaaacaagcccaatccgtcatcaagctctccagttatgttagagcagaggtggccgcacttttcagtaaagggccaggcagtgcgtctgttagctctgagggccactggtcattctgtgaaagtggccacagacaatacacgaaccaaaaggtgtggctgtgtcccagtaaaatgtgattgtaaagtggttcgctgacctctgtgtcagagcatttccataggcgccgtggaagcaaagcgggggagtccagttaaggcggatctgctgcgcctggggtgggaggatgggaagagcaggttgaacttcagagtaaacttcatcgagaaggtgcgatttgagtaaagacgggacccggagggagccagctgggtgggcacctgcaggatcccagggcattcccagtcgagtgacgcaggatgaaagcccacggcatgttctggcacatccagagagcaatgcagctccaggagacactgtggggagagagggacgcagtggggaggcctggtgaggacccctggctctcattcccagtgaaatgggcagtggcggggagtgagagcagaactgacaacatctgaagtcctgctctgactgctgtctgggacgaagctcaggaggggccgggcagactccaggagagattagactattgcagcaaccagggcaggaggtggctgtggcttagttccgggcggtcgggggctggcggggggtcggggggggggggggcgacatttcctgaggattgtaagagaggcgtgagaaaagagttataacacctggaaggctctgcgtttcctcatctgtggctggaacaatcactctgccgcaggattatctgaggatcaactaagttgactcacgtaaagggttcggcacatgcttactacttagccattgctcagttcatgtaggtagtgtcgttattgtttattatgatgattatggagttgttcaaatctagatttgactctaagctaaatcacctactagccagaggatcttgaaaatgttcgtaatcttggagtctcaattccccacgtatataaaatgagtttaaggcagaaaatggggaggcctctctgcatgaatggttcctcgcggacacggtaagttgttactgggtctgactaggtctcaattatgtgatcaccactctcttggtgcccctctccggtgttattctgtattctgttgagttagccatgttctccccaagtctctttgggagcagactgccctgcagtcaggccacagagctctggagtcctgtggactccacactcacggtgaagtcgtgggtaagaaccaggtgacgctccgcagaatggcaggctccgtccttccctctgaggagctgccaacagtgtgtaggtggaagaaagtgaattcctcctatgcctagctccctttcaaaaggcatttaatttcctgtgactgatgagagagtttgtatttgaaacggaagcctcttaatttatagcccacaataatagagtctggcaactacagaccctcccggtgctgttcagcggctgccctgcctgcggagaccctcctctggtggagaagcataatgtgcctttcatgccttttgcactttggggcttcatcaggaaaagatgaccttactcagttaaaaaaaatcctcttcatcagatgtgcagtagctgtgaaacatcaagaagaacacatgccattgaagggtgacacctgaattacctgccattttctatttttcaaaacagtctcagccaaaaggctagaagtgaataaataattctaccacgactcctctaaataagattttagcactctgttatttgcttcgaacaggagatcagagaacatttgagagtggcactttgcatttgggacatggcacggaagccgtggctggaggccaaggactgtctcaggcagaaacctttgcctggggcctcgggtgcatctaaacagaatctgggaataaataccaggacctgacacagagcgcccgagaacacagagactggccgctgcctgtgacaaacaacgctgaacaccctccagccttccggagaagggtgcacggctctgacatctggggagaaaatgctggaaagagcctcttctgcaaaattgtgcatggagattgagagcatagtgtcgagtttccaccttgttgagagtttgtgctccagagagccatttgcagcaaagaaagagagaagtctgaattaaaatgacaccagtaccctgccctcactgaccctccccacctcggcccaggacacagtgctgtcgaggagtttcacgtcccaccgctctgcctggctgcttctctcaggcaccccttccttcctggagttatcatctctttctsccacctctgcctcgcttccctttccacagtctcctcttcagaaggcaggaaagagaaaggaacagcagctgggtgaggctcaccctgcctgacttcatgctgtaaatgctccctgtcctctcaggaagtttcccttttaattaaaaattgcatttttgaatgagcttcctcagagctagggagctggaacatctcatttgtgtggcattatccttgttctcaggaatggccatgtggcttccttctcagctggactcctgtgggaagctgtgaacagaaggcgccctgagacgtgctcaggtgtccctgggacccggtgcagcccatgcctctgtgagcttcatctcatgccaacacccccagttcccaggctttcctggcccacgctgccatcccaccatggccagcgtgcccacatgagcccgccaggttccggccttctcccccagttctcactgcagcatgcccacttggcttccattcccagctggccagatccctatgtcctctctgatgtattcggttactctgtgttgatgcactggcgacctgctgcagctgtcattccctttgctgcagtatgtgtatatgaattcttcttctaatggaaagagactcaggaagtgaagggaaagcggagggaggacaggaccctggcagtggaacaaggaacaggaatgtcacggggagtcttacagaccctccagaccgtgccctggaggccagtgtccgggagacagtgggtttccacaaataaatgggaaggggtcccacgaccctaaatgcacattcctccgcccctcagacttccacgtacttgacctcctggtgttatttaggtgttcagaaaaggtaatataatttccaaaggagctgaatttgctgccagaataaagctcaatccctgcgagattctagtccagcagtcaggaaggcaggcaagagcagacagagcctgtctctgattactgttccttctccagcacaggccacagggacacgtgcatagctgctgcttaataagctcttgctgactgaatgagtgaggaaggaatgagtgagtgaaggaatgagtgagtggaggaatgagtgaggaaagaatgagtgagtggaggaatgagtgaggaaggagtgagtgaaggaatgagtgagtgaaggaatgagtgaggaaggaatgagtgagtgaaggaatgagtgaggaaggaatgagtgagtgaaggaattatagaatggaggaatgagtgaggaaggaatgagttagtaaaggaatgagtgagcggaggaatgagtgaggaaggaatgagtgagtggaggaatgagtgagccgaggaatgagtgagtggaggaataagttagaaaggactgagtgagcggaggaatgaatgagcggaggaatgagtgaggaaggaatgagtgagtggaggaacgagtgaggaaggaatgagtgagtggaggaatgagtgaggaaggaatgagtgagtggaggaatgcgtgagaaaggagtgagtgagtggaggaatgagtgaggaaggaatgagtgagtggaggaatgcgtgagaaaggagtgagtgagtggaggaatgagtgagtggaggaataagtgacaaaggaatgagtgagtgaaggaatgagtgagtggacgaatgagtgagcagaggaatgagtggaggaatgagtgagtgaaggaataagtgagaggaggaatgagtgagtggaggaatgagtgaggaaggaaggaatgagtgaggaaggaaagagtgagtggaggaatgagtgaggaaggaatgagtgagtggaagaatagtgaggaaggaatgagtgagtgaaggaatgagtgagtggaggaatgagtgagtggaggaatgagtgaggaaggaatgagtgaatggaggaatgaatgaggaaggaatgagtgagtggaggaatgaatgagtgaatgaatgagtggaggaatgagtgaggaaggaatgaatgaggaaggaatgggtgaggaaggaatgaatgagtggaggaatgagtgagggaggagtgagtgagtggaggaatgagtgagtggaggaatgaatgaggaaggaatgaatgaagaaggaatgggtgaggaaggaatgagggaggaatgagtgagtggaggaatgaatgagtggaggaatgagtgagggaggaatgagtgagtgaaggaatgagtgagtgaaggaatgagtgaatggaggaatgactgagtggaggaatgagtgaggaaggaatgagtgaggaaggaatgagtggaagaatgcataagtgggggaatgagcaaggaagcaatgagtgaatggaggaatgagtaaggaaggaatgaatgagtggaggagtgagtgagaagggaatgagtgagttcgcagacagacactgtgttggtctcttaggcatccctgtcgccatggcccccagactctctgactgtattagtctgttctcacactgctaataaatacatacctgagactgagtaacttatcaaggagagaggtttaactgactcacaattccacatggctggggaggcctcacaatcatggcggaaggccaatgagggagcaaaggcatgtcttacatggcggcaggcaagagagcatatgcaggggacctcccctttataaaaccatcagatcttgtgagacttattcactaccacaaggacagtatggggaaagccacccccatgattcgattatctccacttggccccactcttgacgtgtggggattactataattcaatgtgagatttgggtggggacacagccaagccatgtcactgacctagagcctccagggtctcatgagtaaaaacagaggccctaaatcctgcctcacagtgaaactagagtttgccagcatcccagaggccctgcactggtttatatcaccgctgataatattaggttttttatctgaaaaataaaatctactacagggaagcaggatgagtcaactgccttccttccacctgaggaaaccggtttcaggatgaaacttcctgtttagccagattttgtaaacatgatcaaaccatcgagtggccctttctgttattcttatgggtaggtgatgagttgctttgsttggttttaaggaatcccatatcattctgaggattcaacgttctgcccatacctgaggctgctgccatcaagccccttggcgtgccgttgtcatgagcaccaatgatgcatttcccatggcactgttgcccctccctcacagtgaccccgattctcttccctgcatcctccccatcctccattccatgtttccccaactccatctgcttccttgtaaccaacgcatggcccacgatgagcaccagaatggaggaaatagctcgcccttcccctctcgctgctgtgtgtgtccagctcagacccgggctccttagagtatctgccaggagcagggccttaggggaccaagagcttgctgtgaaacctgaaaagctcaaaccagcagcccccttacagttggttgggaagccctcatccttacttaaaagctggtgccactgttcatagctcagggattgtacgtgcttcccccaggccaggaaaggactgaaaaagagctgggcccagtgggtatgagcggggctcagcatggcgctcacatcaaccaccactcccagatacactggaggaggacacagcaggccaccagctctgggacaagggctaccagctgrgacatgctcgtactctcactcatgttcactctcattcagattcctggccacccacctgccccaggccccctgccacaacttatgcaatccttccccatccccttcttcaagggcagcagacactcaaaaaaagtgccagaccgctgacccagcagatgcacgggctgcccagagcctacacctatgatcttttgcatcctagcacaggtacaggaaaggtcactgtgcctggcttagcacttttattcatgatacacatgagacagaatttaatcttcctgtttcaaatactccctgaaatattttccaattctgcttctcacctgaaaagcaagacagggtaaactttatgagaatggatctgctactcagatttatatagatacatcacagttctattgatctgaggaatgctgagaaccttgggaattaacagaaggcagactgccactgggcctgcgctttcttcaggccggtgctgaaggggttgtcatctaacagcgacctgactctgaaagaacactgggtttgcagcacgtgacctcaaattgggtcttaaattcttattccatggattgctgtttattgcaaaacatcacaccaaggttgggcttgctttcatttttatagtgacggccttatgtgattccactgaacattctggcaatctaaaaatatccagcaagcacaccactttcctttgaactgagaggtgctgtcagtaggaaagctrcttgtctatgtcctgagaaaggggcactctggaaagactgggtccttccgcattttatgtattagtgtcagcacactgcgtttttgtgtgccatttggtaatttcttctggaaaatcctactcagggagacatatggccgttataacctggcgctttagagaacacacaatgctgtcatcgtctcagagattttctgtccaaaatgcttgtagtaatgaagagtattctcaaccattaccacagagtttaaaaatgtgttctcctggccgggggtggtggctcacacctgtaatcccagcagtttgggagtccagtgcgggtggatcacaaggtcaggagttcgagaccagcctggccaatatggtgaaaccccatctctactaaaagtacaaaaattagctgggcatggtgatgggagcctgtagtcctagttacttgggaggctgaggcaggagaatcgcttgaacccaggaggcagaggttgcagtgagctgagattgcaccactgcactccagcctgggcaacagagcgagactctgtctcaaaaaataaaaattaaaattaaaatgtggcctccttaatacagcatctgcaagtcttgctgcatgcttgtgaattacttggggggatagcatataaatgggcaaagtccacctcattttagataagatttcattggctatttcctaatgttttattttaatgaaataatgaaaagagatgtcattgtggattcttttttaatgcccatgaatggtttctagtgacattgtatggggacaaaacatacacagcagatcttgccaccaacagcwttcccacaactgttttcttcctgcagatcctacttgcattccacacatgtccactcccggtatcagcctcgccgaccccctgacccatggcacaggctcatcagccctcaatattgttaagtggaaaaatgaaagagtttttattattacaaaagtaatacatactcattagacaatgtcagtaaattgtaccaaaaaaaaaaaaaaaaggaaaacctasaaaacaaacataatcccacgtggctggacatgggatttttgactcattgctgtagagctttctagatacgttttacatgtatacgcaaacccacatgtccgcaattttaacagagacgagtttatgctgatgggctttttttttttttttttttaccagtttttcacccttaattgtgtgtcacaaacatctttgcatttctctaacgccatgtttaatgatgaccatttgtcagggtgtgccatgacttatgtaaatgtgtatcttgcggaatgatgataattttcccacggcygaatttttcctgtgttcctgacttttctctaaaaagaaaaattcctagaagaggaagttagagagtcaaagcatgtgcatgtttttaaagcttttgtcaagcctgtccatgtgaagagaccaccaaacaggctctgtgtgagcaataaagctgtttattcacttgggtgcaagtgggctgagtccaaaaagagagtcagcgaagggagataggagaggggcagctttataggacttgggtaggcagtggaaagttacagttaaaggaggttatctattgttagcagaggaggggattacaaggtgcatggtggggagatcataagactcattgtccgaaagaagaatgtcacaaggtcaactgatcagttggggcagggccagaacaagtcataatggtggaatgtcataaggttggtcaatcagttatggcaggagctggctgtttcacttcttttgtggtttttctttggctgcttcagacttcttggctcctgcaggccatctggacrtatatgtgcaggtcacaggggttataatggctgagcttcgactcagaggcctgacagctttgcatccaacacttatcctcaactctaagaagtacctttttgtgtattttaacatttctgaaatcaggatattgtaaattgatgtggatgtttacaatggtastatgatggagcttttctttctttggtcaagccactattaaattgaaggtgctttttaccattaatgtcatcttagaatggaggcatttcagtcctgttaaattacctcccagcaaacaattgtgccagtgtgcagagcctcccaccgagtgcagcygcccccttccccagcccctcccttttcagctttgccaaatgagaagcaatattgtttcttatttatcaagtcagtgcgtttctatatttatgactcactcatgattaattaccattaacatctctcttagcagttataattttggtatgactttttgttttccatgtagattatgactctgtaaaaaattgtgaaaccatatttataaaaatataaagacattttaatgacaaatatagcatactcattatagaggcttttatgtaaatataatttggtgatcttaatttgaaataaatcttaattaaatttctctgaagtcccattttgttaaaaatatccaacgagcctaaaccttggctggcctaagctcatgatgtttccaagtcagcaagaagctctgtccttacccgtagcagcagtgccgagacgctcctcttcagttctgtctgcatttccaagtccatcaatgatggtgcaattgtgttgacataattcattgcctgagaaatgcttacagatttgcaaattccagattgtggtaacatgattgaacatgactcggcgtgaatcactgattgacagaaacaagttgtatgtacatttgaaatgcttgctcatcactgaacacaaagagagaaggatccattttgcctgcagagaatggaaatgactggggccaaaggagtttttgttgaaagtcactgtattgccattaacccaaaacatatttccttcgggctaatactaagaagccactttgttgtgctatatagagcattgcactcaaaatcctgtggttactgatattataaagcagaacttagggtaccattcaaagaaacaaaataggaagttcctatcaagttacagtgattgaagcatttaaaaagtttctatatactgagcagacatctcgccctaaaagaagaacttgaaagcaaccaccttacgtttttggtggatttgagaaaaatagctaaaatgtgcccatagtggatcagcacccttttagataacatcaaactaaacttcatgactttgaaaaaaattgagaaaagtagatgctaagtgggaagattttactgtaaaccaacacctcaaatcaagtgtgtgtatatatatatatgtatatatgtgtatatgtatatatgtgtgtatatatgtatgtatatatatgtgtatatatatgtgtgtatatatgtatatatatgtgtgtgtatatatgtgtatatatatacgtatgtataaaggaacaaaacataaagccaggagattgtgagggtcatttccatccacagaccaatccccagcttcccttatcaggttctttcccagtgctcttaaggaggtgggtttactcccatgctgagccagtgtcagatatatgtttattttagatccttgaaattaacttgacattcctcttcagcaaagaaaagcatcattttccaaattagtgggagcaaaagtctactttaaaagaaaaatctatttggactgccaaattggtaggaacaggcatagacttggcagttaacccttctgctgatcccctgttgccacttctcaaatggcccaacgggtacgagacttggaacacgagcctgcctggctgtgagcactcatggaccctcagtttcccttccctttctcctggaagctggcccaaaatgctgattatggtggacccaaatttatttayttatttatttatttatttatttatttatttatttttaatttttattttattttattttttagacagggtcttgctttgtcacccaggctggagtggggtgcaatggcacgatcttgggtcactacaacctgcacatcttgggttcaagcaattctcctgccccagcctcccaagtagctgggattacagatgtgtgccaccatgcctggctaatttgtgcattttcggtagagacggggtttcaccatgttggccaggctggtctcgaactcctgacctcaattgatccacctgcctcagcctcccaaagtgctgagattacaggcatgagccaccatgcccagtcagacccacttttaaacagcaattttgaaaaagaggggcatgaacacaggatggcaaatgacgactaatgacttttcccccaaatcccattgtaaatcttgtcactgtgtgaccaagcctatttcacccactgccatttgttcctggcccataataaagtaaaggcctgtgagatatttggagagataaatcagcattcagtttaaagagtcagagctggaggagaaggtgggaagcaatgttatcatttagtctatcttcctgccttcaatgaaaatataaaacattaaacgtatatcagaccatcccagtaagagaagaattagtccccctttttatgactttacagaaacatatacttttctgctggaactccattccattgcagtatttacggcttcgcattctgtttttagaagtatgttgctaccgacttgaaagaggatgtcaggttctctgtagcaataaaggggcaggtgtggccatctgtgccatttcagtgacttatctgaataagcatttcaatccttagaaacagagccttcccatggaaaatgcttgattttgacttgcgtcattgtgcagggagtgatatacaccatgataaattttcctgcagaaaagtctttctgaacacagagccatagaaatgaattcttacagataatgtaaacttagagacaccctgacacatttttgttctcttaattttgaatcttaactaaattttgcagatgccattggggtcactgagacaagaaactgcgttcagtggctcatggacactgatgatattagctcaatttatagagttgtcttgtttgcgtcttgatgaatcttgtttacccttcaagacacaaagtgtcactggggctgtggaatttggacagactgtccagggagagcaatcatctcctcctctgtgactgctctaacctctgtcatcccgtctatgcgttgccacacaattttctgtctaggtgcctgtgttcttctttcttttcttcctagaataaacctttattaagctcctactcagggccaagtacttagatagcagctctcagaacacatggggtgagagagctgggaacttgagtctagtagggatgatggataaggaaatacccagtgcagggtggagggatttaggatcaggtcagtacagagtggtgagaacacacaggagaaacagcaaacccaggcctggggtcagggaggtttgcccaaagggatttcctaatggggaatcagagtactccctagaatgatctctgttgctacatggaataccacagactgggtaatttataaagaaaagtttatttggctcttgattctggaggctgggaagtccaagagcatgatgctggcatctggccaggatcatcccacagcagataggcagaagggcaaaggcatgtgtgaaagagagagaaaggtttttaacaaagctcctcccacagtaacccactcccacctcacagcattaatgcattcatgagggtggagccctaatgacctaataacctctgaaagacttcacgtgaataaaatctcagcatgagttccagagaggccaagcattcaaaccatagcaatccctattccaagtcatctaggcaaaggagggctagggagaagataggctgaggagcagaggataaaagcgtggctctccagagagtgattctcacagagatggggcagagtcattacgtgctcctgccctgaggccctgcactgccagagagaagcatcctctcaacaaatgcttgtgagataaaggaatgatttgatttggaacaataaccgaccccatgagcgtttttccgtttctccacaggacaacagtaaagggccctttatgagctattagccttttgaaaatttggttctcatcacagagatgggatttcaaagaataaggagttagatcattgttattwtcaaaacaatctggcttttttgtgcttttttagtgtttgccatgatctatgtcgttaggcaatttttaaaaatatagaatattaggtcccaatattattaagagagccagaagaaaaaggggcagtattctaccctacagatgatcagctctctgagggccctgcagttctaacagtctgtgccactaaatcgagagggaggaagggcgcccagcactgagaacagttgatgcttcactctccattgttattcagctttgcaggagttcaggaaatgccacctcaaaatatgatgctttggtgtgctgactccttaacagaggacacttggggaacagcaaattcggggagggcctttctctgaactagcttctctgcaaatacaattgatggatctcagttgtcgtgaatcccctcccagggaattgtgtcagccggggaagatgagtacgtggacaccatgcctggagagactactgcctgttctgctcagggctgctcggagacaacttttattacctgagagattgtttatctacataataagacaacctttattcaccatacaattcctctcctygccctcctctaacctcctccccctcacaagaatccccaagcccctgttcttttctgtatctaggatatagttctgtaggcttccatgatctaacccttcttggagtctcatattctgtgggactctcatgtgtacagaattgaatatgctctttctcctgttaatctgtttatatgccattttaatcaatagcccagccaaagaacctgggagggtagagggaagccatcttttgctcccccacagcttccagaatgtctctcatgttatgggaccaaaaagctatttattagtagagaggcagcaatgtctgtggcatttcctcgactcacctgagatccgcgcattatctcagccgccctgggacacagtcacttgctctttagctgtcatttaattagtttgctttctatgtccttagcaaagcaataaaattgagagagaaaaagaraacttaggcaggggaagagtcttataagtctgggttttattttataatttcataagacactgcaaggtgtgcatgttgctgggagatagcatttttcaggtcactgaaggcatttggcttcacctcctgctcacgacccccgaggcatgagttatctttggccaacaggcatccagaggagcctttagagcctggcctgccactgagactgtcagggcggtgatgacaatcagctctctaagtggttctggctctcaccattgtctgatagtcatggcagagatgcatatcgagaggataatgtgggaaatgctctcaccattattacccagccccaagctgggaaccttctttaagaggccttaagaatataagtagaagcattaacggcttccgctccagagattggtgtgtgaacaaacatctcagacctctggatctctcatcttctctctcctcctttgagccagaacattcatgaataatcatttagggcagaggttctgggccagaaacatctgagatccagtccagcccccggaaatccaaatgcagctgtctgagaatctcatggagagacacaagcctagaaagtgttcaagacatttgggggatttatttcagcttctgtcattagtgtgtgcttaacttcaagggtgaaatccagatcagtactctaattttttttttttggtggggagtggggacagaatcttgctcttgtcgcccaagatggagtgcagtggcacaatctcggctcactgcagcctccgcctcctgggttcaagcaattctcctgcctcagcctcctgagtagctgggattacaggcgtccaccaccacgcccagctaacgtttttgtatttttagtagagatgcggtttcaccatgttggccaggctggtctcaaactcctaacctcaggtgatctgcccaccttggcttcccaaagtgctgggattacagatgtgagccaccatgcccggccaactctaacttttaaaattaattctttggtgctaaagcaagactggcctttggtagggtggatcttctcctcaattccccaggacgtgactgaactatcacaaatgaaagtcctgttgctaaaaccatgcccgaccaagccttccagcctgatactttacatgcaaaaacaggtgtctttgagccaaccttctttgttggctaaattaagagactgcaataacaccaggccaaaacttacgtgaatggtggatttctatgacttcgtgtttattaagctcattctataatgaaggatggtgctgcagccatcagaaacagatgtttgtttgcagtgtactctgatcaacagtcttccccttgagtaatggcctggacgctatctgtccctggtccaagatttgacaaagtgtgcaaacaagtaaatcagacacagtgaaagttagcgataacccaggacagttcttattctctggctttctttaacaaatgactcagagtgtgtggcagaaaaattcatatgctctcactgcagggcagttacgcctcatattttctttaatttgactgattttctgtcccctgcagctcttttcttcaacacagtgtgaagtgaaactcatatgggtcgtccaaaggctgaaaataaacacagcatcctttattcgaaaaaaaaaaaatctgaatttctttgtcttagaatacgtttaattttcggccgagcgtggtggctcatgcctgtaatcccagcactttgggaggctgaggggaacggattacctgaggtcaggggtttgagaccagcctggccaatatggcgaaagcgaaaccccgtctctactaaaaatacaaaaattagctgggcgtggtggcacacacctgtaattccagctacttgggaggctgaggcaggagaattgcttgaacctgggaggtacaggttgcagtgagcggagatcgtgccattgcactccagcctgggtgacaagagtgaaattccatctcaaaaaaaaaaaaaagattaggtttaattttctaatcttccccatgtccccagctcacctcatcctactttcttctaaaatattggaggtgttctgtcgcttttgttctgtggacccttaactgaactctgcatcgtgcaaggagtcctcagacagcagggtccttgtagacctgcgcagtccagcgtggtggccagcatggtggccactagccctgtgaggctcctgtccaacatggtgcccacgtgaggctcctgagcccatagaatagggctagtcccaactgagatgcattgaaagagtaaaagcagacccgattccaaaagcttagtaaaaatgaatataaaataactcattaccaatttttatatcgattgcatgttgaaatgatacaattttgaatatatttagttaagtaaaatattgaaattaattttacttgtttctttttcctcttttcatatagctactagaccattaaaaattattgctgtttcaattggacagcactgttctaggctgtatcctttcacggtggtttcaaaatcaaaaagacaaaagtgttgcagaattacactagcagagtgaattacactagaatgctggcatcatccctagcactgggattggtactttctgggggctatcatttccagcaaactccattggtcccagttcaccttcctcttcttactgctgaaacgggagagttccctgacccaccccggttgcaggacatgcaacaggcatatggctcatcagttcagccaccaccactgctcaaactccttrtgggagggggagcatgcagatgagcaggtgcaggagccaggacgagcacttctgggctctggccccacagtagtgtctagggatgggtgcctgtgactcccaaagcccagttagctgtgtgttacagtgcgctcttttaattttgctgtctgcagacagcttaagtgttaaacagctcagtggaccctctgcctttttgcaagggcagagggccagtgtgacagctttccatattccaagttcttgtctggcatccagaaaaatcaggtcacccatggacttgaaggatggtgactgcagggttttattgagtggtggatgtggctctcagtgggatggatggatggggagctggaaaggggatggagtagaaagatgatcttcccctggagttgggccgtccagcagccaatctcctctctaactgtctgcagcagaactcctctcgacattcagatattccttctcttctctcctctgctgctcttctgctcatggagcctggggtttggagtttatatagggacaggataggggggcatgacaggccaaaaggcaacatttgggtgtgaaaacaggaatgcctgttcccatttagggccatgggtttccaggcttgagggtcaggcctttgctggggaactgccctcttctacccaatatttccctgtctcctgtctgtaacctcctcatctcctcactacaacctgcacctcccaggttcaacactgtgctcccatggaacctcacatccatcatatgatcaggacacagctgactgtgaactctgtgaggccatgaagaatggccagtgccttaccattcacacacagtacatgcttgatgagtacttgtggaatggagggagcattgggtagagcaagggagaggtgaattgtgactcctctgaaactggaaattacatacgttctgcatctttgcaggctccagcaatgcacagcatacattctgagtggagttcctgagtaggaacttttggttgaatgaatgagctagaacagggtctctaaatggtgcatacaagtcactcggggatcctggtaaaatgaaagattctggtctagtacttcttgggtggggcctgaaattcgggttttctgacatgctcctgggtgatgctgatggtgctagtctgggaaccacattctagggaactaactagagccagtgctgtgatgtgaatttagttatcaacatggatgggcgtcccttcaattcatgtctcatggatgctccaactgacagtaactgtttcagcctcctctctatctgtgactctcctctccccctagactccagaagattcagagctgctatggtgctctgttaggaagaccaagggcatgggtgtcatctccttgagaaaactctctcatcaatgtgactctcctaggattttgctgcaaaaccttatcctcctccattgaaagccataaacctttgagtgtgtctccctagcctcgactttctctgggacttcactcccatcctgccccctctctggctagcgtcttcattctctctcttttcatcatcttttgctgttttcaaactgattcagagctctctgttgtgaagccttttccaccccatcatgcctgtgatcttagcctctgaatctagctgaccattgaaccattggaccaaaattatggcctccgaggtcactaaagtactttccctggcagaaagtcttagttattcctcttgtactcaggattgacctctccattctcagtactgggtttcctcagcactgtgctatcctcttctgcttctcagaagttgaggcttttccagctactactgcttgtttattctgcaaaggtttgatgattgccattattctgttaggtccttgcaacttcatgataatcacgtggaattagaagtgacttgaatttgaggtgactgcaacctatccaaatggaaatatgcaataggcaaagtgcatcttaaaagaggagttgggaagggtggaatagattttgagaagttgttagaagagaggcagtcaattaagcttgatgttagaatgctccctgaaggggcaaatgtgaagggcagaaaaacaaatgctatctccacgtgctcttacccactgacctcaacccgcctggatctcttctatgggacccttaagacttacacaagaatactcaattcaacccatgattgtgcattgtatcatggagtacacaattgtccttcagctcttytatgctttataaacatccaccttagctgtaagctacttgactccagcacctggattgccacaaagagacactgatcacctactatgttctagcacctggatcttgggaagacaaagatgaataagatacaaatcctatccctttagaagaggagataggtggagacagtttcatatagagggtgaaacagtttaatagaggtatgagtaagaaacagggcttgggaagaaaacaccttgatcattttggctgaggctgcaggggaaaggggccagaacaggtatacctgcagggcacctatgagactgctcaacatacaataaagggttaatgtatcattttgactgattgattgattgatcattgaggagctgcaaaacctccaaagacaaaagtctgtaagatgtgctggcagggtgtccccaaacatgttcaggcctctttccaaagctggccttgccccaagttgcccagggcgggcccaggtattcagggaaagcatttcgcctcccctgctgtgctagagagcataaggatacccacaggcacatgggacaaattgggctcaaattgccatatggcttggatttcacatttttactggcgtagcgtaatcatttctacagagtctagtgccttgctgcagattgtaaatgataaggtcacgaggattagggaccagttaaaaattatagaagacatatgctgtgcgttttactaatgaatggccatattcaaacatgttcactaattaatggcaatatttgaatgggcccactaatgaatggcgatgtttgaaagtggcattgaatttgatactctgtgaccagtgctccagttctagaaggagccaactgctccataaggtctgagaaatgctcattttaaagcaaaattgggcaggccttgcaggatggtaaagggaattctcagttagatattgaaatttgcccgccaagaagtttgtttagatgaacaggatggtgtgaacatatcattgaacaagagttccagcttgcaaccaggtcctaccttagcctttgggaacaaggtaagccatgacacaaatgccagagctggggaccttggaagataaggactgtccccataggaattgttttcagaaatggttacagtaaagagaaagtaagaaaagargcgggggattagggaccgagagcatacagcactcccaccccagcttcccctgtcctctggcagactgctgcagtcaggtcacctggcaagcgtcactgagagccaagtctgcaaagmtgaggctcacgacacagccacaagtgagggaagctgccgttcccccattcactgtttctttctctctaacctggacctctaatttgttggctgtctgtgtttaaagccgctgagcttaaattcattacaagtcctttcctggcaggcgggccagattcaggcccatcagaatgagacgaccagctccatgtgtgttgagctgaggaaagtcagagtgagcctgaccacaggccactcctgacccagctttggctgtgtagacaagacttaaacgtggtcagagtaattgctttggctaggaacacaactctgtggtgacaaaacatgtataaagaaggtcttagcaaaagtgctgggatgtatttgatattcttttaaagcagcttgacaraggcggtggttgagaccacagcgtgttggggaagcagcttccacccaccttgctgctaagcctgtgactgacaaggctcgcgaaagcaatcaaaatggaaagtccatatgcccttggacccagctatttcatgtctagaaatttctgctacagatttcctttcacatgtgtgaaatgacctgaagagcgggacattccctgcagctttgtttgtcatggcaaaatattggaaggacctaaatgctgatcggaggggctggtgaaatgaacgaaggcacatctatccactggaatattgtgtggctgttcaggaagaatggagcagctctccgtgtgctaatagacagccatctgtagcatgcattaaacgaaaaaccaacaagcagagtacagcacattatacaatgttttatagggtatttttgtttaaaaatagcataaattgatgattgagtgcagaacatatttctggaacaatacctatacaaacaggtgacagtgattgtctctgggaagctatgtagctgaccaaggaggaaaggagacatttttcacaatgtaccttttgaatctgtgctacctgcacatattttgcattcaaagaatacctactttttaaaaatccatgactctgcaaatgatatttcagtaacgctcttaaagaaaagaaaaaaataaatggccaatacacatttttaagtttattttccctttaagttatggtaaaaatcaaaactattttggagtaggaagtaaatgtaaatgtctttgtccgtaattatagactggatagttaattcccagcagaaccattgtcaggaggaccaccttatcatggatcttttaatgtgaggtgctgaggtcagcctgttgaaagtaagctcagtgggtcttttctcctcattgcatgaactcatcttctctgaggggccctagttctgagacaggtggtactaaagtttcctactagacggtactcatagtgagtgggtcagtgcagactgcacaactgaaagatgggatggttacgtgcacgcgcatgatgatagatgttggtgtaagaaaaggggattttcrgggatcttttcagagcttgcaagaatggaaattaaaccaaagaaagtaaggacctgttcaaagagcaaacctaaaacaaaaataagcctagggctgcagggtgttggaggtcacaatattttgtgggaaactaattggcattgtttaatatccctggggattagtacagaatttgtgaaagacaaaggaacgtgggtactctacagagctgtatccagcctcctgaaaattctttctttttagccctttggagaccacacatagaacactgtcttcgtctgtttgcatttggagcttagcacagtttaagattgcctcacaccatgagagtctgtgattttaagatgttgtgtacttgaaaggaaataaccttactttcttcttttcaaaattgtgttttaatgcattataatctaacaccatctccgttctgtggcactgtcttgtcagaacgagttttgcatatatcagcggctggtgactcatagggagacttcctctcttgatagattccctttacagaggctggacttacgtatctctgctgccatcttctggaaagctacacaccaaaaagaaaaatatttcatctattcccaaagaagtacaaatgtgtgcttcatgcctttgatgtttgccttgactctagtaaggggtcctaagatggtatttgatcctctcctattcttttaacacagaatttcagagccgtggaagaaaaataaatgcacataatagaatgcttttataatagatgcagccatgatagaaaacaggcacaaagaaatcttggcttccatagagagatcatcatcaagccttattttaagggtcattgcttgtaggtacctactggctctcaacctgattgatcagcagccactggaatattccgattgcattagaagctgttcatttgcttccttttcatgcttccacagagaaagtacacatacagccccttttgaatgtgttcattatggaaatatgggaaagcaaactcaaacatcaatcaaatgactactgcactgacatgatattgaatgagaggcatgatgggccattcacatagctctctggtagtacagagcgtctaagggggctgacagtgacttacctcagcatgtataccagcaaagagaggcctcatccctttctagacagcagtcttatgtcttatgagtagtttacaagtgtggcatttctggggaggtgtcagttttacccgagattcacataacagtcattattatcagtatactgggaactgctttaattaacaaggcgcttactaccctcttatttttctacagactcttaccacttgttaaacatcatagccccatggagaaaactatttgttgtgttgttgtgtttactgtgtaccagaaactgtgttaaatattctttatcttattatttcttctttgtagatgcaaaaaagctcaagcaaagagatgttgggatcacacagataataaatgatccaagaggcctcagactccgggtctctctacctcaaagggttcacttctaaacactaatctacatctggtatttaaacatgtaaagatctagtacacgatttcacagattaaaatgtgctattcttttatatgttgcctagggccaagattttactcatcctaaaagtaaatactcaacacatattagttgcaagacaaaaatatgacttcaatgttaagaatagtttagctattatgcaatagaaaaaaattggcttattgaatttagcctctattaaatctttttttttttattctatacctccttttaggcatttaggataagctgatgactagaattaagttaaaagtgtggcaccaagctctcaagcttgaaaacataccaaggagaatgtattaggtgaccatgtttattgtcaaatgaaaggaaaccaccacactgttggaagtggtgaactttctcctggtgttgaattctgagaggaatttgccatatggctacctggaatttatatatgtatatatatatagcgagagagagagagagagagagagagaggtttgaactataattttgcaaataacagggaaagtttaaatagttttcattacatcagttcttttgcaaaagattgggaataaagtgaccttgttaaattttttctttttctttttttttggagacagagtctcaccctgtcacccaggctggagtgcaatggcacaatcttggctcactgcaacctccgcctccagggttcaaacggttctcctgcctcagcctcccaagtagctgggattacaggtgcctgccaccatgccagctaatttttgtattggtggttcacacctgtaatcccagcactttgggaggccgaggcaggcggatcacgaggtcagggttcgagaccagcttggccaagacggtgaaaccccgtctctattaaaaataatttgtttctataggagctttatcagccagagcttcaccagagagaccagaccagcaggatgcttatatcaaatatacatacacatacacacatatatgcatatatatgtgtatatccctacatatatatacatgcaggcacacattgtatctatatatctgtgtatacacagatatatggagagatttactggaaggaagtggcttacacggtttcagggctgggtaggcacctcctaaatccacagagtggccatcaggaagggcaggctggaactcttgagcacagcctgacgctgctgtccacaggtgaaatctcttcttcctcagggaaggctcagttatgctcttaggcctttccacagattgaatcagcccccttcaggttatctaggataatctctcttacttaaaayaaactgattatagatcctagtcacatctacaagaaagcttcacagaaacaccaagattagtgtctgcttgagtaactgaggaccatagcctagccaagttartacataaactctcgtcacagggactataatacagtccatgtgtttgattgccttctaaccaaatctataagggaatagactttagagagccaatgaaataagtatgtattattttatgattgtttaaagacatttaaaatttctcgaaaaaaaaaaacaactctacggaaatggatcacatttgttagatccaccacaagagaagayaatcctgaaaatgtatacggtataaacaggactccatgtttcctggtatactaacttccattcggttaatgttgactcataaggtttggagaggtattatgcagcttaagggagcctcagcaaatgtaagaccatttttaagtaatagcaaatccctgggtaaatttcagccttctacatggttggttaaagaaggatccaggcgccccagatatgagacatgcagctcagcagaatggatgtgaaaatgttggagctaggtctgctttcttccccggcaagctttttctctagaaacagctatgccatgggaagtgtttgcaaactggcccgaacactgtcttaagaaggagttttgtatctgcctaacccagagttccccagaattctgttccccatgcccttagcggttcagtacatttttcacggtatttctaggccaaaagaaatgcctaacagttgtggttatgaaaggttttgtaccacgtagcatagtaagaattaatgtcataacgacttaatagttatctgaaatgataattcacacaaatggaaggaaaaattagctttattttattcttaaaaataatcacgtcttggccaggcacggtggctcatgcctgtaatcccagcactttgggaggccgaggcgggtggatcacctgaggtcaggagttcaagaccagcctgaccaacatggtgaaatcccgtctttactaaaaatacaaaaattagccgggcgtggtggcaggcgcctgtagtcccagctactcaggaggctgagacgggagaattgcttgaacccgggaggcggaggttgcagtgagccgagatggtgccactgcactccagcctgggcaacagagcaagactctgtctcaataaataaataaataaataaatcacatctttgttccaaatggatgtttacatggtatttgttttctattctggtaacttccaaaagcccacctttgcaaagatacaatgtcaccaaaaggaaaatagcacaatctacattaacactgggaactacyttgagttaataaatcacatagtgttcaatagccatgctgtgttttacttaaaattctagaatatcccaggcacccctgtgagtttgttacagtaccgcagggcactctggtgcgtagtgtgagaactgaaggttgagagtcttgagtcctggataatgtaattgaaaacccaaacattttcaagatcaaatcagaccttctacattgcacatgagacagattcatgttacttaattgggaaggaccactgcatgatagatctaaatttaaattatactttgaatagaagcaaattagccagtgcctccctgtgaagtcatcaccggaatattcctgcagcatttgcttgccttttgccatgctaaagtggggaggctttcatttgatatgctcttccctttctcttatttctcaatagtccattctttgtagtactggtgtgaaagggaatttaatgtctttgtgtcaggaaargcctatttattctgacaaactgatcagcctccagggtgttcctctaccatgaaactgattttatatctcatccacgagctaataagatgtgaacggttttccctttcacaccaacagataagatttgcttctctagaaagcagtgggctgagaccccattgccagttctccatgattgggcctcccgtccacatttttccaacaaagcatgtaagagcagaggaatgagtgtgaggcagacccaagtattaacagataaatgtttttaaaaataggagaaaatcctagaactcaactcactattcagtgaattcgcttttagttcagagaaaataagatgtcagaagctgaaaccaggtaatgttggtgatttgtgtaaggacgttctgatgcacacacgctgtcccaccaacctttaaataaagtttacatttcactaaatttgagttcagtctctctgctgtgagaagaaataagaatataatatgctaaaagtgatggcttgaagatcaattgtggcatatctctgaagagattgtttccttataaaatgcttttcctttttgtttctgatgtcctgagattaaaatacttttcagatgaacttttaaaacaagaaattggacgtaggaaaggagaaaactctgttcacatggtgaagacaacatgaaggaaaaatagtgttgagtaaaagccattcttttttgaggcaaggaggaattatggtatattttgggatagagttggttttatatcctggtttctattatttttgtttttcaattcaaatcagtcctgtcttaagcaaaattaggctaaattcctaacttatactataaaatattagtttgagaacttgtaagtctctgtaaatttttgaatcttccagacactactttcagcatattatattcttatttattactgtatcagttatttattgctgtgtaaaaaccaccctaaactttaatgatttcaaataacaacagtctacttggaatatgacccagtcacatagctggcaagttggtgctggctgtctactaaaagctcagacagggctattgttgcggctgaggccgcagctcttctccatgtggggctcccatgggctgttgagcttccttaccatatggcagctgggcttcaagagcaagtgtcccaacaggaaatggaagcttctggtttcttgaggcctgggcctagaaagtggtacaccatcatttctaccatattctaggagtcaagtactcaacacatctggctgtcagcagaagagacataaagcccacctctcaagggaaagaggatactgtcagtttgcctctatgctctaagaccaccaccatcatccacacaccatacttgtggatggcactctctcctctgctgaaatgccttctctgaatacagtttctgctgtgggagatgttgcctacaacttattaaagaaagttccattgaaagaaaccagttttctggtgaggaaactccttcctatgaaatggagtaggggcaaaatagtccctgttgttcttatctccttaaagtttagaacacattgtatgctgtgattgtagycactcagcatgtgctatctcactacctctcccaggggtcatatgagaaagctatcgctgttatcctagcatttccaaggtggaaaccaaggcacagaaaccaaggtggctttcccaaggtgtttcaggtggcaggggatgggatgatgactccagtctggtgtgttccactgctgatccacaactcaaccgtgacagtaacttcagagcatggctggtggcgatgagaatgggacgtgctttcrggagaggtccatggatcccagacagacagccctaaacgagcctctctggcattcactcttccagctttcttctttgtacgatggcgggtagagggcattggttccttgggcgtcttcagtcccatggtgaatgctgctcatcatctctcagtccgtgtgtctctgtcctaatctcctcrtcttgtaaggacaccagtcagattgaagaaggcctcccctaacaacctcatcttccctttaccactttaaaggccctgtctccaaatacagttactttctgaggtcctgcttccacctatccattatgtgggggcacggttcagcccatagccacccatttctttttccataataggcttttaatacgaaagtaagtccactgacatgggcatataaatcttctgtgaatgcaaayaaatattgaatgtaaacaaatattaaagggaatgtcttgaatgaagttttttccttacattctaataccaattaaactttgctgtgggtatttatttgcattactgtgtgtattagtctgttctcacactgctataaggacatacccgagactggataatttataaaggaaagaggttcaattgattcacatttgtgcagggctgagtaggcctcaggaaattcacaatcatggtggaaggggaagcaaacacatccttcttcacatggtggcaggaaggagaagaatgagagctgagcgaagggggaagcccattgtaaaaccgtcagatctcgtgagaactcactcactatcacaagaatagcatgggrgaaatcatccccatgattcaattacctcccaccaggtctttcccatgacacatggggattatgggaactacaattcaagatgagatttgggtggggacacagccaaaccatatcactgtgtcttccactagactggaaacatcttgagggaaggaaatgtgacccatcatctctgtagccctgctatggtgcttggaacactcttgagtaaagagtgaacaatcccatcaaaacataacttgatttctctttgcaaaaaaagtatttttatacagaaactgttgcacaagccagaggaatgaatataatgaatttggaaaaggaaaaatgtgttattgccaaatgcaacctaatgtccctaattaatggatgtgtgttcttttgcagtttgccttctgccgggaatgtaaagaagcgtaccatgaaggggagtgcagtgccstatttgaagcctcaggaacaactactcaggtacagaatgccctactcattcctccaagcagggctccggatacagtgggggactggagccgtttcctggaggtcatggagagttccattctaaaaaagcaagaagcagactggtagctgacagccatgggaatggggccgtggcttctcccagaatgactcccctccttggggcacagtgtagacttcccagtggccacttggggcatgtccaaaatagcttttccctgggcagatatggaacagggacaaggcatgtgagcattttcaaaggagtccttagaggggaaataaaacaacttaacagtgtctaaatcagagaaatccatactaagtctacttcaatgtttttaatgccctagtttagaatctctggtgaaaatacctctgtgagtggcatgtacagaaagatgacattatgtaaggatatcattgtcctttagcagcatcatgccctatgctaactggtgtttcagtcctcattaagtaaagaatgtgttggccgagcctcactctctaaggtgctatctcagtcttaggaaagtgcaaatgcattttattttatttattaattaggatcaaccaaaccttcagggaaaaagagtaaaaacgtcatcacagtagatgaatttgctcattatttttctcccaatgtagatgttaacaagggtttaaacaccaaatctttgcaaataaatcctttagtcattgtactgataggaacctagtaaacagacatagaaatcccagaatattttgattttacaatagagaatgttaaagatctgaatgctctaaaatcagagcatgaataagtgtatccctatatggaattctgcagatgagtttatccaatattagcataactaaataaatagaactggtgaatttgggtcttctcgtctgctcctaaattgccagccatgagcatatgagtggatttaggactgagttgccatttccatagcccaggcagcaaatgctctttctgttaattttattttagctcagggacattcaaacgcgagcttaccaggtactgacagcaaaagcaataatggcccagagacccctgcctcaggaccgctgtaatggaggcgggtatacctgaggctctgggaaacggagttagtctagcaatttacatccatatgctctgagactgcaarcatggcagaggcttccacaaagtgatactctggcatctacagtatttatttggaaacagtagctgtaagggaaagaagagcattgcttaacctaaagccatccaggcgcctgaccctccctctaatcccattcattcttcagtcaagaggaaccatccagccttggtgttaaagattaaggtagcccaaattaaatgtttttaaattgttaaaaccttaatattggattcagaaaaataggaaaaagaaagttagagatgacctaaaccatagatgtccagcatcgggggaactgtgtctgcaaatagtgtcaattagcagacattaagttgagcatttgggtgggtcaagcagctgctagactctctagaaaaatgcattgaaaagtatatttcccggccgggcgaggtggcttatgcctgtaatcccagcactttgggaggccgaggtgggcggatcatgaggtcaagagattgagatcagcctggccaacatggtgaaaccccgtctctactaaaaatacaaaaattagctgggtgtggtggcgtgcacctgtaatcccagctattcaggaggctgaggcaggagaatcgcttgaacccgggaggtggaggttgcagtgagctgagatcgcaccactgcactccagcctggtgacagagtgagactccatccccaccccctcaaaaaaagaaaagaaaagtgtatttccctttagaggctcataggggagccatggggggagatttactggaaaatgaatatcgtaattacagtaatatgctaaaccaaagcttagcaactctatagctttatataaaacacttccaggtttccctggaaaagtcacagaagatgggtcagagttggtcaggacagcaggatggtgtggtaaaggacattccagcagagggtgccacatgggcaaagttgcagaagccagaacctcytcaaccagactgtgtcctctgttcccctgtgtctccaggcccaagatgacatctgctgcacagacatttaatagatggtttgttgagtgatggcagcatctataaagaaagagacattatttcattttttttgaaccagggtctcactgtgttgcccaggctggggtgcagtggtatgatcttggctcactgcagactccttatccttggctcaggcaaccctgccacctcagcctcccaagtaactggaactgcaggcacatgccaccacaccaggctactttttgtattttttgtagagacagggtttcagcatgttgcccaggctggggtcttgaactcctgagctcaagcaagcctcccaaagtactgagatgacaggcgtgagccactgcgccccatgagacattatttcattcattcaacaaatatgcattaaacacccgtaatatgttaggcatggttctaggccctcgggacaaagagtaagacaacgtccctgctcccatggagtttctacggcttcaatagatgccacagaggttgcacaagcaactgacatgataggaattctgaggaggtatagttaatccacatcagggtcatcccagaaagaactcaggatgaagcagccctgcagttagacccccccaggagatgaggctcttcctgcttctggttcctgatcacagggccagcctccaattcctcttatttgaaaacaaagcaaaccaaccagccaaactaaaaagatgtctgctggtgaacagttgccagacaacggaaagcaactaattggggtctttgctgccatgttttcctacgtctctgattcggtcagggtccctcgggagagagaagccaacccagatgggcacaggaggagatgttaatgaaagggatgacctgcagaggcgggctggggacacaggaaccatcacagggctgagggcctcagagcgagcatcactggggagccatgaccaccccaggcctgtaaaggcagggggaggaagagtcccatgaaccccatgagctgcagccatggagaagggrcctcatgacaggaggtgtcatcacggagcatccagcgttgcctggaagtagccccacacaggaagggagtgagcatggacatcttgcctcctgcctcctgccatccgatctcttgctaatgtctcccatgggccataccccaccgaagccagacacaagggatcctaggggcacagcccatgggagccagccttccagatgcaaagcagagaggggaaagaatacagaattaccagcaccttctctatgagygaatttaccaatcttcccaagtttccttatttcaaccatagctgcttttggatgtgggaaggcacgaaccaaacaagctatttcttcaaatttcatgacccaattcgatttgataacagaatgaagggcttttattttcatagagctggcttattttctgttccctacatttctctcaagcagcatggtctccaggaggatgacctctgcagtttcattgacctgaaatctttgaaaggatgacactctacacatctcacaatgaaagcccaattgcagcctcccttggaaccgaaggctttagatgtgttctcacatctgaattttgctaataataactaaataccctcatcagccctcttcacactttctttcaattccattcagttgcagggttctttgctttgagccatttgtgactcgtttctgctgttcttccctttagcrttgattggtttctgttcttgcacattacatgctccagccaggagagcccatttctcttgagtcccaatcagcttttcctatcagttagactgttggacctaaaacttaatgtattttttgattaatgcaataattctttaaagcaaactcaaaaattggctttaaattggttttaaaatattgaacaagctttacgwtgaaactgctgggagtttgggaaagcagtgacagaagatcaatccatcacagactaacgagagtccagtcccgtttgctttccttgtttttccctgcttgttctcctccccgtgttccagttccttccgcgtattgcccctggaggcttgctaataactacacacttgctcttgcaaaagccacataaactggttctaggtagttgatgttcctctccctattcagcaggagtgcagactgagacttccagatttttagtggtgctctctaaagccgcagaagagatcaatttcagtggctatactttacctaagtagttggggatcagcaactgctctctctaatagatctacagtgtctgaggggaatgtgcccatgcctgcctaccaaccatgcctcctgctcaacattctaggcccagatcatgttacctcctcccagaagccatctgccctccccactacatcctgtaagctttcagacaactgtacattctgatacattcgtcacttgaaatatcgtttctctgtatcttcacaaaaagtctgggctttgttttgtttgtttgtttgtttgtttttgttttkwttttttttttttttttttttttttgagatggagtctcgctctttcacccaggccggactacaatggcgctatcttggctcactgcaagctctgcctcccgggttcacgccattctcctgccccagccttccaagtagctgaaactacaggcacctgctactgcacccggctaattttttgtatttttggtagagacggggtttcactgtgttagccaggatggtctcaatctcctgacctcgtgatccacccgccttggcctcccgaagtgctgggattacaggcatgagccactgcgcccggcctaaaaagtctgggctttgttagtggagggtttgtgcctgtcrcatcctgtatcctgcagtgcctggcacagagtaggtgctcattaagtgtttgttgaatgaatgacaaatccctccttcatccacacacctccctccctaccatgaagctgggtaagtacaggaaaagaatagacagtagcttcagggctggattatgtctcagtaatcttttgaatcataaaagaaaattagatttccacagtaaacctcagttccttccatctgcctcctaaattagaaaaataaacccaccatttgcttgggataaatataataatttgcttgggatatgcacttgtatcgtgcttgattacaaagcactttcacgtacaccatcttattctgaggcttatctcaagtttttgtgatagaytttgtccataggcaagggagagggagggagagtggccacccaggggcatagagttgacaagccccagaccattattttacccaggtctttgggagctgcaccagccagcactgatgaccactccagtcccagtgaagcagaaatgcgcttccattgttcttactggtcactctgccttttgaaagagggggatgagtgggctgttgttggcttgtcaaacacaataccagggatggccaactcaaatgccaacagcaacacaacccttaaatgagtgaggcagagttgaagcctgcttcatgracctgtcaatattttgataaggatgcaaagataaatttcattttcttctgcttttcctattaaaacaaacagaacaacaaaaacacatcaacacaaaagcctgcaagcataatgacacatagccccatgctggggcgggtgggggtggtctgtggcaaactggagtgggcatggcttgttgtggggtgttggggagacacctgctacacagctccccagttcaggtccatgtttacccagcagaaatgtgagcccaatggtaccaggccttccagtgtgattttgtgatgtcagtagcataaaatccatgcgtttttgttaaatatctttatttttaaatgttgagaattaacatttttttaaatcttaaacacatctataagtggaattttggctgcaacgttgtgttacacttcctacattatgtgcctttgaacctcatttcaactgtgaatttcttataattagtggaaagaaggaagaagaaggatgctcagtacacatttataaagcaccttttattaccacgcatagtactaggcattttggatacaacattaaagatagacttggtgggaggctgaggcaggaaaatcgcttaaagctgggaggtggaggttgccactgcactccagcccaggcaacagtgcaagactctgtctccaaaaaaaaaaaaaaaaaaaaaagatagacttggactttggacttggccactgttctcatagggtttgtaatctagtgaagtagaaaaacagtttgacaaataattaaaatgttgtatgctaagaggcacgagagagtgttcaggatgctttggaagcataaaagtgggacctggccagttctccacggggttggaggaattgttcattgaaagaagtgaaatttgagacctacagggatgagctcttcaggcagggaaggaacttatgggtgtcctaagcaaagggacagggtgtgtaaagttctggagatgagcatgaatgacacgttcagggaggtggaagacactcccttgactgtgccataaagtgatggtggctgtggccacagactaggctggagacggagccaggaaatgaagggccttatcagccacaggcaggagcttgggatttagggcagtgagaaggcatctggagattttttaaagattgacgtcatcagatgggtgctttcgaaagatctctggctgtaatatgaaaaacacttagtagggaattgtaatagtacatgttttccaggaagaaaaccctgagctgcttgagattcgagtgcagactgtgtactggaggatgctgtggggaatcgcatgaagcagtttgaaggaaggctgaactgccgtgcagttgccacagcaggtcctagaaggagctctggagctggatgagccttctgagttgttgtgcatggacacagagtggtcaggccttacatccctatgcatagaccaggttttcgatgtgggcttcccgcagaaggaagaaaggctttgggtgaagcagctttcttcagctgggggcacttcccgggtagagacttggcagagagctgtctgctgcggacatacccagcagcagggatatcagtcctggaggaggggtctggccagcctcacagcatctgctgtcgtctgccccttgcactgcctggagacatttgcttgtggaatgagagagactggagaaatgtacaaatggaaggttagcagggtaaactatatgtagctcatgctgccacagctggtcttgaagttgcagctgactcccattgacttccttctctcctactcattctagattcccctcrcccttagagaagacctctaggtggcttacctggtggggtgacacagacatcatccctgatgggtccaggctcctgggtgccattctaaagccatgactactgaatgatttgctatcaacattgggcaggggaggaccaagagatgccacagtgaaccacctgggtgccaaatgcattcttcccatttaaataccccattctataactgcagccctgcctgctcctgagagtcagttaccccttccaggatggcaactccctttctagcctgctaatcccttggcaatgcaacataaagtgaccagaactcttgctgtgttctctggcaaaagtactctcttgctggaagccagggcccctatatatgcaaggccaggttgcacagatggagagcataaactccaagtggaccactgggagtgagaagtggggccgtccctacttccaccccttgattcctgaaccattgcgttctacctgctggagacacaccctgcaccatggtagttgttgattcagagtgtaaatctcaccttagaggatagcgcccacatcacagtgcagctccagcggcatcgtgcaagcctggtccatccgtctcatcaggtcaacagcttctgggcagtaggatgtgtgacaggaccagtgttcccatgggtatgcacccactgggacacaatgcagtgccatgcagggtgccggcagcctgcagatgctagtgctggctgaggctctgttgccaagaaaggcaaacccacacccagaaaaggagtcacttcctgtcaagatggrgtgtcttcatcttccctggtgtcactgtgatccacmtgacacccactggccagttagttggtctcctcgaggagtggaggacacacaggactccgtgccgctctttgttgccggcaggttgaatgttggcggtgtggcagatggggggatgcccragctggggggcctggcagggcttcacctcaccaccacgcttcctccacacgggagtgccctggcccaggactgctgtggccagtggcggaggctggcagtggtccactggccggatccctccatctgcttgttgaagtgctctcctgtgagctctgccatgctgtgcaaacatgcggacatgtcctgcccctcccatgggtctgtccacgtgcctgctctgcagagctccttgtcttacctgtcctcagtcttccagattttctctgtccctgcccttaaagaggctgccaagacgtttgccactgcttaggagcttgtatctcttcctaactcaggactctttcctttccacacacagtccactgtcagctgctgcctcatctgtttgggctgctgtcactcaataccgtagactggctggcttataaacaacacacatttattccttccagttctggaggctcagaagtcaaagatgaatgcactagcagatttggggtctcatgagggaccactttttggtttgtagatgacgtcttctagctataccctcacatggtagaaggggcaagacagctctctggggcctcacaggatgagaggtgactggttaatgccctctctttataagggcactaatcccattccygagggctctgacttatgacccaatcaccttgcaaaggcctcacctcctaatcccaccgccttggtgattaggtttcgacataggaatctggggagacacaaacactcggaccatagcagttgcgttgcccaaggctctgcttattgacagggtctcccctcaccactctttcaaccctaaagaggattacaggatagcgacagtgcatttttggcttgcagccgtatgttaagctaactcaattgtgaaccaagcttggatccctcagtgtgtcataaggaatctccccagcccggccactaccaccgtggggccatggttgtgagcccaaggagaggcagtcatsccacggtgtggatggcacgggggtctgaggacctgcttgtgcagctcgctcacgccccgtgggcctgcttgggcctgggcctagatgccccacttctgtcttatgacaattgctgcacagatgctccaactccacagggctcggtagcgtgccaggggctctctttcaaatggtccatcgttctcagctgctgaacccccaaaatctttgctgggatgctcttattggcccgcaggtagccccacgtgacctcttttccctccacagacacctggaatccacagggtctgcctgcgtgcacagccgcagagacagggcgcttgcatgccgcctgaccctgccctttgctcctcggggccccactcagagcttccagcactttcttccaacagtgacaggctcctctttggccactggcgggagggattccagctctaactccattttagagtttgcttcctaggactatccaggcaccaagtgccacaggttataggttcccaggagaacaggctctgagacttgcaggcagggagtgtcttggggtgctctcaacagcaccttcaggaagagaaggaagcagggttgggcagaggtggagtcccactgcagtgcggttgccacagaagactgaggggagccagaggtaggaggctagaggtgagcccttcgcatccaccctccaccactgggcgtgagctgccctatcgccgtgatgtgacggtgtgacctcagtcccaaggtggtgggactgggagcagagcagagcaccccctaaaagggccaaaccagagacacaccaggcaccaggaatccggccagggaatacagaggaggggatgggcttgaggtcggatctgcagaacttggcagtggattagaagacaggatgagaggagacgggttaatgttgatgcatgaatgtctagcttagaacgatggtggtgccattggctggaagaggagacagaaacaaaagcaggttgttcggggagacacacattcattgtggacatctcagctaggggttcagtggggaaaggagtggatgcctagaccacctcagaggagaatccaggctggagccagcgatcaagatgcaagactgacaatctccaacgaactgccccttatccatgctccccacacccacacccaccccttcagagttacagtccaggagaggctaggaggtgcacctccctcagtggaggacactgaagcagcagtggctccagggagctgagatcttttttgatctattttgccccagcatctcaccgcagagccgtctctcagccattgactgccttcacacacaaatgcagtcccagtattgggagatgggtgtaatttattattcccggagatctagatccccggttatttgggagtgtattttctgaactgcttgttggtttaagtaaagcaggtttgatgccacttctcttgaatccatgaccctggacccgccgcctaagtggatgtgcagatgggatggaacggctgcgacagatctccattaaagccagcgcgtcgttcgggctcggccttgcgctgtgaaaagctgagtcagtgccaggacagcacccgcccctctgcagtgcgtttccaaggcactcagcttgtgtgcgaaggtttgctctggggcagcagaaatggcccttggcaggtcgtcaaaggcccggtttcatttcctcctcttccaggcaagttgctcaaaggctcacagccttttcgtcgcctgccacacagagccagtaagatctaccaagctataaataatgaaatgagtgtgtgtttcgccgtttgtaagttgcaaagtattacaaaatggtgaaacttgggggtttgggtttttaaggctgaatgctaaaactgtcaggcactgtggagagaggaaaggaaagataagattgactgggattgaaagacaagtgaaggcatgcttgcgtgggtacacacacagtgacaccacacgcctgcccctggaggccgatcctgaccatgcagacctggggctggggctctccaagcgctctcctgcactgcagaaacccttcttctcttctggactgtcactccagcacggcagagcaccaaggctctgcaacgcacttccctggggtgcagcttccggccaggggcgtcctccctctgcaggagcctcagcacccccggggggttccctccacccccaggagttctgccttgaggggcatggcctgcgggtcccctgagctcgctcacctgtgggggtcacggcctgcgggtcccctgagctcactcacctgtaggggtcacagcctgcgggtcccctgagtcttcctctgcacggccacagtgcagcctccaccagatgcctgcctggcctgacacatgggaccctcctctgaaaatgatgctgtcctgaaggcttttggattccagaggggtttcaggatcccagcagagttggtaaaaaaggtctgaatgtaaattctgaaccgactttgcaagtctataccctgtataccctgtgtactagactccataaacaagcagctagaacaagttcgcaatgtggaaaatatttttatagaaacttattgtcacagctacacaccacacacacacacacaccacacatatgtcacacatgccacacacataaacataacgcacacatcacacatacacaccacacatatataacacacatcacacatacacacacaccacacatacatcacacatgccacacacatacacacatacacacaccacacacatgcaccacacacccattacacacaccacacacacatcacacaccacacacatgcaccacacacccattacacacaccacacatacatcacacacaccacacacaccacacacccatcacacacaccacccatatgcaccacacacccatcacacacaccacacatatgcaccacacacacataaacatacacaccacatccacatacaccacacatacacaacacacacggcgcacacatatacataacatgcacaccatgcgttacacacacaacacacgcgcaccacatataccacacacacatacatacacaccacacacactgcacatacagcatacgcatatacacaacacacatacacacagaacacacaccacacacagatacataacactgcacacactcgccactcacatacacaccgcataccccacgggcatttggagctcctcaaaggaaagcgcccctggcaattctctgcacaccccactcagtatcaggagggaagcagctgcagtgcgcctctgatgcaccagatggcgctaaacccttaaggaaaatgctggatttgtccagaaacaaaaataaaatgacctgggggaaaagggagtgaacgccactttgaaaggcaccccagccacgcctgcatagtggcccagccgacaacaggcaagagggaatcgaaggactgtgtccccaggaggagcatttctgagaggtgtgcagatttgaaaagctaacagctggatcctggcccccataattccttcattaaaaacrgggctggcaggggggacaaaatattgtcactccacagaaaagcatgttgaccatgtgtgaggaaaacggttcacctgctctacacttgttccttgcaagcacagaggcatagcccgtttaaactcagcaccccgcaagcacagaggtgtagcccatttaactcatcacccctgcaagcacagaggcatggccatttaactcatcacccctgcaaagcacagaggtatagcacatttaaactcagcacccctgcaaacacagaggcatagctcgtttaaactcagcacccctgtaagcacagaggcatagcccatttaggctcagcactgctgttctccagggttgcatttaccttctttcagcaaggactaggtgttcccacccgtgtctgaggaatccaagacaagcagagggggcttgaagtcaaacagatctagtcttaaacatgagtttcagcctagctgtgatgggtaattttctgtgtcaatgtagctgggccacacagcccagttgttggaaccagcagtagtcaaggtgtcgctgtgaaggtatttttgtagacgtggttaacatctatactcagttaactttgaggtcaaggagatgaccctctataatgtgggtgggcctcacccagtccatggaaggcctgacgagcaaagacctcggtttcccagagaagagaaaaattctgccctaccgagtgtggtggttcacaccggcagccccacactttgggaggccagggtgggaggatcacttgaagctaagaattcgaaaccagcctgggcaacaaagtgagaccccatctctacaaaaaatattttttaaagatcagcagaggacagaagcatgtgcctgtagtcccagctactcgagagcccaggatttccaggctagagtgagctatgatcttgccacagcactccagcctgggcaacagagtgagaccctgtctcaaaaaaaaaaaaaaaaaaaaaawagggtctctctgtctttgttgaccacagtgtatgtagaccttctgcgagcagtagttctccgaagctctgcaggctagcgacatcggcatcacctaggaatttgttgaactgccagtccttgagcgcaatcccagacctatggattcagacccagaggggtagtgggggagccacagcacaagcgcttccggtgccgctggtctgagagccgccgttctgctaatggggaagctccacaaggcagggattgttggcttgctatttgtcatctctcttgtttactgggatgtatccccagggtccaggacagtgcctggcacatcttagacacccaacacatgtttcttgaatgaaaatatttctgcattcactctagcaaaaataatagtctactttgtgccagaataactatactttgcacaaaaggtaggctctgtggtcggctttgacccctctcacatcctattagtgatgattccgcattcagaatcccatctatgtggataattttggtcactgctgacctaagccaaccamaaactagagaatgtcattatcaaaaatacaaatcagcatattttctagctcaagtgtagatttttcccatatgtcaacttgtaacaatagttgaacacaaagcacttttaaaataaccaataaatggtacctattaataattctgctacttaatatttatgttgttccatttcccccattaatctcaaaataggttgatagatattattttaattcacttcccctttaggaagcatttagggccccatggggcaagactctgtaagatctcgtctgtggcacttggcacacattccactcctagcagaaatcaccactgttagaatcattgtcaaaaatgcccttctgggccaggcatggtggctcatgcctgtaatcccagcactttgggaggccgaggcaggcagatcacctgaggtcaagaattcgagatcagcctggccaaagtgatgaaatcccatctctactaaaaatacaaaaattagcgaggtggggtggtgcatgcctgtaatcccagctactcaggaggctgaggcatgagaatcgcttgaacccaggaggtggaggttgtagtgagccgagattgtgtcattgcactccagcctaggtgacagagcaaaactccgtctcaaaaatagataaataaataaaaacaaatgcccttctgaattgcattctaaagcatggcttggggagtttggagcttagtggagtagccttgtattgcttacagtgtagccttgtattccccggagcccttggctagacaccccattaaatcccaacactctgatgatttctcttaaaaaaaataacaaaataggccgggcgcagtggctcacacctgtaatccaagcactttgggagacggaggcgggcagatcacctgaggtcaggagttcaaaactagcctggccaacatggtgaaactccgtctcctccctcagcctcccaagtagccgggtgtggtagcaggcacctgtaaccccagctacttgagaggccgaggcagcagaatcatttgaacccaggaggtggaggttgcagtgagcggagatttcaccattgcactccagcctgggcaacaggagcgaaacaacgtctcaaaaaaaaaaataacaaaatacatttaaatatatacatatatacatattctccaaaaagagatagtcataagacaatgtgagaacaacaaaacatgttttggtgacacccgttgccaagcagtaacgttgactagctcaaggcccctgaaaagtgatgccattttcttactcaccagcaggaggcgggctgctcacacgcagcagtgctcaactggcccacctgcttgactgagccaggaaggctgctgtctgcaaaggtggaaggtttcagtgtttgtgagaagagaggcgagcgttgatgagaaagctgacatttaaaagctgtcattcacctgaaagcattcatagctgaattaagccaactctgttttcatgattaatgacaactgctcttttttggaaaacaggcttaaatggatttttaggattagaatagacttgtctaattattggctacacaggtgtcacaaatgagtttctcttaaagcaggaaagataacacatatgcagttccttaagttattctagcttcaatgtatatcaatgtgtctcctaggygctaattcggcttttttttttttttttttttgacacagagtcttgctctgtcgcccaggctggagtgcagtggcgcgatctcggctcactgcaagctctgcctcccaggttcacgtcattctcccatctcagcctcccaagtaggtgggactacaggtgcctgccaccacgcccggctaattttttttttttttttttgtattttgagtagagatggggtttcatcgtgttagccaggatggtttgatctgacctcgtgatccacccgcctcggcctcccaaagtgctgggattacaggtgtgagccaccgtgcccagcctaattcagcttttaaaacctatataagtacattttgatttaccagtggagttttgtgtgtgtgtgtgtgtttatagagacagggtctcattatattgaccagtctggccttgaactcctagactcaagtgttcctcctgcctcggcctcccatacttgtgtttttaaaggagatttaaggccaatccaggccttcagtggtcttttccatgtgtacaaactcccacagggtcatattcccatctctttagagatgatcrtgatgattacaataacaaagtaataatggtggtgatcatagaaaacacacggttagcattcagggtgcacctggctctgtgctaagccgtttgtgtgttgatcttactcacgatgacccttgtgaggttattcctcttgagccacagatggacgatcatgcctttacctttctgagggaattttgattctctctgtctctctctatatgtatatgaaatatatttcctataatcatatgaaatatatatatgaaacatctatatataagtatattatagatgtttcatatatatatttatgaaatygctattttcagccatgaagtatattaggagagagacttgtcctgttccacccccacctccaccacgcgtgcgtacacacatgcatgcatgcaattcctcctgccacgggtgagcagtagacaggcacagaattctatgcaattacctaacagttacactgccccgtgagagccacactttattgcacaatcgggcggtgatgctgaatcacaacaaaaccttcccctcctggcaacacaataagcaggcattgctttagagcttgatgactaaggcgggaacagagggtaagttacccagctcaccatgttcctcttcaggcgcaaagggagaatcgccctccagaggatgaatggttcccaaacctcccgcccctcgcaaccccttagggcatttttagggattctaatttctgtaccccgccacagacctactgaatcccaatctccagagtctggacacaagccttgggatcatttttagaatcgctttggtgatcttgaacctgtgggcacccagccactgcttgagatcactccagaaggatttaaacatcagcattaagacactcatgaaggatgcaaagcaaagatgtgctcctcctggtagaaatcccctctcggaagtggcagtcaaaggtctaaaccagtggcctgggcaccgcccactcccrgggtgtcatagagctgcttctcctgccccccaggtccctggggctggcagcagtggcagcagtcactgggtctgggactcccctccctccccgtggatccgctgggtgaggataggaagcacaggaagagctgtgatgctgagaagggcaggaactccaagggccttcttggtgaccctttcccacatgttaggtgcagtgggacagttggagacaatgacaaagaaagggcatgagctttggcagccgtggcctcctggtgtccttcttgaaagcactttcggcaggttggggaagggagaaccggccaggcagcagcgatggcccagggcagaagggcgggtgggcagctgggagtggagttgcagtgctggtgccaggggaagcaggcaagtggagggcaggtgagccactgcagtgaggggaggggggctgggtggcttctcccactgtctttaccacaagctgggtgctggtggtggtggtagttgctttcgttgttgttgttttgagacagattcttgccctgtcgcctagtctggattgcagtggcaccagctcggctcggtgcaatctccaccttctggattcaagtgattctcatgcctcaacctcctgagtagctgggactatatgtgtgcgccaccaggcccagcwtatatatatatatatatatatatatcaagactgaggttgctatatatatacacaaatatatatacaaatatatatacaaatatatataaatatatatacaaatatatataaatatatataaatatatacatatatataaatattatatgtatttttagtagagacagggtttcaccatgtttcgcaggctggtcttgaactcctgaccgtcgcactggcctcccagagtgctgggattacaggtgtgagccactgcgcctggccacaagctgtttgaaaactgtgctctcaaaagtccccggggacttccagatctccatgacagcatcttagccttagtcccttagccctctttgtagcatgtgacttgataatgacaggaagaaatcaaggctgcaggggcctggagtatgaacccaggcagctcggggctccgattctgaaccgactgctcgcaggccaggcggcctgggtctgaagttatttagttttctgagactgatctctccagctgaaatagttaatgacaagctccgtccttcagggatgcgcagttactacattctgtgatgtgggcagagcccctgccgcacagtgcccttcctcatgtaacagaagcgtccttacttcttcaaagccttcccctcctgggcagcagggtcycggacccgccggccgcccctccctctaacaccctgcagctgtcccagcgccatgcctacacagctctgtgttagcccgtgccgaggtctgagtcatcagattaatgggaaaatcagcacaagtagcgtttgaggaacagaatgccatgtcgttcattgggaaaggaatgctgaactttgacttctaagttagataacagaactgcttcatgccctatggaggaataaaaccataacctttgagcacatactgtctaccagaaaaaaaaaaaaaagaaaagacacatcttattagttttctacaccgtaacccctaactctccaatcaaggccaagatctgcctgggcccttgacagtcccaggaggtcagcgtgaaccccacccccactgcaaaagaaagtgggtagctgtcctgccggctaaaacaccctcccctagcttggtactgttaaaacttcagacacggccgggcgcggtggctcacgcctgtaatcccagcactttgggaggccgaggcgggtggatcacaaggtcaggagatcgagaccatcccggctaacatggtgaaaccccgtctctactaaaaattagccgggcgtggtggcgggcgcctgtagtcccagctactcgggaggctgaggcaggagaatggcgtgaacccgggaggcggagcttgcagtgagccgagatcacgccactgcagtccagcctgggcgacagagccacactctgtctcaaaaaaaaaaaaaaaaaaaaaaaaaaggaaacaaaaaaaccccaaaaaacttcagacacattaaatctagcagagtttaattgagcaagaaaaaaaacaaaaaagcgattcgtaaattgggtagccttcacaattacagcagattcagagagactccaagggtgcctcggggtcagaacaaatttatagacaaaaagggaagtgatggacagaaatcggaagtcaggtacagaaacacccgggctggttacaagttggtgtcggcctcatttgaacacagtttgaacactcagcagtgtatgagtggctgaagcatggctgctgggattggccaagacccagctgttgttacagttgcatactctagagttagactttcaatcttgtctacatattaagtcagacacactcctaagttgggttttcaatcttggctaagttcgaccacaaggactcaaatacagaagtacggagtccttcttaggccatacttagtttgctttaacagtattaaaaaccattttgcgacatcagcattttggtcttttcctagggtttggggtattttctcttccctaggctttcttctctgtctctgaccttcagtgtgggcatctccatgagggggtccttgactccttggctcacgtgtgcctcggcccctcagcagctctggtgtcctgtggacatgagggtgcctcttaacccacgctgctgcccatggcttacaggaaccaaagctcagcccaggaagcctcaacctcaggctctagatctggggaggtctctcttcctgcaaactgctggcatctcactgcatcttctcacagtggaagaggcaagagagctctctggggttgctttaataagggcacgaatcccttcataagagctccaccctcatgacctaatcacctcccaaaggccccaccttccagtagcatcaccttggtgggtaggatttcaacatatcgatccggggaagaagtaacattggcccagttgcagagtctgtgaaggaaatgataagggtacatatccttgcaggtgaaaacagaaattgctgctctcaattttccctcttccagtctaaggatcaaaccctcctagctacctccctctcccctgagtgaactggcccatccagtagctcagtgcacactagtgtggaaatgtttacacgggtagtcttttgtaatcactcctaggtattaaacttgcagtgtcctgatttgaaggacgcttgctgctggaggtgttacatccagagccgtttggggaaatcctagtggctttctggtgggcctgcaagttatacccactctgccttgtgtgctcgggggatcggaagtcagagaaaattggtattttgaaaagtaattatttctcttcttttgctrtaactttaatctttcttcctggacagaacaaagcatattaatataaatttgcaattttccagtttgtaattcctctccagtaatgtgctattgacaggcaggaggtttcttcaagttgagctctgaatctttctcttgggctgagtataacatcctttgttagaataaacattgtattcgcccagttgaaaatgctcttaacttggcaacatgtaacaaaggctttaggtgtgcacacacctgagccagaaacttcagcccctgagtgctcctcttgcagacaaggcctcccagataagtgctaagactctagagtttagcaagacctgccctcaatgataatctgtccacacgggttgggagtgctgggatatttgcagtcatttctgccattttattttatactttctattacattctacatttctatagttttacttcttgcctttcttttgactcttttgtttgccatttccactgtatttttccttgtttagaagcaaattgctttctcttgtattgattaccctagaatgtaaacatatattaatgtaaaaaaatctaaggaccctctgcctgaatcatgccagcacattagaatcatccaattctcacacttctgtgctattcttgtccggcatctagttctactctgattttttttttttttgagacaaagtctcactccgttgcccaggctggagtgtactggcaccatctcggctcactgcaacctccacctcccaggttcaagcaattctcctgcctcagcctttcgagtagtgtrggcaccacacccagctactttttgtatttttagtagagacggtttcgctgtgttggccaggctgatcttgaactcctgacctcagatgatccacccgccttggcctcgcaaagtgctaggattacaggcgtgagccaccacacacagcctacttggattttttttttttaaccagcaaattaagcatcgtttacagttttagacaatcagtatttcctgtgatttaccatacgttacccattttctttttcttttctcacagtttcttcttgcagctcctggctccttctggacttttcctatttccatgtttcttttttttttttttttttttttttttgcggggcgggtggtggcagatggagtctcgttctgttgcccaggctggagtgtagtggtatgatctcggctcactgcaacctccgcctcccggttcaaatgattctcctgcctcagcctcctgagtagctgggactacaggcacccaccaccgcgcccagctaatttttgtatttttagtagagacggggtttcaccatgttggtcaggacggtctcaaactcctgacttggtgatctgcctgycttggcctcccacatccatgtttgtttgtttgttttcttttcttttttttttttttttttgagacggagtctccctctgctgcccaggctggagtgcagtggcgtgatctcggctcactgcaagctcagcctcccgggttcacgccattcttctgcctcagcctcctgagtagctgggactacaggcgcccaccaccatgcccagctaattttttgtaattttttgtatttttagtagagatggggtttcagcatgttagccaggatggtctcaatctcctgacctcatgatccgcctgccttggcctcccaaagtgcttggattacaggcgtgaaccaccacatccggccccaaatcatgtttctttaatgaacttctgttgatgggaaatgctgttttttattactgtgtttttatttatgctcattcttaaaaattaattttgcttggatagaattctaagtgggctggtattttctgtcagtgctttgaagataccatcactgtctgccagcacccatgcattaagaaatcagctggggggaataattgtaacttctttgtagataatttgtgtgtttttttgccactctctccaaacactgtttctctctcatgctctttgttatctccttccagaactctacttagaaaaacactggaccttctcaccttatccccccatctcttaatctccttttcatattttttacttcttggcattttatgtaatttcttcagctccatctttcagttcacaaattctctcttcatttgtatctaatttgttatgtaactcatcaactgagtttctaattttaattattagtgtttcatgtccagaaaaatggacaaaacaaagaaatttgtttcttttttacatctccctggttaattgtgacagtctcttattccattatcatcacctttatttatttatttaaatataacaaacatatttagtttatactcagttaagtttttttgagacagagtcccactccatcaccgggactggaatgcagtggcaaaatctcggctcactgcaacctctgccccccaggttcaggtacttctcctgcctcagcctcccaagtacctgggactacaggtgcacaccaccacgcttggctaatcgttgtgtttttagcagagacgaggtttcaccatgttggccaggctggtcttgaacacccggcctcaagtgatccacctgcctcagcctcccaaagtgctgggattacaggtgtgagccaccatgcctggccagtactctgtctctggccattccaatatctacaacctttgctggttagattctgtagtttctgtaattctgtgactttcactcatgtagctagttttctcctgtattaggtgactttttaacttttttattatgatcccagatttcttagaattttatttgtgtaatttccttgaggtttggctttttaaagtgctgtgctccacaaaagatatttttgcttccgcctggttccagggtatatgccaatctggtaatatttcaaattaatttttgacttgaggttttttaaagctaatcagataggatgaattcttttcaccaaccctcgtgtccgaggcctgatggttaggaatgttcagaaaaatgttttccaaacctgctgcctcacagaacccagcctgagaccagcacatatctgtcaattatctcttcagggcgggcttttgccctggcttcctccactgagaacgtcaccctcaggagtccaggtcctctgtgtgtagtaaaactggattccacctcccacctggctctggctggaggctttgtctcctgcctgtgcccttagggcctgggaagacccagatgatgggcagcgcgggactaagaagatagccccacagcaaatgccaggttccttcctcccgaaccaggaggatttgctgtctttaagggtttcctttgccttcccaccctatcagccgtacgtttaaaaaagatttttttccatatttgatccagcatttttaggtgtgtggacctgggagaaattgcccttcacatgcagtatgccatgttgctaaaaaatggcattttgaaattattttctgataagtaaaattgtatttttctccaatttgtatgacttaccaacttgccaccaacaagcaatctaaaccattgctgcagagctacagagccctagacctgaaaaagaacagcgtggaacatgaggccggggtggcgttggggtgcaggtcggtggggggatgggtgtttgccacgtgtcactgacggttaggaccacccaagactctgtggtgactggaagrcgtgccatgaagatgcatacctagttaccaagttgtgaaatggccctcactaaccacagcgccctcactgggcctctgccgtgagtggatcttagcaaaggaagcactcattgacctaccgttgcctccgagcagctgactccacgttattctagcaaagtattcacaaatcacgtgacaccctggcagttctcaagggtgtttcctttgtgcccatgatggctcattaacagaaacgaaattggcttcacccagtgaccagccctaggcaaagcttgtctgtggtgcccccaccactgtcagggataccacccatgtgccctgcccatttcayggggtcctattttggatgtttggtaacccctgaaagtttagtggtaacccctgaaagtttggtaacccctgaaatttggtaacccctgaaagtttagtgccttcctgggctgcgtcattcattcattcacttgcctgaaatgtactgatcgcctgctgtgtaccagattctatgccagaaactggggatatgaggatgtctcaaatgtgatcttggctctggaagaattgactttccacagaaataacagaaacatgaacactaattcctaaagaaactattaaatgcagtacagttattttcctcataatacttcatctataaagactcaaaaactttaacatttcaaaaaggcttggaattcgaaagtgaaatgacaaagtttggattcatgtttttggtgatgctgcatcttatctggggataatcagcgaatggctggtccttaaggtcacagatgtcaagcacagctagcccaggacctcttgcttccacccccaccagaaaacctccttatacatgatggtgcaggcagcacccagctctcggtgacatgaataatgtcagcaaatgtattaaaagcttgccacactggagtcattctgagtctttgaagaaattaactcatagaatcctccatacccccaatgcacaaggtgtttcatctgagagataaagactgtcagagagcttagggaatgtttccagagtcacccgtctgggtagagctgggatttgaaccagacagctggttccagggccacagtcttcactcacagctcccactgccctctctggcacatcgacttcatttcctgttcttgctcctgtcccttctgtgacaacatttggagttccccatttgccaggtgcaaggaaggataacaagatgtagagcaaagtttaaaagcaaagattccagagtcacactgatactcccacttaccagctttgggccatgttttcacccatcgaatcctcaatgtggaataaaaactagatcctcacttcacatctgatgaagtgtctaatgagaagtgtatttgagcattgatcaccttgcctgcattttaagcacctgataggtgttatttattacaattatgcaaaacaacagaatagaggagctcacactacaaaaccaaacaatctcttccccgctcctacgcatacgccacatgccagggagagtgtccccatcygcctagtagctgtctagcatttgtcaagtgcattgatatttaggcttcttgcccgaaggcactcctgtcttcaagaatttcctgtaccgacgtacagggaacataaactctgatcccagtaatagaaagctgagattaaacgcctttcctctttgtttccccaggcctacagagtcgatgaaagagccgccgagcaggctcgttgggaagcagcctccaaagaaaccatcaagaaaaccamcaagccctgtccccgctgccatgtaccagtggaaaaaaatggtgagtctgtgctgagcagagaatgaggatgtcgtgtgctctttgggggagaatcatacccatcagggattccaggattaaaggagatgctgtctgaaggtgcctggtgtgttgggtaacccctcgattaatgttacccattatcactattattattgtttttgttacacagaaatatttaatgagtgagtagttccatggctatgtgaggcacacagttagcatttatgtggttggaaagggaataaatatagaaactagaaccaagatatggaaagtggttgaggataagtggcagtcaggaggcagctgtggtttttctgtcctccctggtgaccttccccagcgctgatggctgcaccgtatgaccctgttgtctgccggccgtcagtctgtagccttccccagctttgcaacattattcaaaattaaaccctcgtctatatttaaagatccctgtggcctgcccctgatgactcacagtaccagtgggggacttcctgctgtctatcctggacatgccactcagggcaaagccatcacaaccagtggtccgagagccctttctcaatgtgatgcacttgtacgtgtgcaaggcagagtcagcggcaccatcacagatgagcaatgacacgaagccaggcgcagcctctcccagcttctccttaatgagcatcagctacgccctggctggcaggttgcccagagctgacttgcgggagggaagcccggccatcccaggatgggcactcaagcctctctcttttcagttatgtccttcaggaagttttcattaatacaaacaagacggtgcttgaacacatcccagagccgcaggtgctggcttagctcagtacaagtccttagtgctgtatcagtggcttcctgcagagaaaataaataatttacccagcgtgtccttattactccattgcatgcagcagtgctcctagaaaatgaagggattggcatgcayctataaagagcagaaggcggccgggcgcggtggctcacgcctgtaatcccagcactttgggaggckgaggcgggtggatcacaaggtcaggaggtcgagaccatcctggctaacacagtgaaaccccgtctctactaaaaatacaaaaaattagccgggtgtggtggcgggcgcctgtagtcccagctactctggaggctgaggcaggagaatggtgtgaacccgggaggcagagcttgcagtgagccgagattgcaccactgcactccagcctgggcgacagagtgagactccatctcaaaaaaaaaaaaaaaaaaaaaaaagagcagaaggcactgatgggatggaaggaaagagcttctctagtctccaccaccactgggtgcactgggaagtgggagggaaagaacacggaagggcccttcccaggagaagatatgtgatggtttgggataaacaggcctggtatttcgctgacaagggtgtaaagcacagagattagacagtcttgatctgtagcccaggctggggtgcaatggcgtaatctcggttcactgcaacctccacctcccgagttcaagagattctcctgcctcagcttcccaagtagctgggactacaggtgtacgcaacacacccagctaatttttatattttttagtagagacgggatttcactatatgtcggccaggctggtctcgaactcctgacctcaggtgatctacccgccttggcctcccaaagccaagctgggattacgggtgtgagccactgtgcccggccttaatttttgtttgttttgttttttaataataattctcaaggttggtgaggacatcataagttagcgtaacttttctggaaaccactttggcaatacctatataaagactttatattatttgacccaataattctacctttgaaaatctatcctaaaggactaacctgaaatatataataggcaaacacacccacacccccacacacattttaggaaaaarggtgccaactgcagcattatttatattagcgtaaactgaaaatcatcgaagtgtctaaaggcctcagtatgagaaagattggtttattttgtgataaatcggtggtaaagcttcacacagcccggcactgcagtgttgcaggagttaggactctgccatggactgtggctgtgtgagcaccagtttgctcgttcataagatgggtttcaatgggacttcctcacagcatgggcaggaggagtaacagagacggtgcatcaaacacgctccgtgagacgtgctctgattcgtgtggatgaaggttatgaaggcatggcggaaaggtttacatccatcctcagtgagaaatcagaatttcaaagcaagtggcacatatgtctgttttgaaacaaatgtgtgtgtgggaaaaaatagaatcagaagaaaaagactggaaacaagatgttaccatgtcatagtgagtagctctaggcataacaggaccaaagaggactttatttctttttatgcttttctgtaataaacatgtgtgacgtataaccttagaaaattagtaaaaatcagccaggtctctgtctgcagtggggagggaaaggggatccttaaacacccacccatgttcccacttctggcaggcgtcacaggcacggcaggtggagaatttacccagcaggtctggggtccatgccttagtggcctcctcggtagcccagactctggtggtggcagtttgcaagataagaagtggtcagcgaggctgggagtggtggctcacaccggtaatcccagcactttgggaggccaaggcaggcggatcacctgaggtcaggagttcgagaccagcctggccaacatggcgaaaccccgtctccactaaaaatagaaaagttagctgggcatggtggtacatgcctgtagtcccaactgcttgggaacctgaggcaggagaattacttgaacctgggaggcggaatttgcagtgagctgagatcatgccattgcactccagcctgagtgacagagcaagactctgtctcaaaaaaaaaaaaaaaaaaaaaggaagtggtcagcgaacctggacctgttgctttctgtttctctcctccgtggttgtttggttcagcacttactgtcggcttgtggggacacctgagacacttcacctttgtgacacataacatacagcccagtcttgtggccttaaatactatccacatactgatggctcccaaatctacaccccaccctcatctcgcccctcggtccgactccaatagccagctgcttccttagtgtctccactgattgttcaatggacagctcaaatttcacaaagcagagtgctagctgctcctagaaaaccttttcctctagggtgcaccccacctcagtcaacagcaccgcccagttcctcaagccgctaagctaaagctcatccttcattccatgctcttcctcaccctgcattcaatccccggtcaccacggccttccccgtgctctgatccagcgtctgcccacctctgactccacgtccccagccagtgccctgcttgcccgcctcctcttccaagcacagcttcccaaaagggctctcgcctccactctcgcatatttatgatccgtcctctacatagacgtgtagacttctcaaaggccatgtcagtcctgcccttccccccgggggtccccactgacattgcaaccacacagtcccgctcctctccccaggacgcttctgtgtcgtcactgcccatggctggctccttcctgtccttcagatcttaccccagctgacctcttctcagtcagaccgccccttaccaccctgccaaagacccctgccctcctgttggggggcactgtcaacaccatcccatctctcgagggggaggcactgccattccctctgcagggggcctgcctgtggatggccttgagccctctgggaaatcacctctgccaagacaattagttctggctccctccccttccccggagagctcatgtcccatgactactggttggtcataatacccaacccactaacgaaattcaggaccaccctgagagctgccccatccccagagctcctggrcgtcagctcaggcctcttaggctgtgcccgagctgggcttctcctctgcccagtctgccctcctccctttccatctcagtgtctgcttccccctttacccaacgagtcccacccaccagtttaataataatttcatagcaccacttccttcccagatcattgcttaatttgttcatttacatgttccccatctgtcgctctttagaacataagccggtgagatcagggaccttgaccgtctaggctccaatcccagaagagagcccggacaaaaaatatttgctgaattaaaacttagcttgtaggccgggcgtggtgactcacgcctgtaatcccagcactttgggaggccgaggctggcagatcgcttgagttcaagaattcaggaccagcctgactaacatggtgaaaccctgtctctagtaaaaatacaaaaaaaaaatagctaggtgtggtggcaggcacctgtgatcccagctactcgggaggccgagacacaagaattggttgaacccaggaggtggaggttgcagtgagccaagattgcaccattgcacttcggcctgggtgacacagtgagactccgtctcaaaaagaataaataaaacacaaacacacaaaaacttagcttgtaaagtttagagatatacacataaaccgatctttttaataaaataacatagaggaagcaagctatcagggcacacagacccggaggaggaggcttcctggaagagatgataccagccaagaattgaagaatgagcagatatgagcaaggcaaggaagagcaggaggaggcgtcctaggccccaggactgcatgagcaaagacaccrggtgtgcgcgcgccggtgtgcggaggcagcccctgctgctcgtgttccaggcaccgcacgcaggagcctcagctgaagcagtaggtaggatgcagaattgaggtccctgaatggcaggtttggggcttggacttgatcctgtgaggcaggcagatattctaggatgagaagcaggaaaattattcatcggatctgccctggactcagaacatgctggcagcctccaaagatggagttgtaggagtcaaatggttcgtgactgtaggaaagtttctccctgtcgggctatttcttggaaatattgtgatgtactataaatgaaagcactaattttttacctccaaatttttaacttacaaacagaaaagctgagacttgaagcttattagcgatggcctaaactgtttaaaagtgcatcactgtaaccgaaaccgacatagcctctatgaccaaggatgttacctggttgtcaccaaggttcgtggcctgttacatactcagctgtgtttcaggaatgcccttcctccctcagagaagctgaaatgagaatgcgaggaatttccattttaagcacaggctaaaccctggtactttctcctataatccactccagtctccagaaatttcttcacttccatctcaagcagatgaaattctggctccattccctgactgagtgtgtgcttctcctcaaatgtgccttcaggttgttcagggacttccacgctctcattaaatctagtggaagaattgctggccggagccacgatgtcgactgcccggcgtaggctgagcttttcatggtttgagtgtccatctgcagacagaactcactacaaaggaagccatattcccttcatgtctatatccacaaatctgcgtgaagtttcagctgcttcctggatgcacttacttttaagctggcaaagcttttagaattgcggtcctccatgctcctccatggcctgggtctagctctatggccttgtgtatattaagccctagggagaaaagaaagctaatgacgtgaatatcttctcttcccatttccattcttactgtaccaggccattgtaattctagcttctgtaccaagatatcatttacaatgctagtatcccagattcattaaatgcttggtattaatttttggcattcggtctaagtgtagaacaaacaacatgcttcttctattctctcattcaataacaacagtcagcacagaagacttctgtgacggaatgtgcgggggtttttccccacgcaccaagcaagcaatcagttctgcagtggacaccggctgagtgtcctgctcttcaaccctggcgctgtctaccaggaaatagtgtctgatccctcaggctgggggctcagtcccacaggactgccactcaccggtctcaagtctgggcttccggaagttctgatcgactggcttcaagttgagattcccatgactccctctttgggttctgttatttgctacagtggctcacagaactcagggaaacacatttaccagtttattataaaggatattacaaaagatacagatgaagagatgcagagggcgaggtatgggggaagggtcgcggagcttccaagccttccctgggtgctccgcccatcagaaacctccatgtgttcagcaacctggaagctccccaaaccctgtcctctggggccctctatggagacttcctgggataggcacgatggaagcatggacagccgtgttgaaatgcggtgggacagaaaggctttgatctcacgctaaaagatggagtggggagaccctgcaaggcctgccggtctagattcttcttggcctccctgtgcagcattccttcctccaggggatggacaggactctttctgaaatccgggtcttataacccacagtcagaacagctgcggatggttccagtcctgccctgggctggtaaaaggagggcaaggaaaggtcggagggagagattctcttttctggcgcctgtttctgaggcctgaattgccccaacattatgacaaaagactgtaacaagagctatgggagttataagccagggactgtgtatgaaaaacacatctatcagccaggcgcggtggctcatgcctgtaatcccagcactttgggaggccaaggcaggcagatcacgaggtcaggagtttgagaccagcctggtcaacatggtgaaaccccgtctctactaaaaatacaaaatttagccaggcgtggtggcaggtgcctgtaattccaactactcgagaggctgaggcaggagaattgcttgaacccgggaggcagaggtggcagtgagcccagatcgcgccctgtactccagcctgggcgacagagcgagactccatctcaaaaaaataaaataaaataaaataaaatatatatatatatatacacacacacacacacacacacacacacactcttcatacatatttgtgtttatatatgcttatatatattaaatatcacaataggaaagtttcttaccctttcatttagaattgctttaatagttcattaagttttaatgtattgctcaataattttgattgaatatattttacgatacatgatataataatgatatatttatgatatgataaaatatttatgatattttagagaaacaagtggttttataatgtcacaccatataacatattatttacatcataaatatacaaccatgcaatatgtgctgaaaatggcacaaacctaagtggaaagtatgaagataaaagtgttgtaagttttctcctttattttccacagatctgtaatttatgatctttaaaacaagccagaaaggattaggaaaacaggagattttgcatgtcggcaagttatcttaaaacaaatgcctattcctatatattcataaatattttaaattagtgaaagttctcatgccaggtttctaataataaaagtgagacagcacygaaccaattacttggaaaatttggcaggaaaaatcaattaacaagataattggtaagagtgagtaatggagcaccttcaacgctaggtgggattcaagcaaagaaactgcgtttgccggggttttccaggaaatttggacagaaacagttctctgtacatcctcatacaaatcacttcctcctcccttcagttcccccacagcgactgaagcagggctgtgtgcactccagaaactcatggagtctatgtttaacaagtgagggaggtgaataattccaaaataagtyccaagataagggacttttcctcttatgctgaaaataacctgttctgtgaawgacaggacattggaatcacacagaccttggtgagatcattgtcttcaccatttaaaagtgcttcaccttggggaaattctatagcagagtgatgctcttatctcaaagtgctttgggaagcaaatgagataatatacatagaacacctagcattattaattacttcctttctatccctctcatcttaattaaaattttggatagcattaaggaacatattccctattaaaaataatatgctggctgggtgcggtagctcacgcctgtaatcccagcactttgggaggccgaggcgggaggatgacttgaggtcaggagttygagaccagcctggccaacatggcaaaaccctgtctctacgaaaaattcaaaaattagctgggcatgttggtgggcgcctgtaatcccagctactcgggaggctgaggccagagaatcacttgaacctgggaggtgggggttgcagtgagccaagatctcgccactgcactccagcctggacgacaagagcaaaactccatctcaaaaaaaaaaatagaaataataataattacaatatgctatcccagttcctgttttatgaatttggccaagccaagtaagtggcactatagaaagagcaaaaataaatcaaaatatatttaaattattatacattatattaggttatatcatcaaattttatcaatatatttaaatataaatatatttatatatattttaaatataaatatataaaaatatatttatatatattttaaatataaatatataaaaatatatttatatatattttaaatataaatataaaaaatatatttatatatattttaaatataaatatataaaatatatttatatatattttaaatataaatatataaaatatatttatatatattttaaatataaatatataaaatatatttatatatattttaaatataaatatataaaatatatttatatatattttaaatataaatatataaaaatatatatattttaaatataaatatataaaaatatatatattttaaatataaatatataaaaatatatatattttaaatataaatatataaaaatatatatattttaaatataaatatataaaaatatatatattttaaatataaatatataaaaatatatatattttaaatataaatatataaaaatatatatattttaaatataaatatataaaaatatatatattttaaatataaatatataaaaatatatatattttaaatataaatatataaaaatatatttatatattttaaatataaatatattaatatttgaatatatttaaatgaggaattgacccctatctatgaaacatgaagtgtttgtctctaaatcccctttcaggagaataaagtcagatttacaaataaaatttgttcccgacaaaagtgacatgcttcaatttcattcatttcttaatgaatatcatcactttagagctgccctrttgtgctttatgaagtttttcccctcagttaagtttctctctgcccttgtrttgcttgtgattattcgctcagaaagtgatgtctaggctagcgtgctggtttgggaatgcgtgttttccaggtacttgctgcgaacccaccacacctttgttttctgcccccaacaggaggctgcatgcacatgaagtgtccgcagccccagtgcaggctcgagtggtgctggaactgtggctgcgagtrgaaccgcgtctgcatgggggaccactggttcgacgtgtagccagggcggccgggcrccccatcgccacatcctgggggagcatacccagtgtctaccttcattttctaattctcttttcaaacacacacacacrcgcgcgcgcgcgcacacacactcttcaagtttttttcaaagtccaactacagccaaattgcagaagaaactcctggatccctttcactatgtccatgaaaaacagcagagtaaaattacagaagaagctcctgaatccctttcagtttgtccacacaagacagcagagccatctgcgacaccaccaacaggcgttctcagcctccggatgacacaaataccagagcacagattcaagtgcaatccatgtatctgtatgggtcattctcacctgaattcgagacaggcagaatcagtagctggagagagagttctcacatttaatatcctgccttttaccttcagtaaacaccatgaagatgccattgacaaggtgtttctctgtaaaatgaactgcagtgggttctccaaactagattcatggctttaacagtaatgttcttatttaaattttcagaaagcatctattcccaaagaaccccaggcaatagtcaaaaacatttgtttatccttaagaattccatctatataaatcgcattaatgaaataccaactatgcgtaaatcaacttgtcacaaagtgagaaattatgaaagttaatttgaatgttgaatgtttgaattacagggaagaaatcaagttaatgtactttcattccctttcatgatttgcaactttagaaagaaattgtttttctgaaagtatcaccaaaaaatctatagtttgattctgagtattcattttgcaacttggagattttgctaatacatttggctccactgtaaatttaatagataaagtgcctataaaggaaacacgtttagaaatgatttcaaaatgatattcaatcttaacaaaagtgaacattattaaatcagaatctttaaagaggagcctttccagaactaccaaaatgaagacacgcccgactctctccatcagaagggtttatacccctttggcacaccctctctgtccaatctgcaagtcccagggagctctgcataccaggggttccccaggagagaccttctcttaggacagtaaactcactagaatattccttatgttgacatggattggatttcagttcaatcaaactttcagcttttttttcagccattcacaacacaatcaaaagattaacaacactgcatgcggcaaaccgcatgctcttacccacactacgcagaagagaaagtrcaaccactatcttttgttctacctgtattgtctgacttctcaggaagatcgtgaacataactgagggcatgagtctcactagcacatggaggcccttttggatttagagaytgtaaattattaaatcggcaacagggcttctctttttagatgtagcactgaaatccttgctggagggaagagaggggatgaactcaagttttccacatcctgggacacctgtccctcttttcctaactgcctaagataacccatttcttccaaccatctgaggacagtcccgtcgtctcagaggccctgcaccggggagagactgggctctgcagcagccacatcagcattcacagcttcatgtggcttcactgtctgaaaatctaccgactccaacatggccccacggtgacaacagacctgtgacaggaagcccaaagctcacatagaaatggtggacagatcaaagtctctatagtaagggaaaaaaagagaggtggcaggcatgagccccctgcacccagtggctcgtgtccatactgagtccagaccctgatcaaggcctgacttagtgtcactggcagtcccactaaattacacttccttacactggcccgatgcgacaaatcaggtggctcccttctgtcacgtggagcacacagtgttttccatcatccatagctttcttcctgatggtgtttgcattattgcgccttcccaatctgcatgctgcgttgggcttgcggtgcctgaacaaggtttgctcccatgagctcaggcaccctaggatcccctgttagactattaggctgtccagcatggtctcctttcccttcttggtggtggtcttttccctttccagaatagaacagtgattcttaaaataagttagagcaggccgggcgcggtggctcatgcctgtaatcccagcactttgggaggccgaggtgggtggatcacgaggtcaggagttcaagaccagcctggccaagatgatgaaaccccgtctctattaaaaatacaaaaattagctgggcgtggtggcaggcacctgtaatcccagcttcctgggaggctgaggcaggagaatcacttgaacccggggggcagaggttgcagtgagccgagatcacgccactgaactccagcctgggcaacagagtgagactctgtctcaaaaaaaaaaaaaaaacaaaaacaaaaaagcaagatcatccactacacatgaacatgaatcacagtattatttgcacaggaagggtgtaacaaaatatgaatgtatcaaaaaatagaaataaagtctttgcagaaaaagtctgtttttctctgaagtgtgttgagattatctgacaactctaagattgtacttaaattgtcaataaagcatcaaaagagcttctgagtctgtctttgaagatacattttcaatcaatgtgaagggtgacggagggaatcacaggctgtattactccatgggcctcacttgtggcctggaggaattacctggtgatgaaatagccattcagtgacctggaggaattacctggtgatgaaatagccattctcatatcaactccaagctccagattaccgctggctgtttctctttgttaaataagagtagttttttaaggctatcaaaatttgaaagggttccaaaaagcaaaccctcattcataaaaatctaaaagttactttcctgccttactagcaaacttttctaataaaagtgtttaaaagagaagtttgcattggaaaagactatctataaggattttttctcatgtcattctagaaaatttcagtgactttgcattgctgtcaatgtgggtgtgttgacgctgcattttcaaagaactgctttagtggccatgcattgtttatttcacaatgagcccatggtggagggatctggaatggaacattccgagatagggcctgcacaacattaggcaaagaagtacacactgaggtcctctgggtgccagtagccacaggaaacactccgaggatatgcaaaggtcatgggaatggtggcccaggtgatgatagagcaaaagggggcagagaaagtgggtgagctctgggtgccagggtgggaaccccacctccaaaacgcacctgtgtaagagcttcggggacaataatagcatgcaccacgttaggttgttgtcacaactaattaatttgcctaaagcacctggaacagtgtgtaggataaacgaagcactgtgtaattgttcgctattgttaaaaaatgaaccagtcattggaaactacagaataaaataacagaaaacacaaaactaatgcaaagtgatgacaagtgccaggaatatctatttgagcacacaattgtagatttagggattcgtgttagaggcgggtgactcatgttgcatatacgtatattgtattatcttctagacagccccagaagtgttcctataaaggtaagttgctatgctagctgtgtgtgtgtgtgtatgtgtttgtgtgtatgtatgtgtgtgtgtgtgcgcgcgcacgctatatgtgcagatgatgtccagggtgtgaattcgggttaatattgtgagtggaaatgaataagcacaaatgcgaaatgcttatgcagaagacagcattagacatggggtaaagccggcaatccctgtttgggtagtggacgtgcctcatctccatctgcccttactagaacatttctgatagtgtggagaatatcgatgttcagtttttttaagaaaatcctatttcaaaacaacattgagcctcttttcaatccactgtgaataaactgtctcacacaaaataagaaatgttgctgtggtttaaataacatgccgaaaaaaaaaaaaaaaagcagggagtattgtccgggaagacctgcttgaccatacagatgggtggcactggcttgagggacccaccatgctcgctgatctcatcctcagctgcataggaccaattttgtcactatatcaagaggtgactgggccccaaaagactaacgctaacctaactcttaagagaacggggcataaaagctaaaacgtcagtttacagtttatatttactatgagaagcttccctcctgatgcttcatacgtgcttttccatctggctggagtcattctttaaaacccctgccttctccttttgacaggccaacctgtgggcttcagtttgatgaatttgtcccgcaaatctttgctaaactcctggtctacattaacgctcttggtgcgcacttacttccccaatcgtagcattgaacgtgcaacactttaatcacttatttacttacctctgctcccctagggacagagaagaagagagctgtgtactcactgttgtatacttagcaccatgcctagcatagaccacactctatcactatgaaactgcatttttaaattctgagcagttctatgtggaaaataaaattatagcggaaagctttcttgttgagcctagactcagagctaaatgacgttaactgcatcatgttattgaatagtgtcacctgcccagatgcaccaatttccataacaggctgggcgcagcggctcatgcctgtaatcccagcactttgggaggccaaggcaggcggatcacctgaggtcaggagtttaagaccagtctgaccaacatggcaaaaccgcatctctactaaaaatccaaaaattagctgggtgtggtggtgcccgcctataaccccagctactcgggaggctgaggcaggtgggagaatctcttgaaccccggaggtggaggttgcagtgagccgagatcatgccactgcactccagcctgggcaacaaagtgagattccatctcaaaaaaaaaaaaaaaattccattacaaagataagtctagcacagactggaaacctttgctctcagactagggtaatcttatctcaaagagtccctgagatacctggtcaaagggatctgctgtggagctcctcccccagctccccagtgcctcaggtcatctcagctgaacgctgggtgttcctgaaagctcccattgcatgtgcagaatgaaactctagtgtgtttctgtggacagtttgtttcatccacaattcttggatttttaatttcaaactcgaagagtgtcttttttgagagatgctgtttagcatcaaatcagcactcagcatttctccctgtaaggttttctttatatgttttgttttgttttgtttttgttttttttaagacagagtctttgtcacccaggctggagcacagtggcacgatctctgctcactgcaacttccacctcctgggttcacgcgattctcctgtctcagcctcccaggtagcttggactacaggcgtgcagcaccacggccagctaatttttgtatttttagtagagatggggtttcacaatgttggccaagatggtctcgatttttacctcgtgatccacccacctcagcctcccaaagtgctgggattacaagcgtgagccaccgcacccggcctatatttttttcattacaaaattattattacatggttacatgtccattatagaaagtaaaaaaggcaaaaaagaaaacataaaaactaccatctagaaataattttgcatcttatttccacttaaaaatatatgatgagcatctttccatgtcaatagatttctaaagtgacatttttttcaggaattcattatgacctactgtatgctaattaatttaataagtgtctcttttacatttccatatctaatttaaaagtccaggccatgcacagtggctcgcgcctataatcccaacactttaagaggctgaggtgagtggatcacttgagatcaggagtttgagaccagcctgggcaacgtggtaaaaccctgtctctacaaaaaataaaaaattagctgggtgtggtggtgggcgcctataatcccagctacttgggatgctgaggcaggagaattgcttgaacccgggaagtggaggttgcagtgagccaagattgcgccactggacttcagcctgggcaacagagcaagactctatttcaaaaaaataataataaaataaaacctggacagttaggggcaaaggggagtaggttggtcaccctgcctgtgagtagcaggtcccaagcagcaacgtgcactcacaggcccccttgtaggctcggcaccctttggtttaagttgcttacttaacaagctcctactcatctctgaaatttacccccatcctccctcaagccaaacgaatcaagaggctgacacttccaatactgatgcctcccaaagaagtttatcccactaaaaacaggatcaactgaagcctggcaaggcttcatactcccaaaggacctgccacgtggtatttgagaacctctcaattctgaaacagctctcttttagcacctggctttatcttcaggaccatttttcacaaaggcatttagatttcatgatttcactggagttccatgtagccatcactgaatctccattttctccagctgattttcctggaatgagctccccgtgggtctctaggtttggcatgctcttcccacacatcggtctgcttcttcccttcctgaaggcctatcaggtcaacccatcacatctatagtgctcacctggtctccccagctagagtgctaactccatgagggcagttccttgctgtgtttattgatttcatggataagtagagaccagtcatcaacagtcatcagctaaggggctcatccacccccttcattgcccactcaccttggatctgtgcaaaacaattggaaactgggattgtagaaccacacatgccaagtgccaccaatgaaactatcatttagaaaaactgccatcgttccttttaatttgggtgtaattgaaaagtcattatcatttgcttttcttttcttgcctttcctgcttatttattgttctaggtgaagttttttagtcaccaagctttttcattcattttatcatcttggtagcccaaacaatgttagttaaaatgggtctcctagttggtttagcaaatactagatacctctctttgaagaatgggatgcagcacctcccaccagtttttttttttttctctctgaaagtagttgacaacccctagggcagcataatttcaacaatagcaaaaacataaatgcaaaaccactcagtttcaagtgtttgcaagaactctaagcaccaggaataaggcacaagatgggaatcagagacaccacagtagaattcagagacacacacagcaatcacatccttgtaagtaagtaactctgaacatagctcatttctactgtgggtcaccaaacaccaagaagcacttggaagcatgcctggcagttgataactggtagtgacctatcaacagcaacatccatttatgtcagaggatgctggcctcctcattcaaccccttaggagaatcatgattgcttagcaggttcatgtgaaagagtgagttacaaggtgacagcaactaggtcctatggttcccagacctgcttcatagatacggcaaaacttttatttgaattggctcacccatgcatgtttattcctgtccctgatggtgacactgatagggaaaaaagtattccaggaatgacagttgcaaagttcgccatgccatggtcatgcaagggaacgatgctggtctgaaaattcttt

SEQ ID NO: 94754 - DNA, 33175 bp, Homo sapiens
gggaaaagcaagagatcagattgttactgtctgtgtagaaagaagtagacataggagactccattttgttctgtactaagaaaaattcttctgccttgagattctgttaatctatgaccttacccccaaccccctgctctctgaaacacgtgctgtgtcaaactcagggttaaatggattaagggttgtgcaagatgtgctttgttaaacagatgcttgaaggcagcatgctcgttaagagtcatcaccactccctaatctcaagtacccagggacacaaacactgcggaaggccgcagggacctctgcctaggaaagccaggtattgtccaaggtttctccccatgtgatagactgaaatatggcctcgtgggaagggaaagacctgaccgtcccccagcctgacacccgtaaagggtctgtgctgaggaggattagtataagaggaaggcatgcctcttgcacttgagacaagaggaaagcatctgtctcctgcctgtccctgggcaatgcactgtctcggtataaaacccgattgtacgttccatctactgagttagggaaaaaccgccttagggctggaggtgggacatgcgggcagcaatactgctttgtaaagcattgagatgtttatgtgtatgcatatctaaaagcacagcacttgattctttactttgtctatgatgcaaagacctttgttcacatgtttgtctgctaatcctctccccactattgtcttgtgaccctgacacatccccctctcagagaaacacccacgaatgatcaataaatactaagggaactcagaggctggcgggatcctccatatgctgaacgctggttccctgggtccccttatttctttctctatactttgtgtctttttcttttccaagtctctcgttccacctaacaagaaacacccacaggtgaggaggggcaacccaccccttcataacttaataggcaaagcattatccaaacagactgttcacagaaaagaaaaatattaatgactcaaattcacaaaaatatgctcaatctcactaacaaaatgcatggacaagacaattcgatgcaacactgtaatcataaaagataatcaccctctaggagcgagttaagtaaaatccatgcaatagtattccatacagttactgaaatgaatgaaataatgctttataatgatgaagataatagttaacatttactgagcacttagtatatgccaggcctgtcttaacggtttatagataaagcttatgtctcaattctattattttttctatatttttttttagctgcagaaactaacacagaaaggttaagtaacttgaaaaagattaaaactagtaagtaatggagccatggtttaagtcccagtgtctggctccagagtcaatgctcttaactaccatgaagaatctccaagatgtatttttaagtgcgtgcttggggtggttgagggtggtggtgaagaaagatgcggaagtgtttatcgtatgctaagatttattgtttttaacagtttttgcttatatgcatagacaatctttagaaggacacacaagaaactgtactccctttggattttataacatacgtatatgttaccctttaaaaagtcaagtttaagttaaagaaaacacacccaaatcattagattctcactaggattctcaatgtgaaatagaagaggcattagatttggaaatatggagtctactcctggttttcctggtggctctagtaaaaaatcacaatctctttttttttttttgagacggagtctcagtctgttgcccaggctggagtgcagtggcgcgatctcggctcactgcaagctccgcctcccaggttcacgccactctcctgtctcagcctccctagtagctgggactacaggtgcctgccaccacgcctggctaatttttttgtgtatttttagtagagacggggtttcaccgtgttagccaggatggtcttgatctcctgacctcgtgatccgcccgcctcgacctcccaaagtgctgggattacaaacgtgagccaccgcgcccggccaaaaatcacaatctgttaaaccaggagtcaacaatctttttccacaaagtgccagatagtaaatattttaggctttctaggtccaatagcttctgttgaaactgttcgactcagccattgtagtgctagaacagccaggtgatgcgtaaacaaatgagagtaggtacagctaggttctaagaacctgggcaacgaaatttgattttcatttaattttcccaagccacaaaatattcttttgattttttttttaacttaaaaaaagtaaaaacaagtttttagctcacaatctacctttggcccacgggccgtagtttgctgacacttgaaccatttgttcaatgaagggcccgattcattatgtcaaaggtcatttcctactataatattctgaaattctctacttttaatattgcgagtaaggcagacagagaaaaaatgaggaaatacatctttagttatttttaatgatccaaatattaaatcaaagtaatgcgttggggccgagtgcagtggctcacgtctgtaatcccagcaccttgggaggctgaatcaggcagatctctcgagctcaagagctcgagaccagcctgggcagcagcaaaaccccatctctacaaaaaataccagaaaaaaaaaaaaagaaaaagaaaaaaattagccggccatggtagtgtgtgcctgcagtcccagatgctcaggaagctgagatgggagaatcgtttgagcctgggaggcagaggttgcagccagctgatactgtaccactgcactccagcctgggtgatagagccagagcttgtctcaaacaaaacaaaacaaattagctgggagtaatggcatgcgcctctagtcccagccactcaggaggctgaggtgggaagattgctggagcccagggaagtcaaggatgcagtaagcagatatcataccactgcattctagcctgggcaacagacccagaccctgtctcaaaaacaaagaaaaaagaaagtaataggttgggtgtttcaaaagatttttagccttaagatccagattatttaaaaagtgaactgcctactccctttcttggactccctcctctatgagtaaaaatgtattacagcaactgtaacacatcattatccccattccactttccactatgaaacttaagacttttgatgacagggataacatctactttatctttgtaactcctgcctctaacgcaatgcctagcaagtgatacaggtatgatgcttgttcaataaataaataatacatcacacagtaatgatttccaatttactcttacaactttacatagtacttaagaagtccttaagaaattctaaaaaatcctcaccaagcagataagcagcagataaacctgataaacacttacatgctgtagtatagtggtaataacctagcgtcctggctctgaggtcagttaaaacatatgtaaatcttagctctggcacttactaatcatgtctccctaaacctcaatttctttgatcctgtaaaatgggggaaattataactgcttcatgatgtaattttaaggattaaatgagaaaaaacatataaagcaagtagcataattcctggcaaatgtaagtgttcattaaacaaccacctttataacaaagtatctcaagtcatactagactcctaactggtctttcttcaagtcctgctccctcaaaaatttaatcttccaaaaagcagctaaaatgatttttttttttttgagacagaattttgctctgtcgcccaggcgctcagctcactgcaacctccgcctcctgggttcaagtgattctcgtgcctcagccactggagtagctgggattacaggcgtgcaccaccacgcccctctaatttttatatttttagtagagacggggtttcaccatgttggccaggttggtctcaaactcctgacctcagatgatccgccttcttcggctggctccctaaagtgctgggattacaggcatgagacaatgcgcccagccagaatgatcttgaaaaaccaattcgggctcaagctttaaatcctctcgtagtttcccactataatgaaaagaaagtctaaagtgctcatcttgacttacaaagctaatcatctgtcgcctccttacccctccatgttcatcttgggccattcatcctctgcccattgagcttcagatccacaagcccttcagttcctcaccccagcagtttcctttgctaggactgctctttctggcagatgactaggcttcttcctctttcagatctcaccttcttaaatgtcacctcagacaggcaggtatcctgtccgctactgtaacatcctctttaaatagcccccatcacacctatttgttgtttgttccagcccctccgcgaaccctgcctctacccgccgcatggcagctacctgggagagtgcctggagttgaatgaatgaaaatagtctgtagggtgcactgcccttgtcaatcacaagcagatttaattacctgtgccagaactcacgggagggaaacaccgtccgccagccccgctctttcctggctacagataaaagctccaggttccgggggttccggttggtgaattctggggcgacagcttcattttccacagggtccacttcaggtttcgctgccggctcggagctggttgacagggctgcgaacctgcaccctgggcaacgggaaaaaccgcacagggcttaaaaatgacggatatggacagcgcacgaacccgctctaacgtctatccgcttttacacccccaatctttaggcccgaggggacgaaaaatacgtatgcccacagggtggagtcagcactgaccccgtccttaacttcctactgtggtcttcgcagtgccgcgagctctatttcgatccggcacgtcgaatacaaaatagaacccgcacgttccaatgtactgtgcaagcccaggcgagtgagctgggagaaggggggcaagactaattaccagggttcctgcaaaccgagaacccccaaaactgcgaccgaagcgccatcgctgagacgatctcggaaaagcctcgcctctttttcctcacggacgactcagtcgctcgccaggcgcagccatataaagtcagggacaagcctttggctgctgtagatccccaaactctccacgccagacgccgccgacccggaagtagcaagtcccctgccactgagtggccaagaaggcgatctgttatcctgcaccgccaatcatcgctcacgtcgaggggcacgcaggccctggagcccaccaaccacctcgtagctacgcccaagaccacgcttgttgcttaagtccggggtcaaaggcacacaccccacaaaaccatgtttgggttttctactcggagagcttgggcggtcattgactggtccacacacaccccacctgggcaccgcgtaggaataaggcagggcaagatgcagttttctccttaaaaagggtggttgtcttcctcgaaccaaaaattttcccgtatggcccgctggaaaaactgccccgtcccacccaggttcgcgcccttaaacttacactcctgaggcctggagcaaagccggccgatctgcctcacgctccccgagcagggacaaggaaaagacactaaacctaaaacgcacgactcgctcagaaccccaactctaacttggagaagggcccgcccctccagttacaccccagctccaagctccacccttcttacaaccttttctagaaggcactagaatggcccactgcgtctgcgcaacatcgtttgaggcgaaggttcaacctcttcccagcggtccaacatccgacttccgttctccgctttcgcgcccttcccatcggctatctaattggacaaaaatgccgaccccgccccttccccggagcctcacttccgtcacagtcctgtttctctccctgttgtccctgcctctttttccttcccgccgtgccccgcggccgggccggggcagccgggaagcgggtggggtggtgtgttacccagtakctcctgggacatcgctcgggtacgctccacrycgtcgcagccactgctgtggtcgccggtcgsccgaggggccgcgatactggttgcccgcggtgtaagcagaattcgacgtgtatcgctgccgtcaagatggaggggcctttgtccgtgttcggtgaccgcagcactggggaaacgatccgctcccaaaacggtaagggcgggccgggcctgggtcgggtttgcggccggggagggccgagtcccaccgcgaccggaccccggctgccctcgtttctctcctttacctccgcagaaagggcctcggggccccgcagccggacccagcccacccgccgttctctggggcagggcgctgtggccccacttttcccacagcgaggaggagccccgccgcgcgcggcagggttttgagaccggcaacgcgtggatgtggtgtccggkgcggcgttggaaacgcgccctccgcgggaaagcgggcctcccgggctcgcacgtgcgggccacgcctcgcacccccttttgtttcagggcgaccccctgagtgtccatgttaaacgccaggtttyattttaggaccatttaccagaaaaagagtaggtccatccgcgcgccctcggatgagcccggtgccctgtccgcccgcagctgcagtcgaggtcgggcgtccggcgtccagccgtatccgggttgacagcttcttacagtagagttagcccaggaaacgccactcgagtgcattgaccccaggagacggcagcgctaacttagcagagcgtttgctgtcaggcctttggatacctacagagcttactgtttcttgatagaytcctaatttttttcgtaaacaaatctgaaagtcaccaccttccccgttgactaccgatttctctcctcacagataaagagagttttaatgagcaaaaaacttgcagaatctgaaggaaaaggctggtatagctgtacgaagtggcagagcrtgaaattggtggttattactttttttttttttccccgccatcagattccaccccgcatcaaagctgtgccaaataggctcgctttgtttagggacagggtcccacctgtcgcccagacgagagtgccatcatagctcactgcattctccaagcacaggtccgcgccgccgcatccggctttgtttttattttttgtagaaatgggtttcgctatgttgcccaaaggggtctcaaactcctggcatcaagcgatcctcctgcctcggcctcgcagtgttgggattacacctgtgagccacagtgtctggccccatttacactcttagtaggtggtttttaaataattaacacagatttgtagatttgggaaatacgggggctgttggatgtcatttacctttaggctgaaattactgtctttcagagttgtggcttatcctcatttcttttttatttttaattgattgtctacagttatggctgcagcttcgattgccaatattgtaaaaagttctcttggtccagttggcttggataaaatgttggtggatgatattggtgtaagtacacataactgttgtgttagtttccttaaagtaaaactatcttcagtgttttgctatgttctttctttgactttatcagaatccacgtactggaaggtgatattaaaggtgaacgtgtattataatggggctgtgttgatttctataagtggttcatattttttcctgcgaatttcttaggatgtaaccattactaacgatggtgcaaccatcctgaagttactggaggtagaacatcctgcagctaaagttctttgtgagctggctgatctgcaagacaaagaagttggagatggaactacttcagtggtaggtagactggctaaagaatgatcatttttctaaaaaygaccgactttcagaaagttgaagccataagtgggtcatttgtgctgtgtcagaaataagttacatattctgaatgcccagaagattgagcaagaagaaaaaacaaaagaagttacacatttaagaggggaaataagcttcttaggtacagattcagaaacaaaatttgtaagttgatagttacagctagtttgtacagtttaagtaggaaagaatttgagttcatttgacatagccccattgttttaaatgttggtattcacaagttttgagggcttatttttccttttatggcagtattcagacatcacacagatttttttatggtctctcaaaagtcttgtttcctcccccatcaccccttgagacttggaaagctctcaacttttctgattatttggaggataaaatgttaccaatctgggggagaaacaatgtttttatattattatttttaagagaccatctgtagcacagtctgaagtgctgcagtgctgtcatatctcactgcagcctggaactcctgggttcaagcaatcctcctgccttagcctcccagagtgcttgggattgcaggcatgtgccaccacaagcaactaattaaaaacctcttttttttttttttaagagacagggtctcgctatgttgcccaggctggtcttgaactcctggcctcaagtgatcctcccttctcggcctctgtagtgctgggattacacgcatgagctgcactcagcctgttctattttttaaatcctgacaggtaatctcaggaattcaaaatgggagtgtgagaaattaataaatacatcatgatatgacagtgtgatcttaccgagtcagtaaatgtgatacacagtataaactcttcatagatcatccagcatgcyggtatagtagaaacactattgtttggtgagaaagatgttaattctggagaaactagatagtttgtggggaaaatgtatttctagattaaactttagccatgaaagaatggaatctactcctaaaatatgaatatgatctttgtctaacttacgataatgtgatttaacaaatgtagttttccttccataagaagctgacagtctttttgctttaaaaatatttcttagtgttttatcaacttgaagaactatcttttttaaataaaataatagcytaatataggtcatatgaatagtcacactcggtttagcttctgttgagcattttttctaaaggtaatagatgtgttgtcttttacggttgtattgatgaactagtttcttattgctgaactagtttcttagaacatttttctggctcctacccagttttggccatttgcatttataatacaataagacctcactgaacatccacagtggcttcatggaaactgactttaagaggaaagatgatgtataaaaaaacaagttttcctccccccatcagcgttacaataaacaactgtatttgagaaattgctgtccattgttttgcttaaagtggcagtttccaagaatttatgagtaacgtggaggacttggagtgttttgtagcgttcttctcccttcacgcccaggtttctaataaccagttaattcatttcatcactaccattttggttaataatatatggccattttagtgtcattccatatgtattgcacatgttgaatatccggcacactcagaccrgtgaatgttttctcaacaggttattattgcagcagaactcctaaaaaatgcagatgaattagtcaaacagaaaattcatcccacatcagttattagtggctatcgacttgcttgcaagtaagattgtttgcattcagagaaattttttttgatgtaatagttgtaaactgtgttgtcttaacgttttgattaataactaaattttaatttgaaaaccttcaatttaaatgttttagcatttaagtagtaatatttgaagttaaaaacttggaccagtatcttttttctcatttgactaccacattttctcctaataatagattttagtggctrtgcttatgggatagattaaacttgccatgatctgaagagggagggttttttcatgtcctcctcctatatgaaatggctgaacggrtattattacttacgacattttggctctgtgttaagcatgatgaatgcaaagagtttgagtagtgactttataagcgtttttctcccccacacttttaaacagggaagcagtgcgttatatcaatgaaaacctaattgttaacacagatgaactgggaagagattgcctgattaatgctgctaagacatccatgtcttccaaaatcattggaatgtatccttgtggttgtcagataaaatttagactttttaaagcataagactttgagatgggcatggtggtatgtgcctgtagtcccagctactaaggaggctgaggtaggagtattaattgaacccaggagtgcyagtccaatgtgggcaacatagcaagaccctgtctcgggagtgggtgcgtgtgtgcgcatgtgttgcgcgcacgcgtgcgtagtagcagcagtatcaattttgtgcaataaaattttgaataaccaattttatgcaaattgatatcaatagrgaggagtaatgctgtatkgaaattacytgttgccttccctgcttttttagggtgaaaaggtaataaaaagcatgtctaaaagtgatatgaattgcagatagtgataatgttgtaacattttggtgacaagtaatgcttgctkctttaatagattagattactaaaaggaagtcccttgaaattacccttgatttttcacgtgtgtaccctttgtccattccaaacctgttactgtccttaacttttggcgtagaaatggtgatttctttgctaacatggtagtagatgctgtacttgctattaaatacacagacataagaggccagccacgctatccagtcaactctgttaatattttgaaagcccatgggagaagtcaaatggagagtatgctcatcagtggctatgcactcaactgtgtggtgggatcccagggtaaggtttgggatttggtttatagaatgagattgctacagattaaaactagcttttcttttggctgggcgcggtggctcatgcctgtaatcccagcactttgggaggctgagtcaggtggatcacgagggcaggagtttgagagcagcctgtccaatatggtgaaacctcatctctactaaaaaatacaaaaattagctgggcatggtggcacctgcctgtagtcccagctacttgggaggctgaggaaggagaatcactggaacctgggaggcggagattgcagtgagccaagatcacaccactgcactccagcctgggctacagagtgagactccgtctcaaaaaaaaaaaaaaataaaaaatgtttttttgtggattatgtgcagtacatctttttgtaatttaaagcacatacaacatggtagaaggaatgtgaattaaaagaaattacgtgcatttaatgccataaaatttttctaagataaaatgcaatgaattagtctaaatttgtgtgtttacatacaatcgattataggtactctttattatgcttttaaggatagacgtattaacttaatcttatgttcaattgtaggcatgcccaagagaatcgtaaatgcaaaaattgcttgccttgacttcagcctgcaaaaaacaaaaatgaagcttggtgtacaggtggtcattacagaccctgaaaaactggaccaaattagacagaggtatgttgagagattatttttggccttttaagtgtgagtgtcttggaggactttaacatttttagccaagtcaaactattttacttccagaaaaattagcctggtggtgtttttagagggatttggggttatacaacctatatgaaaatcggcctttttgtggaattttgattgtatgagtctattaatattaaagatgtaaaagacaggaatctaatttcctcaaagcagtacagaactcagcagtatagtattgactgtaacctactgtttgctagatactggaggtgcaggtgatattagtggttggcatgccagaagagctaatggtggaggtagtgtgaccattgctatagatttgactgcctgacagtcacttaaaacaataaattgtttaggctgggcacagtggctcatgcctgtaatcgcaacactttgagaggctgaggtggcaagaatctgaagcccaggaggttgaggctgcagtgagctgtgattgtaccactgcactccaacctgggtgacagcgagaccctgtctcaaaaaaaaaaaaaaaaaaaaaatagtttaaacagtagttaaaccagacctacaagaaagctttgccaagagtaagaaatgtgytgtcatcttttaaatcagtctgcacgggtrttcttttttccttccttcctcatacaacaaagtgtcctttcttccatcaaagccagtccctctacagtaagtgttctagagtctgtttccttctgctctagagccttttctttgattcttgtttcatacttgcatcttcaactaattatgctctttcctggattcttcctgtggctcttttgtccttcaagcttcttcrtacatccttgtgctataggtactccctatcgtacatctttacaggcagatgtcatgagtggtttactacacaaaacttctctggtgcttttcttctcatcccttttcagccctgttctccatttgagggactgcatgttaaggtctctagcgtgaaattcggaagacattttcagccttcctcttacttgacctttagcaaccctttgattatgtccttcttgaaatgctttcggggatggaaggctttgtgatgctgctttgtctggaccatgtcataatactctccaggatagccyctttgttcccatgacttcatgtattatctctctatgccagagactctttcagctgtttctctaagctccaaacacacatacctctatctagtagaatgcttttcaagcatctcaaagtgaacatgtctaaaactgaacttgtgataataccgcaaatctgcttttgaccattttagtgatggggagtccttcacacaggcagaaaactaggaaatgtccttaactcctcctttttaccaacactttttctcctaatctgtcaccaagaccgcttgatttctacctccaaattaaatttacctacttttcattttcttgcctagactgttgtagaaacacacccaagctagtctcttagagaagcttttctttcttcttcaatctaaattatattctgttgtaacttcctgtattttttcttcctggggcttattacagtttttaccatgagtttatataacagtgtgtagcacacagtacttgtttagtagacaagctgcttttgaggttgatctgtaattcattttactttaaaaattcttcgaatgatctattcacatggcttcactcatattgactcttcaaatctggatctcccatagtttatggtttccatgatgtaagtgactgcctcctgggagcttcacctgagtaacagcagagacttcaaacttaatcttgtcctcaactaaactctcatttcccatcctgcccccaaaactcttgttatttattttactccaggagtcacccaagccataaaatttgacttttctgtttaggttgtctttcagcttatatctcatgttattatcttcttgtcttcagccattcagtgcagtttccacattgataatcagggaatccttttgaaaacacagatgatatactagtcttgcttagagatattaagcttagtatctagattgtttggtgtaacctgcaaggtttttcacttttctggttctrccttcttttgtgctttcaactctggactcctgtttttgtttgtttgtttgtttttgagacggagttttgctcttgttgcccaggctggagtgcagtggcacggtctcggctcactgcgacctccgccttccgggtttaagtgatactcctgcctcagtctcctgagtatctgggattacaggcgcccaccaccaggcccarctaattttttstatttttagtagaggcggtttcaccgtgttggccaggttggtctcgaactcctgacctcaggtgatctgcccgcctcagcctcccaaagtgctgggattacaggcgtgagccactgcacttggcctggactcatcttcattgtccacctcctaggctaaatttatgtcttttatgtgcttgtaatctctgcataccactttartgacacttgccctggagtgtgattggtaatccctctccccactagatccttgaaggcaggacctgtgttccctgtttaaccatagttctcaattagtaattcaaatttgggttggggagagctaagtggtaatttttaattccttcaaattttccatgaattsgactaatttaaattctggtcagagataacaaaggataatacaatttgatctrtgattatcttgtgataaatacttaatggaagttaaattatttttaaaaatcacagaaggtaaytcaggttacaaaaatactttgcagagaatcagatatcaccaaggagagaattcagaagatcctggcaactggtgccaatgttattctaaccactggtggaattgatgatatgtgtctgaagtattttgtggaggctggtgctatggcagttagaagagttttaaaaagggaccttaaacgcattgccaaagcttctggaggtatgtcttgtgctggctgtcacataaaatacttttattatccctgatcctatcaaaggtctttttacattrgaatattgacagaaaacagctcaaaaacatttatattctcttaatgctttgtgctaccaacacatttatagagccatttttcatgtaactggagaaattttgttggaaatttgtgaactgaatttgttcatttctaaaatgacagttccatcttaggataaaaggagttaccgtgtgctgcctaactaaattctaaacttgtaatatagcacttttaycacaaatgctactgagtccaaggatattaaaatcatgaaagagcaatattcacagatcctttgtaactctcttattagcaactattctgtcaaccctggccaatttggaaggtgaagaaacttttgaagctgcaatgttgggacaggcagaagaagtggtacaggagagaatttgtgatgatgagctgatcttaatcaaaaagtaagagccactttctaaaattgtaaagttataccgattttgttaagtaaaagtaggttttcttcccatttatttgctgcttgtagtctcacagtgatacgagcagttatacgcatgggataaaataacattgggccactgtaaattgagatgaagtaaccattttcatctcttctgcakggactagacattgtttctgtatagtatatctaaatatcctgtgtaggcaggacttaagggaactttatgtagacttattttattaaaatgccattttttttgagaaattgatggtcttggcaaaaaaaaatttttaaaaatgctattacaagaattgtacttttgttttgaacagtactaaggctcgtacgtctgcatcgattatcttacgtggggcaaatgatttcatgtgtgatgagatggagcgctctttacatgatgcactttgtgtagtgaagagagttttggagtcaaaatctgtggttcccggtgggggtgctgtagaagcagccctttccatataccttgaaaactatgcaaccagcatggtaagaacagtcatttcttgtcttagaggcctgagagcagtagctgtggacttcaattttttttttcccttttgtgaagtcacctaattttcttcttttcctaggggtctcgggaacagcttgcgattgcagagtttgcaagatcacttcttgttattcccaatacactagcagttaatgctgcccaggactccacagatctggttgcaaaattaagagcttttcataatgaggcccaggttaacccagaacgtaaaaatctaaaatggtaagcatggtttcccgctctttgttaacctctgcagaacaggttgcattaaaaaggatagtagtcaattacatgtcagcaaacataagtaacagacttgtcaaatacttaacatgaaaaacttcacagcaagcatttgttgttcagtcactgtaattcaagggataatgactaattattagcactggtgtgtcttcgttaactgtgattgctaatctctccctgcttcttttggtagaaagactacctacaagatctctagtctgatttaaaaatcaaccttaatacttgaatgaaatgctggagttaataggccacctaatgaaattgtaagcggccgttaaataattctttcttaattgcaggattggtcttgatttgagcaatggtaaacctcgagacaacaaacaagcaggggtgtttgaaccaaccatagttaaagttaagagtttgaaatttgcaacagaagctgcaatcmccattcttcgaattgatgatcttattaaattacatccagaaagtaaagatgataaacatggaagttatgaagatgctgttcactctggagcccttwwtgattgatctgatgttccttttatttataacaatgttaratgcaattgtcttgtaccktgagttgagtattacacattaaagtaaagtacaagctgtaaacttgggtttttgtgatgtaggaaatggtttccatctgtactttggtcctctgatttcacatattgcaacctagtactttattagtttaaaaagaaattgaggttgttcaaagtttaagcaattcattctctctgaacacacattgctattcccatcccacccccaatgcacagggctgcaacaccacgayttctgcccattctctccagtgtgtgtaacagggtcacaagaattcgacagccagatgctccaagagggtggcccaaggctatagcccctccttcaatattgacctarcgggggagaaaagatttagattgtttattcttctgtggacacagtttaaaatcttaaacttgtctttttcctcttaatgtatcagcatgctaccctttcaaactcaaattttcattttaactgcttaggaataaatttacacctttgtgaaaattcatccctgcctatcttacctcgttccttttatgccaagtaagccaatgtctttttttttttttttttttttttaccttgggaagtaatgaactcagtcctagtaactagtatttctttaactattacccacatggccaacacctagaagatactatcttaaaattggattgtgaaattcactggtaagctctcagggttacttgtgcatctttaccttctctgggtttaatccaagttctttaactattgcagcagagacagctgcaaaggcttcattgatttcaaatatgtcaacatcttccagtgaccaacctgcttttgtaacctagaggaaagattcatagaaaagaggtctaaacttgggtggaaaggctaaagttaaaccattctttgtcaacataaatatatgctgcatgatactggtaactgctastttggtttgttcttaggttaatacagtgacattctcacacatttttgccttagtgacatccattccatccaaaaggttaagggtgtgatctaaaagatcccttagaaattctaaattgtcttaaaattttgaaccagtagcatctgttaygtgtacctaaggctaatgtaacagaatcagttcccctagaaagcatgtgatccaaatgctctcagtggctgggggtagtggctcacacctgaaatctcaacacttggggagcctaaggcaagaggatcaattgaactcaggagttcaaaaccagcctgggcgacatagaccttgtctctacgaaatgaagaaggcktggtgcacctgtagttcgaggtaatgggaggctaaggcaggaggaatatttgagcctaggagttttgaggctgcagtgagctatgatggtgccactgcactccagcctggacaacagagcaagaccttatctcaaaaatagaaataaatgctcttggttactcttctggtagggaaagactagagctaactacatgaataagctcacttaaggctaacaggaagacaaatttcataaaagggaatarggttatactcacagcttgctttatggctggaattggtcctattcccataatggaaggctccacacccacttgggaccaggaaactatccgtgctaaaggtgtaagyccacgtttatcagcttctgacttcttcataagaacracagctgcagcaccatcatttattcctgtaaaatatgagtgacttaatttctaccatgcttattaacctcagttacatatctgtggcttctttaccacctgaagacatgagttaaatgattttacctgttggctaaggcatttactataattcaacagactttacatagaaattatgtttggcaatatattgaccacaaaactttccaactagagaaagtggtaggattacagtagtcggggctgggcgtggtggctcacgcctgtaatcccagcactttgggaggtggaggagggtgaatcacctgaggtcaggagtttgagaccagcctgaccaatagggtgaaagccatctctacttaaaatagaaaaatcagccggtgtggtggtgtgcgcctgtagtcccagccactcaggaggctgagacaggagaattgcttgaacctgggaggcggagattgcagtgagccaagatygcaccactgcactccagcctgggcgacagagtgaggctccgtctcaaaaagaaaaaaaaaggattacagcagttggggaggggagatctctgacaggaaatggaagaataagcctgggcttcacaaggaggtattgggagtttctggtactggaaaaatacaaaggtagataaactgaagttccctaatttacttcttcatttgtatgtctagttgggatgtcaagaaaccaaattaattctttcagtataggttaagtcaatgatcaaatacagagaaatgacatgtttccttmaactgttttaagrataattttgtacataaatattgagttgggtgtggtggctcatgcctgtagtcccccagctacttgggaggttaaggcagggggctcacttgagcccaggagtttgaggctgcaagtgagcaatgatcatattgctgcacacgaacctggctggcagagtgagtccctgtcccaaaaaatagtacttttgtatataaataaagagaaaaatattcactcggtagacattatagaacatagtattcccccagatgtccttcagaaaatctaacctgaagcattggctggggtgactgttcccgttccatcagtaagaaagtaaggctttagcttggacatggcttctatgttgctcccatggcgaggaaactcatctgttttaacttcaataagacctaagcaaaggaaaaccaattactcaagattagtccagagacagaagtaagtgtgctgggaatggtgggttctctgccattaaacatgaggattcatatttagcagaaaagttttaatatgtgaccactttgatgacaacaggaggaaagtacacacaagaattattgtacatgaaaacaatttatgagtatgtccttatgagacacctgtgttttccaaatccataggccttcctgaggaaagtagctaccagggacctgtttgtgccaaattctgctatagtttgggtcatagtacttggctggttacgagtgagtggatcaggcagtctcaragccaatcgtgcactgctggcakgacataagagatatcagttatcaataagggagcttgacgggagcattctgtattagaaaatagcgagtgaccccaaaagatccaccctttagaaatgtgaaatggagatcacacagaaacagcgagaagtaatgggtgtccacttctgaggaggttgagcctatacaggaaacaggtcagctggtgcctcctaacaaccatgagccagtgctccagcttctcatgaaacctgctgtgtgtgcacagtggtcatggacgctctggaaccaagagtgcttgagtgctgacataggtcccatgttaccgtgtccygtaaacccagcataccccctccccacattcatgtatccaggacatatayttgcaacctgaaaaacataactaagatataatttctaaagattcctatgtattactcttttagatgttactcttacctataaataggttgatgtttaaaccactatgatatactcacctyttctagttgacaccaaaactggtacaatctctttgtcaaaatggccagctttctgtgcattctctgtcctgttctgggacagaactgcaaccttgtcctgatcttctctactcacttgccattttttggctacattttcagctgggaaaggagaaaaacagcaaaaaactaacattttcatgaactggcatttgatagctcaagtcgtccacatttgaccaagcactgactgaccacatatgctagcaggctcatggtggcctgtgcaatgctctgtgtggggtggccctgcctgccactggcagttggtttggaaatgttgcagtgactctcaggagtcatacttctctccttccctttctatataattgtaaacttacagaaatttccttcacccagagtcaccatttatattttccctccatttgctttaatattttctttctgaaccatctgagagaaagttggagatacaatgccttcttactcttaaattttaatttcagtgtatacttccccaaaacaaggccactttcttacataagcacagttataaaactcaagaaattgggccaagtgtggcggctcacacctgtaatcccagcattttgggaggccgaggtgggaggatcacttgagcccaggagtttgagaccagcctgggcacagcgagaccctgtctccattaaaaataaatttagccgggcatggtgtgtgtgccatgtagctagtagtcctagctgcttgggaggctgaggcagaaggatcacttgagcctargagttcaaggctgcagtgagccatgattgtgcctctgcactccagcctgggtgaccctgtctcacaaaacaaaacaaaaatcaggaaatttaacatgaatcaaacactattatctaatccttggtccacattcaaayttcacctatatttcagtaatgtccttctagctcctttatttgagccaataaagaagcatgcattgtacaactatcaatctctctagtttgcttttgtctgtaacagttcttcagactatgcttcttaagcttgatatttttgaagaacatgggcgagttcttttgttaagggtcatcaattttgatttgtctgatgtttcctcagaattagattaagattctgccaaaaggcaggtataccactgaatgatagtatgatttttctcagtgagtcttattaggacacaaatgacaatcagtttatcccaggtgatgttatctttgatcacttggttaaaatggtttggtattcaccaggtttctagcttttaaaggtaccattttttcatttataagtaatcaataatttatcagaggttctttttggattatccaaatatcttcttccccatcatattttcacccactagttttagcattcattcatgactttctaactccaacattccttctattggtaagatattaattggcattttaccayaaagaaaaccttttccttttctcccatttattcagttatttatatcaggatggactcatacattttcattttattgaataagttataactcattactytcattacttactttgatgctgaaatttttcaatacttgggcagttataacccattactatcattacttatttgcacgctgaaattgttcaaaatttaggcagttacaacccattactatcataacttatttgcacgctgaaattgttcaaaatttgggcagttacaacccattactatcattactgactctgatgctcaaattgttcaaaattccactacaggaaagtggaagccccgtaggctgcctcctgtgtgctttcaacatgtccctgagcatgtccttaattttttagcattttttccctagccttggaaagggccatttctccaaacaaccttagttccttttagtggataaatgtatttagaagatctgggtgtcaggactgcttgttgttactggtttgtcattgtttctaggtctgttcagtagaaacttccatatgtattatttataattttacatatacacacacactcatggtaacaccttgagttcatactgcattttgagttctccaaaatgcaacctaacaccacaagctacattcttctccctttccgtatttgtaactctcttctacaaatgtgagaattggccaggtttggtgggtcacacctgtaatcccagcactttgggaggctgaggtgggaggatcccttgagctcaggagtttgaggccagcctgggcaacatggtgaaaccccatttctacaaaaaatacaaaaaattagccaggcatggtggtgagtacctgtggtcccagctactcaggaggctgaggtgggggttgcagtgagccaagattgagccactgcactccaatctgggtgccagagtgagacccgtctccacacacacacacaaaaaagttattgctttgctttctatgtcttgtctttacttatcaagctgtttttctttctttttttttttttttgttggatgatgtctcactatgttgaccaggctggagtgcagcagctactaacaggcaaaatcaaccatagtatactatacaacctcaaactgctggcctcaagtgatcctcccaccacagcctccctrgtagctgggactataggcacctgccactgcaccctgtaaaagctattctcttatatatacttctagaagctttacattttttgcttttatttttaaatccatgatttatctcaaattagcttttatatagggtgtgaggtagggatctaggttcatctttcccatgtgagtaatctgttattccagcaccatttgttgaaaagactttaatttctccatttcattccattgatgcctttgttgaaaacgagcataagtctgggtctatttctgaactctgttctctttctctgtccttatgccaaaaccacattgtcttgtttacaacagctttataggtaatgttaaaatcagagcatgtaagtgctattttctgacttcaaaattgttttggctattctgagtgctttgcattttatacagtatttatttacactatttatttatttatttagagatggagtttcattcttgttgcccaggctggagtgcaatggtgcaatatctcagcttactgcaacctccgcctcttaggttcaagcaagtctcctcccttggcctccagagtagctgggactacaggcacctgctgcaacacctggctaattttttgtagttttagtagagatggggtttcaccgtgttagccaggatggtctcaatctcctgacctcatgatccgcccgcctcggcctcccaaagtgctaggattacaggcgtgagccaccgcgcccggctggaagctattcttttgttgttgttgttgttgttgtgtcactatgttaaccagactggaatgcagtagatactcacaggtgcaatcatagtagactatgatagcattgcccaggctagactcaaactcttggactcaagcaatctcttgcctcagctcttgagtaggtgggactacaggcacataccaccatgcctggctcctttagtatttcttgtagtgtaggtgtgcaggcaattcattttccttcatctaaaaatggctcttcactttcactcttgttttttttttttttgagacagagtctcactctgttgcccagactggagtgcagtggcatgatctttttttaactttttgctacaatttgctaaggtgtaatttttcccttgtctatcttggtctttgaacttcttttcacaccaaatgtggaaattttcttcagtttttttctgccccattctctctcttccttatgtatgagattcctattccatgcatgctagtcctatttattttgtcctgcagaccaccaaggctctgttcatttatattttatttttttgagacggagtttcattcttgttgctcaggctggagtgcaatggcgtgatctcagctcaacgcaacctccgcctcccaggttcaagcgattctcctgcctcagcctcccgagtagctgggattacaggcatgcgccaccagcctggctaattttgtatttttagtagagatggagtttctccatgttggtcatgtgggtctcaaactcccgacctcaggtgatctgcctgcrttgacctcccaaagtgctgggattacaggcatgagccaccacacctggcctattttttaatttaatttaatttaatttaattttttgagacagagttttgtttgttacccaggctggagcgcaatggtgtgatctcagcttgctgcaacctccacctcctgggttcaagctattcttctgcctcagcctcccaagtagttgggattacaggcatgggccaccacatccagctcatttttgtatttttagtagagacagggtttccccatgttggccaggctggtcttgaactcctgacctcagatgatctacccggcttggcctcccaaagtgctgggattacaagcgtgagctaccgtgcctggcctgttcatttattcttcattatttttctctgtgttcttcaggtcgtgtatatgatctatcttcaaacttcctgaccctttttcttctgtctccaagatgctgttaaggccattcagaatttttttttctttttttttagagatgaggtctaactatgttgctcagcctagtctcaaacccccagcctcaagtgatcctcccacctcagcctcccaaggtgctgggattacaggtgcgagccaccatgcccggccccatcccagtgaattcttaatttcagattgtgtactttgcaagttctagaatttctatttggttcttgtttatattttttccttttactcctgagatgtccacatctattcctctatgaagattatattttcctttgtatctttaaacatatgtaaaatagagcctttaagatcctcatctgataattctagtattgcagggtctgttgactgttgtggtttttttccaccctggttgtaagctatattttcctaattctttgtgtatctagaaagttctcattgcatgctgaacattatagttgctacataactggacatagagattttattatctttagagaatatattgagttttgtttccacaagcagtcaaaatactggcaaatcaccttgatccttttgaggcttgtttttaagcttattagtttgggtctagagtagcttttactctatggctttggccctacccctaaactgtggtctttctgagatgtcaatggagtgtccaaggagttcagtaaggtttccactcgcttgtccagaacttttatctcctagtaatctataaaatctccagttcacctctcctttgcagctcttttctactaggccttgtaagctgttatctacaagcttagtatttgatcaaagacttaaggggaaccttttgcagatttctggagctctttttttcttctcccccttattctgccccacaaactccagccatctcagaagccccaaattctctgcttcttcagatcactgagaccactgtttccagcttaggctctgcctctccataacacagtttgggaagtgccctgggtagagacagtgacagtggggttttcccttctctcaaggatctcagtcttacatgagtattagtcaaaacctgacatacataaaacagtggctttatatattttcacaagttttatgcttgtttatagtaggaaatctaatctttgtcaattactccatcatgacctgagccttttttcttttctttttttctaaagaagagcaatttattttcttacagttctggaggctggaagagtaccattcaatccacagtacaccttggaaagggctcgggatctgaatttttaatgaccacctctagttatggttgaggcagttggtcacacagtgtcttccattgtctgcctgtgtttttatagccttctctgttgtggctgtaagtcgagaagtggtcaagatgccttgagcttctcattgcttcccatatccctaagcccttccttccttcctagcattcatgcacacagttccctcttggaatcttgtacttttccccattacctttttcacatatttatgtgttacataaaaccagagccattgctgcatgcatttgagcaaggtgcttaacttctcagggtttgattctttaactctaaaatgtctattctgtttcttaagttttacatgtatactaaagacaagagtgcttttgatttcccagttgctttgccattaaacttagaccacaggacccttcagcatgaatgaccaataacccaattgtgtagtacaaaaagtacagctaggtaccaaaaaaacaactggtttatctctgtcactacctctgccacagaagcactatttgtgggccctgtttcttcatttggtaaaatgaggggttgatccagaagaactctgaggtacttcccacttctaacattctctgataatcaagagttcacaaagaagagaatacttacttcacttcagttaatcaaagaagagatataaaaatccttaagacagtctctggccataaggacgaaagcacctaagaagcagattagtatatkgtctttttaacctttttaaagctaatacagtttcagccatgtctgccttacctgtaatacccatatgacagttgtgaaatgcatctgtaagaccatcacagagtatactgtcagtcagtggcatctcacctatctttactcctgttctcaagtaagccaagtgaggagcctagaagtcagaaataaaaatggatttaggcttagttgcaattagtcttctccccagaatacaactcaaaactatctagtatttcctaagtcttcatctaggcccctttgcagcccttctccccagttctaggtcctcagccaggccaaggtctaaagacccctggaattagcagacttcatctttcctattgttgggaacgattactctcctacctacccattttcaattctccctcaaacctacccattctgtgtcctgtttccttaagaattccatttattctttccatcgaggcaattaattatctgttaaatgaagaaatcctctaagggcttaagtaaagctaacaatgtgttacctatttcaatggatgacataatgtctacagtgagaataatcaggctaactaaatgatggggagggatttctgagtagcggccagtcttaactctcaccaactcaacagcaggtatattagaatggaaagagtcattgattggacttagagtcggaagagttgtatttgaatgctggctctggtcctcagtttccttacctgtaaactgggaatggtatcatctaccctatatggggctgttgtgaacacatgtacaaaagcacctggtaaagtactacacagatgtcagtgtcatcccatcaaaatcactccgattatttttgttacctttagcctgcctcctcctgaacctcagcaatggctgggctgaatcagcttctatctagggaatctgcacctcagcccctgagctgcatcagtaggaagcagggggtatagtttttctttcaaccactatgccagtttgaggtatggaacttggtgaaacaaatcatgcctggcaaacctactggagaagggcaccacttggtggtcctcttttacatgttctataccctgaaaaggtcaaaaagtctggtccccaggatctccttgtcatgtgcaggaaggtaagtggcaacatctgttttttgccttttactcacaatgggaaagaaatttaaaaccaaggacatcaagcaactaatatgaatttaattcagaaaatattacatgcttcattaatagtttagaaaaagtatattcggttccaatcacactggttgataaacttcttatcaacccggatttcccacccaaactgaagaatacttcacattcaagtagggatcaaggttgtcatttctgtttatttgttcactgtttggttccagctctgctatgcatctgtttactctgttctggcatagacatgagtttctcagtgtgaggtcagtgaaagccacctcatcagagaggccttaccttgctcatattttccatgcctcctgcaaccacaatgctggagtctcctatccctattgactggactgcaaggcacacagcttttaggcctgacccacagatcatctggcagctccatgctggaacagagtagggaattcctgcacccacactggcttgtctaacaggattctgcccacagcctagaaagaggaacacagaggactcttagcaatcaaggagaaagacaaaatgtcacagtgaaagtgtgtggaaaattgccagttgggttacctgccacttctgaaagcctacaggtcaagtaagtgcccactggaggcaaaaaggcctgtatacactctccacctgtcacagtctagcccttgaatatatactgccttgtgctgctctgtaggtatttcatagatataagctttctcctccataaataagtcattaatacattaagaaagaagtgtcatcctcatcttttgatatggcttaaatagttgggcgcggtggctcatgcctgtaatcccagcactttgggaggccaaggagggcagatcacctgaggtcgggagtttgagaccagcctgaccaacatggagaaactctgtctgtactaaaaatacaaaattagctaggcgtggtggcgcatgagtgtaatcctagttactagggaggctgaggcaggagaattgcttgaacctgggaagcggaggttgcggtgagctgagatcacaccattacactccagcctgggcaacaagggcgaaactccgtctcaaaaaaaaaaaagtgcgggggggtgcttaaataagcattatcaaacctatgtctaataaacacaggatataacctaggcattatcagtgtttctaactagggccatttgctcccaagatcatggcttaagacacttgagaagaaaaagggttacttaaaaaggaaaacctttgataataagcagttctgttcttgcttagtattcattacactatgcttaaatggttatataacaaaatatatacaaactcagaattcacaaatacctttttttctcattctgagtactgaaacacaaatatcttttcataattcaactatgggacttcctttagttgggaagaaatacataatttacttaaagtagcacagaagagaatggagttaaaagtttcaaatattctcaatcgccattgtctgttatcagagtcaatggtaaatgtttataaagtggttactctattcccagtttcagatatactcaaacctaccacccttccttggagagtttgtggggaagaactagcaaataagtcgctgataaaaacttagagattatattcatcacaatgttatcaatctgggattaggctggaaactaaaaacgggtaaggttacttgagactgaaaacatatgcaggatcatatacatattaaaaagacaggcccagtgcggtgcctcaggctgtgagcagtggctcacacctgtaatcccagcactttgggaggccgggggggggggcgcattacttgaggtcaggagtttgagaccagcctggacaatatggtgaaaccccccctctctactaaaaatacaaaaattagctgggcatggtggtgcacgcctgtaatcccagctactcaggaggttgaggcaggagaattgcttgaacctgagacagaggttgcagtgagccgagattgtacggctgcactccaccagcctgggcgacagagtgagactccatctcaaaaaaaagaaaaagaagaaatgaggtacagggctgggcatggtggctcatgcctgtaatcccagcactttgggaggccgaggcgggtggataacttgaggtcagaagttcgagaccagcctggccaacatgttgaaaccccatctctactaaaaatacaaaaattagctgggcacagtggcaggcacctgtaatcccagtcacttgggaggctgaggcagaagaatcactggaacccgggaggcagaggttgcagtgagccaagattgcgtcactgcactccagcctgggcaacagagtgggactccatctcaaaaaaagaaaaagaaagaaatgaggtgctaacacaattaataatgctagcatttagcatactacgagcttcatgagaatgagaatttctatctgatatgaacattgcttatctccagctgctaaaatagtgcctggcacaaagtaggtgctcaataaacatttgttacatgattgtagaaggtatctggctcaaggaataggacagatctaagttcaagtgctagctccacttcaaactgtgaccctggtaagtcatttaacctcttaaactctcatttattcatttgtaaaatgaagataataggatataacagacttgtgaggaagattaaatgaggtaatgaaaggaaagcatttagcacagtgctttaaaagccttaaacttagtagacatgcaccggtagtcccagctagctcagaagttcaagggcatggtgcaccatgattgtgcctgtgaacagccattgcactcacgcccaggcaacagacagactccacttctacaaaaaaatttaaaaaattagccaggtgtggtggcctgctcctgtaatcccagctactccagaggctgaggtgggaggataccgtggagcccaggagtttgaggttatagtgggctacgattgattacaccactgcattccagcctggacaacagagtgagaccctgtctctttaaataataataataataattaattaattaattacgagtgttcaaacccaaagaatcagaagatgggggcactctcaggactcagctatattcctctggggagtgatatgccccatttgcaaggggcatgatgtggcacctattttccaagctcagaactgagccctaagagggcagggaacttacctgtattgttggaaccatactcccagcactaagcacagtatggggcacataggaggaactgaatacatttttgttgaatgagtgacactttgaggtagtaaggaggagcaggcatactttcctatgcgtcaggctggccctgctgctgcttcttcttcttctttttaaaaggagtctcactctgttgcccaggctgaatggagtgcagtggcacaatctcagctcactgcaagctccgcctcccgggttcacgccattctcctgtctcagcctcccaagtagctgggaatacaggcgcccgccaccacacccggctaattttttgtatttttagtagaaacggggtttcaccgtgtcagccaggatggtcttgatctcctgacctcatgatccgcccacctcggcctcccagagtgctgggattacaggcgtgagccaccgggcccggccggccctgcttcgtaagaatgaaaaggcagtgggccgcctgtagtcccagctactcgggaggctgaggcaggagaatggcgtgaaaccgggagacggagcttgcagtgagccgagatcacgccactgcactccagcctgggccacagagagagactccgtctcaaaaaaaaaaaaaaaaaaaaaaaaaaaaggaaaagaaaaggcagtgtaggtggtgtaggtcagtggtctaagttcattcacaaaaagcatattaatgaagctaagtctttttgtttgtttagagaaggggtctcactctgtcacccatgacggagtgcagtgacacaatcactgcagtctcaaactcctgggctcaagtgatcctcccacctcagcctctccagtagctgggaggcacaggccatcatacctggctattttattttttgtagagacggggtcttgctttgttgcccaggctagtctcaaacttctggactcaagtgatccttcctcctccgcctcccaaagtgctgggattacaggcgggagccaccctgcctggccaagaagctgagtctcaagctggatagaagctactgacagggctggaagaagggggccaacaggaggaatcataacagagggaactctgagcaaaagcaaggaggcaagaacttgagtgagtgagagagtgtgtgagtgtgtgagagtgtgtgtgtgtgtgtgtgtttatgggctgtttctaataagcctgacttctcctggaatcactgagacttacctgctgccaagacatgtccaaagatgacctcagacacatcttccggagccacagtggccctcttcaagacttctttgatgacagtggagcccaggtcctggacaggaacagcagctaaggcaccattgaaggaacctacaatagaaaggcggagagcgtggacatcacaagcctgcgggtaatacgggaaccacctacgagcaggggagcctcatgaccctgtttggcaaggccacgcgaggaggcagtgccctctcctcccacacgttcctacacctgctggtctgagcaaaggtcaaggtgggtgccacaactcgcagcagccgagggctggacaggcgacctccagaacggcctagggacgccgctgtagcccttctatttccccaaatccgaaggactggatgcgaccccatgcttcccaaacaaaaggaaccggcgggtcaagggcgttgaaaaccatgcggcacgaaggagacgaagtcacgacttctagccattgtgtgacagcccgaccccagcccaaagccgggctcag

SEQ ID NO: 94755 - DNA, 12648 bp, Homo sapiens
tggatgacataatgtctacagtgagaataatcaggctaactaaatgatggggagggatttctgagtagcggccagtcttaactctcaccaactcaacagcaggtatattagaatggaaagagtcattgattggacttagagtcggaagagttgtatttgaatgctggctctggtcctcagtttccttacctgtaaactgggaatggtatcatctaccctatatggggctgttgtgaacacatgtacaaaagcacctggtaaagtactacacagatgtcagtgtcatcccatcaaaatcactccgattatttttgttacctttagcctgcctcctcctgaacctcagcaatggctgggctgaatcagcttctatctagggaatctgcacctcagcccctgagctgcatcagtaggaagcagggggtatagtttttctttcaaccactatgccagtttgaggtatggaacttggtgaaacaaatcatgcctggcaaacctactggagaagggcaccacttggtggtcctcttttacatgttctataccctgaaaaggtcaaaaagtctggtccccaggatctccttgtcatgtgcaggaaggtaagtggcaacatctgttttttgccttttactcacaatgggaaagaaatttaaaaccaaggacatcaagcaactaatatgaatttaattcagaaaatattacatgcttcattaatagtttagaaaaagtatattcggttccaatcacactggttgataaacttcttatcaacccggatttcccacccaaactgaagaatacttcacattcaagtagggatcaaggttgtcatttctgtttatttgttcactgtttggttccagctctgctatgcatctgtttactctgttctggcatagacatgagtttctcagtgtgaggtcagtgaaagccacctcatcagagaggccttaccttgctcatattttccatgcctcctgcaaccacaatgctggagtctcctatccctattgactggactgcaaggcacacagcttttaggcctgacccacagatcatctggcagctccatgctggaacagagtagggaattcctgcacccacactggcttgtctaacaggattctgcccacagcctagaaagaggaacacagaggactcttagcaatcaaggagaaagacaaaatgtcacagtgaaagtgtgtggaaaattgccagttgggttacctgccacttctgaaagcctacaggtcaagtaagtgcccactggaggcaaaaaggcctgtatacactctccacctgtcacagtctagcccttgaatatatactgccttgtgctgctctgtaggtatttcatagatataagctttctcctccataaataagtcattaatacattaagaaagaagtgtcatcctcatcttttgatatggcttaaatagttgggcgcggtggctcatgcctgtaatcccagcactttgggaggccaaggagggcagatcacctgaggtcgggagtttgagaccagcctgaccaacatggagaaactctgtctgtactaaaaatacaaaattagctaggcgtggtggcgcatgagtgtaatcctagttactagggaggctgaggcaggagaattgcttgaacctgggaagcggaggttgcggtgagctgagatcacaccattacactccagcctgggcaacaagggcgaaactccgtctcaaaaaaaaaaaagtgcgggggggtgcttaaataagcattatcaaacctatgtctaataaacacaggatataacctaggcattatcagtgtttctaactagggccatttgctcccaagatcatggcttaagacacttgagaagaaaaagggttacttaaaaaggaaaacctttgataataagcagttctgttcttgcttagtattcattacactatgcttaaatggttatataacaaaatatatacaaactcagaattcacaaatacctttttttctcattctgagtactgaaacacaaatatcttttcataattcaactatgggacttcctttagttgggaagaaatacataatttacttaaagtagcacagaagagaatggagttaaaagtttcaaatattctcaatcgccattgtctgttatcagagtcaatggtaaatgtttataaagtggttactctattcccagtttcagatatactcaaacctaccacccttccttggagagtttgtggggaagaactagcaaataagtcgctgataaaaacttagagattatattcatcacaatgttatcaatctgggattaggctggaaactaaaaacgggtaaggttacttgagactgaaaacatatgcaggatcatatacatattaaaaagacaggcccagtgcggtgcctcaggctgtgagcagtggctcacacctgtaatcccagcactttgggaggccgggggggggggcgcattacttgaggtcaggagtttgagaccagcctggacaatatggtgaaaccccccctctctactaaaaatacaaaaattagctgggcatggtggtgcacgcctgtaatcccagctactcaggaggttgaggcaggagaattgcttgaacctgagacagaggttgcagtgagccgagattgtacggctgcactccaccagcctgggcgacagagtgagactccatctcaaaaaaaagaaaaagaagaaatgaggtacagggctgggcatggtggctcatgcctgtaatcccagcactttgggaggccgaggcgggtggataacttgaggtcagaagttcgagaccagcctggccaacatgttgaaaccccatctctactaaaaatacaaaaattagctgggcacagtggcaggcacctgtaatcccagtcacttgggaggctgaggcagaagaatcactggaacccgggaggcagaggttgcagtgagccaagattgcgtcactgcactccagcctgggcaacagagtgggactccatctcaaaaaaagaaaaagaaagaaatgaggtgctaacacaattaataatgctagcatttagcatactacgagcttcatgagaatgagaatttctatctgatatgaacattgcttatctccagctgctaaaatagtgcctggcacaaagtaggtgctcaataaacatttgttacatgattgtagaaggtatctggctcaaggaataggacagatctaagttcaagtgctagctccacttcaaactgtgaccctggtaagtcatttaacctcttaaactctcatttattcatttgtaaaatgaagataataggatataacagacttgtgaggaagattaaatgaggtaatgaaaggaaagcatttagcacagtgctttaaaagccttaaacttagtagacatgcaccggtagtcccagctagctcagaagttcaagggcatggtgcaccatgattgtgcctgtgaacagccattgcactcacgcccaggcaacagacagactccacttctacaaaaaaatttaaaaaattagccaggtgtggtggcctgctcctgtaatcccagctactccagaggctgaggtgggaggataccgtggagcccaggagtttgaggttatagtgggctacgattgattacaccactgcattccagcctggacaacagagtgagaccctgtctctttaaataataataataataattaattaattaattacgagtgttcaaacccaaagaatcagaagatgggggcactctcaggactcagctatattcctctggggagtgatatgccccatttgcaaggggcatgatgtggcacctattttccaagctcagaactgagccctaagagggcagggaacttacctgtattgttggaaccatactcccagcactaagcacagtatggggcacataggaggaactgaatacatttttgttgaatgagtgacactttgaggtagtaaggaggagcaggcatactttcctatgcgtcaggctggccctgctgctgcttcttcttcttctttttaaaaggagtctcactctgttgcccaggctgaatggagtgcagtggcacaatctcagctcactgcaagctccgcctcccgggttcacgccattctcctgtctcagcctcccaagtagctgggaatacaggcgcccgccaccacacccggctaattttttgtatttttagtagaaacggggtttcaccgtgtcagccaggatggtcttgatctcctgacctcatgatccgcccacctcggcctcccagagtgctgggattacaggcgtgagccaccgggcccggccggccctgcttcgtaagaatgaaaaggcagtgggccgcctgtagtcccagctactcgggaggctgaggcaggagaatggcgtgaaaccgggagacggagcttgcagtgagccgagatcacgccactgcactccagcctgggccacagagagagactccgtctcaaaaaaaaaaaaaaaaaaaaaaaaaaaaggaaaagaaaaggcagtgtaggtggtgtaggtcagtggtctaagttcattcacaaaaagcatattaatgaagctaagtctttttgtttgtttagagaaggggtctcactctgtcacccatgacggagtgcagtgacacaatcactgcagtctcaaactcctgggctcaagtgatcctcccacctcagcctctccagtagctgggaggcacaggccatcatacctggctattttattttttgtagagacggggtcttgctttgttgcccaggctagtctcaaacttctggactcaagtgatccttcctcctccgcctcccaaagtgctgggattacaggcgggagccaccctgcctggccaagaagctgagtctcaagctggatagaagctactgacagggctggaagaagggggccaacaggaggaatcataacagagggaactctgagcaaaagcaaggaggcaagaacttgagtgagtgagagagtgtgtgagtgtgtgagagtgtgtgtgtgtgtgtgtgtttatgggctgtttctaataagcctgacttctcctggaatcactgagacttacctgctgccaagacatgtccaaagatgacctcagacacatcttccggagccacagtggccctcttcaagacttctttgatgacagtggagcccaggtcctggacaggaacagcagctaaggcaccattgaaggaacctacaatagaaaggcggagagcgtggacatcacaagcctgcgggtaatacgggaaccacctacgagcaggggagcctcatgaccctgtttggcaaggccacgcgaggaggcagtgccctctcctcccacacgttcctacacctgctggtctgagcaaaggtcaaggtgggtgccacaactcgcagcagccgagggctggacaggcgacctccagaacggcctagggacgccgctgtagcccttctatttccccaaatccgaaggactggatgcgaccccatgcttcccaaacaaaaggaaccggcgggtcaagggcgttgaaaaccatgcggcacgaaggagacgaagtcacgacttctagccattgtgtgacagcccgaccccagcccaaagccgggctcagaccacctagcagttccgcccctgccgcaggcattaccgatggcgcctcccggagccggccaatcaggggccccggaggagaacacctccctacgccaaccaatgggagaggcaggccacgcgatggctctaccccgggagccaatccaagcacgagggacggagtacgcacatcgggagaggagagggtggggctgtagcaccaggtcagggaacgcgggagccgcagggttccagggatcccgcggctcctcgcggcttggcctgaccggcttcctccacatacgcccctctcctacacaagtccggccctcggcgctcctgccgaagcagcaggcgcctcggactctgcgcggctcccgccggccactcacctatgatggtccgcgccgccgagacgatgaccacaggatctgagcctgcattcatcttgcttctcctgccgccgtctgccctgcgctgcctgcaagctaggcaaagctcctcctcgcagcccacaggcctgccgcgggcgggacctgaggtagccccgcccctcgccctccacctccccgcgcaccacctccccgcgcatcccactgtgcgcaggcgcaaggccggagcaggggcgggcggaggcgcgcggggcgcggggcgcggggcgcggggcggaagtgaggccggggcgcggggcgcggggcggaagtgaggccggggtctgggcytgcgggcagaaccgcggacctcggacgcatttacagagcgcctgaaaccccagtgtttctggacaccccaatgttggagttccccgacttgacgtyttgggcttttttttaaaaaatcttagggtttctcgaaacagtaaagactggggggtgacaaagacttatctctcgttcagctcaggactggaatcccacgggcgagaatctcgagtgcgagcccggcccgcrgcgggtctcagcacagctctgatgggtccttttgctctcggcggcttcgggaggtcctatgcgtttctcctggcgccagtcattcgctcgcgtgaggggcttgctaggagcgtctcggtgcgagccccctgccttctaagatcaactctggctgtgaacgggtgaggacgccgggagcgtcttagcgtcacaaaagttcctttggttgacgtttggacagtgaaaggagcatgtaacaagtggggtcagttttgtttaaaaccctttctgacttcccagcctcttactgggcaaagttcataatttttctgagctttctagggtttccaggcaagcttatgaggggccaccgttacagcaacttgttgggaacacctggatagtggaacaagaaagctttgtcacaaagtcatgaaggggaaaactgttgacggacctggagaatcttcctgaagaactttaaagttgattgaaagaatcattaaatcctggaaacctacattaagactttgcagagatatgcggatgggtcagataaatcagagaaggtaaagagtgtaggccccagaggtggggcaatagagaaggaaaaaaattgcataacagtgcaatttcaggagaaatctttagggtctggaatagtggtgaaatcagctgtctactctgctaagaactcagcagcacactgaagtctcttcagttgtcttcaatgtgtttcctgtcccctaacatatctgagtccaaggaattcaaggaatgcctcccgtggcttttgctctattctatcccattttccccttactccctggccacttctgagtctttgtgggcttactctcacatccccttaacatgttccccaaggctcctactttgcaccagctccctgggtaataccagtcattcctacggcatcaatcaccacctgtatactgacaagtctgaaatccttacatctaacctcgtctcctaagctgactgaccctcttcatttaaattcttacaagcacatcaggtcgggcaccttggctcacacctgtaatcccagcactttgggaggccgaggagggcggatcatttgaggtcagcagtttgacaccagcctggccaacatggtgatatcccgtttctaccataaaatagaaaaattagccgggcgtggtgccgtgcgcctgtaatcccagctactggggaggctgacatgggaaaatcgcttgaacctaggaggcagaggtttcagtgagccgagatcacaccactgcactccagcctgagcgacagagagaaactgtctcaaataaataaaatttcctataagcacatcaaatttgacatattgaaaccaaactcttccagcctgtttcttctgtaatctcagtgagcagtgaaactatcttctgttaaccaaaccagaaatttacctctgaaactccccctaaacatcacttcttccagaaaaaccttccaatctcctgcatttggtgcagcatcttacccctaacttcctctttcaacttaccatgtaattcctagtttatctgtctcctctactgactacataagctttccaagatgatcctgttacactgctttatgcacagctcctagcacattataggcagttatgaatgaacaccaatattctttatggccagtgcctagcacatttgaatgagtatgaatatattcttctggagccaagggatatagagtttcctgcctgaaggctctatctagagtaagtttaggagccaatcttgagaaggtaattgcatgcttctgctgagtggccaaacagaatctgtcccctgaggagtcctcattatagctactcatatgattatctactcatatgagacagacagagactaagaataatgaatgaaggaaagaagaggaattttttttttttttttgagacggagctcgctctgtcacccaggctggagtgcagtggcgctatctcggctcaccacaacctccacctcccgggttcaagcgattcttctgcctcagagtcctgagtagctgggattacaggcccgtgccatcatgcccagctaatttttatatttttagtaaagacggggtttcaccatgttagtcaggctgatctcgaactcctgaccttgtgatccgcccacctcggcctcccaaagtgctgggattacaggcgtgagccaccgcgcccggccagctggaagataatttttaaaattatgtcttggccggccgcggtggctcatgcctgtaatcccagcactttgggaggccgaggcgggcagatcacctgaggtcgggagttcaagacctgcctgaccaacatgcagaaactctgtctctactaaaaatacaaaattagctgggcgtggtgccacatgcctgtaaatcccagctactagggaggctgaggcaggagaattgcttgaacctgggaggcggaggttgtggtgggccgagattgcaccattgtactccagcctgggcaacaagagcgaaactccatctcaaaaaaaaaaaaagaaataaaataaaattacatctagatctcaaatcataaactacctggactggtgagcagggtgagtgggcaggaagccacaaaaatctccaagtgcttactcatgaggagccatcattacagcagtgctatggagccagtttatcctgaaggggccttctcagcatcttcccccgctggaagatgcaatcattcttggttaagtttcataaagagttgcaggagtccaagccaggtctttgctacaggctggattcaccaacctaccatgcagcaaattcctccttggtctccatgaggggaacagtgaatcaccaaagtggaattgccataggatgaaggtcagcagtgtactccttaccactaggggctagctcaacactccctcagcacagccaccccatgatgggtccagatcagttaatgacattacctgggattatgaaagtgttcactataaccacagggataggtgaactcccaagacagtgacgtagagcagcaggcaatgatttgagtacagggcataactactcatgaaagagggaacatctgagaaagaaagttgtcagaaggaatggctttacattgttttgcaaaagtgtctcaaaaactggagtagtcagttgtatccaatacacctgaggagccaaggaaactgacatctattgcgctctctgtatgaggactaccaggaaccaaactggggcaccaatcagggggcactgtgatctttagacttcccagcctccaaaaacagtgaggaatgcgcgtgtaaagccacccagtctgtggttttttttttttttcacagcagcccaagctaagacagcagtgagtgctcttacaggggagaaaaacaaaacaaaatatcgagcctcgaggatacatttgcccaaatcagttaagtgtaataccaggattcaaaccaattagatgcagaagccactctatcacctctcttatcacaggcataccagaaaataaagcatccaattccagaaatgagaaatactgactctgtgtaccacagaataagtgctctgagttattcatcaaggcagactcaacagaaacatgaaaatgtcacattaacaggtccatattaaattcagtcataaaattgtatcactggttgaaaaattaatttcctatcacaaactcttgattacattacaccaacaggacagagaaattacatttttgtttaaattggtcaagttgaaggatgtacataacaaaagccaaacacagtatctgatatatcaaacaccaaaatgtttaatcacatgcaaattaaaaatcgtataggattttttactcacttgagcagactgtagaaaaggttaatcaaggttgggcgcggtggctcacacctgtaatcccagcactttgggaggccgaggtgggtggatcacaaggtcaggagttcgagaccagcctggccaacacagtgaaacctcatctcttctaaaaatacaaaaataagccgggcatggtggcgcacgcctgtaatcccagctactcaggagtctgaggcaggagaattacttgaatccgggaggtggaggttgcagtgagccacgatggtgccactgcactccagcctgggtggcagagcgagactctcggcaaaaaaaaaaaagagaaaaagaaaaaaaagaaaaggttaatcaagagacagtgcagtatttaacatactgctgaagaccggatatacctgtatcagctaaacaagcaaaagcagcaattactttcaaataagttgtacctcagttttcgagtattataactccactcccaaggttccttgattgtattacaagttatgtctaaaacaatactttgcttttaacagaaatggaatttcatttcaaccatatatgaaagctacacatttgaaggccattcaatatcatacttttatacttaattacctctgagaaaatggagcaaattttgacattcttccaccttaaaaacattttctcctacctacattctaacaccccttactcatataatattaccagatatgttgttagtaaaaatcagtagtgctggccagcgttttaaaacaaacatcactgactacaaagatactctacttgaaatcaggtcacaaaaaaccaacgctgcttttcaattaaaactcaaaaagggccaggagctgtagctcactcctgcaatcccaacacgttgggaagccaaggcagaaggatcccttggggccaggagtttgaggccagcctgtgcaacatagcgaggccttgtctctactaaaattaaaataaatgtagctgggtgtggtagtatatgcctatagtctcaggtactcggaagcctgaagtgggaggatcacttgagtcgaggactttgaggctgcagtgagccatgactgcaccactgcacttgagcctaagtgacaaagcaagaccctgtctcaattaaaaaaaaaaaaaaaaaaaaaaagcctaagaaatagatgactattttctttatacttttctgtattttaaaatattttgtaacaattataagtcaagaaaaaattttaagtgtagccctaaactccagctccgttttgcaaaataaggcataaattaaaaattgtgtgcaaaatcgtaatcgatgcttggtcttaagtttgactgttgtggtacttgaaggataatgagtagaaattcaatgactcaatgaaaatgacaaatgctaaacatacacccaaaacaaaacaaaaaagctaattaaggagttacaataaaaatctttatttaggtttggtcagtacaggtaagatatactggagtcacagagcaatatgcattaacaggatacaacagttcataaaaactgagtaactatgcacacaaatttcttaaacagtcacctaaagagaaaatgcacagatgtatggtggaaaaaactgtatctaacactgaaactactacaggactccatcaatgagtccaacttttagtgataaaaaactactgtactgggcaaacttggcagtcataaacccacatctactctaacaagtctgaatggtgcataagtacagtaacagcatgagtacgaatgcccttacacagcacagattctaaacagacagatttatacagacatcattgtgttgtattttaaggaaaaatttccatttacaatttcacattaactcatataaaaataacttgaccctacacaaaatgtccttttagcaacattcaaagtaattaactgttacaatttccaaagcggcagaagtattgaagcaaaaaaaaaaaaaaaaaaaaaaaaagaaaagaaaaaaaaaacaaagaaaaaaaacaacaaaaaaaaaccaaaacgtacacccacaaaaaggcaaattgtgacaaaagtatgcattaattttctggacagtatcctctcccaaattaaatgacactgtataaaaatttgctgaaaaaatattacaaaactgaaccctgtacatttacacttgagtccaagccattctgaacgtggcgggaacccacagttcgattacctttcccactcactgctttctcctcttgagggtcatgact

SEQ ID NO: 94756 - DNA, 65951 bp, Homo sapiens
  misc_feature (1)...(65951): n = A,T,C or G
atgctatccctcccctagccctccacccgctgacaggccccggtgtgtgatgttccccttcctgtgcccccgtgttctcattattcaattcctacttgtgagtgagaacatgcggtgtttggttttctgttcctgtgttagtttgctaagaatgatggcttccagcttcatccatgtccctgcaaaggacattaactcattcttttttatgttcagccaccatttcttccaatcgagtgcatactaaaataatatctctgaaaggtaatgaatgaatttggtatcctttttttttgagacagagtctcactttgttgcccaggctggagtgcaatggtgtgatcttggctcactgcaacctccacctcctgggttcaagtgattctccttcctcagcctcccaagtatctgggattacaggtgtccaccaccacccctggttaatttttatattttttagtagagacggggtttcaccatgttggccaggctggtctcaaactcctgaccttaggtgatccacctgcctgggcctcccaaagtgctggggattacaggcgtgagccaccacgcccagccctgaatttggtatcttcaattgcctctgggaatggtaaaatggatttgtagggtgacaagaatcgtagaaatacttctcactatataaccctttatatcatttgattttgcatcatgtgaatgcattgcctatccaaatatataacataaaatggaattaaaaaaacaactcaaaactttaagtccaagtggaagaactggatttagacaaaggaagatacacattcattgggacgtgaggcaaaaaccaaaaggcagatgtgaggcaaagaagtttgtaagttggagggtaagagtattaatttaggttaagctcagctgcacataaaacccaaaacagccataccttagacatataatgtctgaagttggcagtccacttctggtatggcagctccacaaagtcagcccacacttcatctgttcaattctgctgtccttgtcaacctaaagtttgctctggttagtagttggctgcttatgttctctacaccttgggtgtgtgtggtttttttgtttgtttgtttctttgtttttcgggtttttttttttatactgcgtcttgctctgtctcccaggctggagtgcagcggcacgatggctcactgcaacctccgcctcccagattcaagcaattcttgtgcctcagcctccagagtagctgggattacaggtgcccgccaccacgtccagctaatttttgtgtttttagtagaaatgaggtttttatcatattgcccaggctggtctcaaactcctgggctcaagcaatccacccacctcagccttccaaagtgttgggattacagatgtgagccactgcgcccagccttcttttccttgttctcacctggtgaaaagagagggggaggggtggagggagatttctatggcttctccttttaaagatgccttcctaaaagttctacacaacactttcactgccagaagttagatccatggtcacatctagcagcaagagtgtctgggaaatagtccttattccaggtggtctgattttatcaaccaggttctgttatgagaatgggtatttggcatccagtctctgccgcagtgagcaagctgagagaatttctttttttttttaattattattttttgagacagggtcttgctgtgttgcccaggctggagtgcagtggtgtgatctcggttcactgaaagctctgcctcctgggttcaagcaattcgcctccctcagcctcccaagtagctgggattataggcacgtgccaccatgcccagctaatttttgtatttttagtagagatagggtttcaccatgttggacagcctggtcttgaactcctgacctcaggtgatccacccacctcggcctcccaaagtgctgggattacaggcctgaaccaccgtgcctggcccaagttgagagaatttctgatagcttctatttctttgaggttggaggcatagtacttcactgaaagggcagaaagggctgggtagctgcctttctggggtaaaagtctgaaataggttgggtgcactggctcacgtctgtaatcccagcactttgggaggctgcagtgggaagatcatctgaacccaggagttcgagaccagcctgggccaacatggtgagaccttgtctctacaaaaaatttaaaaattttctgggcttggtgtcatgtgcccgtagttctagctactcaggaggctgagacaggacgatggcttgagcctagtgggtcaaggctgcggtgagccgagatcctgccactgcactccagcctgggggacagagcaagaccctgtttcaaaaaatgaaagtctgaactaatgggaagagtgagacataactgaagtgagacaggcagaaaaatgtttcggctgggttagaaagacatgaaattatggcgcatcaatcttcacagagatgtgattttcttcgtagcattcaacagcctggtattagcagatcagtgatggaagctgttgtttaggaagaatgtgtataaggttagtgaagaacactggtgaatctgtcccagtctgttactgcagctatggtgtgacataatctaaaaattcagtaaatcttacttatggttagatttttctagccttatacatactgtatcccaggagatggctcaaatgtttgaagtatagaagaggaatgccagatgcatcaaccacgtgagtgaagttaataaactggccctaaaagtcctttccaatttctctcatgaaatgtaaaaagtgtctcaaattcttttatgtatttattttttgagacagagtcttgctctgttgcccaggctggagtgcagtggtgcaatctctgctcacggcaacctccacttctgggttcaagtgattctcctgcctcagcctcccgagtagctgggactacaggcgcccaccagcacacccactaatttatgtgtttttagtagagatggggttttgacattttggccaggctggtctcaaactcctgacctcaggtgatcctcctgccttggcttcccaaagtgctgcgattacaggcgtgagccaccacacttggccctcaaattctttgaaattattttatttattctacaaatatctaattaacacctacaatatgccagacattgctctactcaaatggacaaagtatctgacttcattaagtttactcactggggcaagagaaacaaatatataatgtgaagaaggtcttcatggccattcaccttctgtgtaattccaggggtcacagtacctcttgcaacagtcccccaatctattctctctcccctccaaaacttcctacgtttagctgtcaaattaatcctcctatttgctatataacttatgtcttcatttgacacctttcaatgggtccccttttgtctactgaataaagtttaactctttagctggcacctatctttctacctcttttcccctaacttgtttttgtgtgtcctgtgattctgccaaattaacctgaccattcaccaggaaaatataatctcagattttctgagtcacagtttggatacaatcattttagaagggtggtggttgtagaagccacactgtaaaagaagaaatgactcctagtcatgagagtggtacacaaatattctgcttcttcaaggcacaatgcagagatgaacacctgcatttctttgaagtcaggcttgaccagtgacttgctctggccaaaaatatgtaggcagagcagcaagtttcacatccaggcagaggctgtgcaatttatttccctttctttttttcactgccaagggtcccactgcctgcatccactcaagctatgaacataaaaagtagataagaaaaaaatgctattgttgaagcctctgtgacttagaggttgctacagcataacccactcctgcctgactagtacagctagtaaagaaatggaagtagtgaatgtaagccactctctggaggtttgtctttccacctaaaaaaagtcttcagccaggagcggtggctcacacttgtaatcccagcactttgggaggctgaggcgggcagatcatgaggtcaggagttcgtgaccagactggccaacacagtgaaaccccgtctctactaaaaatacaaaaattagctgggcatggtggcgggcacctgtaatcccagctactcggggagggtgaggcttcaacctgggaggtggaggttgcagtgagccgagatcgcaccactacactccagcttgggcgacagagctacactctgtctcaaaacaacaacaaaaacccaaaaaatcttcatatataatacgcgtacgtacacgtaataaaatgtgcccagtttgtgtactgttgatgaattttaataaatgtttacacctgtgtaagcactaccctaacagaacatttcctttccatcaccttaaatatttcctggggactttcagcaatctatttcttctccccctcctcctgaatacagcctcaggcagccaaccactgatcagctattattatagattagttttgcctgttctaaaatttcttttctttttcttttttttttttttgagacagagtcttgctctgtcacccaggctggagtgcaatggcgcgatcttggctcactgcagcctctgcctcctgggttcaagcgattctcgtgcctcagccacccaagtagctgagattacaggtgtgcgccaccagacccagctaatatttgtatttttagtagagacggggtttcaccatgttggccaggctggtctcaaacgccttgacctcaagtgacccacccgtctcggcctcccaaagtgctgggattacaggtatgagccaccgtgcctggcctagaatttcttatcaatggaatcatacaatatgtattaattttgtggcctttgagaagttttttaactgtaaattggctttataaattagcatacctttgaactcacataaaggatgaaggttgaattagggtaattaatctgtacctccctgaattggttttgattccaaaaatatatactaaatatagtttcctgttccctattacaatagagttcatatttactacagtgaaactatcattttccactcagttgagacgttacaagactttaagccccatgaaacattctatttcgtgaccactgtatacccagtgccaacactgtctcacacatagtagttgctgagtaaacatttgttgactgaatggatgtatttcccctgaattgcttctacatgtctatgttagatgactggggtgcttttatttttttagagatagggcctcactttgtctcccagactggagtgcaatggcgccatcatggcccactgcagcctccaactcctgggctcaagtgatcctcttgtgtcagcctcctgagtagttgtgactacaggcgtgcgccaccatgtccagccaatttttgtactttttgtagagacggggggtctcactatattgcccaggctggtcttgaactcccggctcaagctattctcccgcctcagcctcccaaagtgctgggattacagggatgagccactgtgcccagtcgggatgctttaatgttagaaacttaattaccttgcgtttttaaaggaatgtgtgagaagtgccctattctgcctcaagtgatggcagagggtggagattgagactggaggaagccctgtgcagtacatatctgtaagtcatgaaatagcatcattttccttgtctggtcatattaaaacggtgattaaaaaatcaagaaaataaaatcccactagcagtgtgtccgagaatctttgtttacctcctccctattgttatgtcatgacatggagcccagctggggaattctgaatactaggttctaaaacaggatttgtcataaacgaattgcttgatcctggacattcacctctaaaatagacacctgacctcggtgtgtgtgtgagtgtggtgaaaatcaagtgggagggaaagtgagcaagcacctgaacaaggtacagaggcgcgcgaggtagtaccataataccatctacaccaaggtctatactatccctggtctccgctgygtccgccgggaggaggcggtgcaagaatgcgcacgcgcggccccgggcccggccacaccctcttccgccgctcccgcccagcgacctcgctcccggggcgacgccccgcgtgcgccagagtcgccgaggtcgtccccggcaccggaagtgaccctggcgggtttgtcttcaaattctcggcgagcaggagccgcgccggcaggtggtgttgacgattgaactgggcagtactggggccgtgagcggagagcaaagtgggctggactgggtcaggccctccttcctcgctgccgggatctccactccgccaatcccctgtgcctggcgttgggcggtttcccgaggagcttgggccgccgcaggtgagttttcactctggcggtgctctggggacccccgattttccagggccgggctggtgagggactcggggggcccacagcgagaacccgccgcgcaaccctccgtgagcctgcctgtgcctgagctgaggtcctaggtccttgctgttgtccacgataacttggcttaggtgacagtccccctacctgaggaatcctgtcaggcggaggacttttcgggggctcctgtcgatcccatcttttgatctgtgtcgttagcgaagtcaccagccgagtttttagttcttcgatttttcgactggttctctccagaacccgctcacgccccccaccccgaaaccctcacaggtaaaaatcccgatggccatgacattgggaggcaacttcttttcttaaaatttgttaggttcgagtgatattgttggggatgttatttcttatttattctagagcccggcgtcctctggaaggcctgtgggccttttggtttagagttggtaccttttagaaaagttttccctcgaaacagttgtttcatacaaatgtgatgacaaagttagagataaacgtagatcctgaagtgccttacagtggataatctcaagctcttatttaatcaaaaatagtttcctgttaaaaccgcgaagggccgcttttatattagttactaacttccaacagcacagtgatgctcttttctcttgaaagcactaatttacgtcttcctctttgaaattagacctctagttattgctgaaaacattcccgatgttttagaatgggtgcagtagatctttgtcacgtaatcacaatgataatcaccttagtagatgttaagacagattcttgaaatgtttttacgggcttaaatgtctcagtataaagccctattttcttttccaaaagagctgggttttgttctttttttttttttttttttttttttgagacggagtcttgctctgtcgccaggctggagtgcagtggcgcaatcttggctcactgcaacctccgcctcccgggttcaagcgattcccctgcctcagcctccttgagtagctgtgactacaggcgcgctccactacgcgcggcaaattttttgtattttagtagagatggggtttcaccatgttggccaggctggtctcgatttccagacattgtgatccgcccgcctaggcctcccaaagtgttgggattacagacgtgagccactgcgcccggccggtttttgttcttataccaagaaataggagcaaaactttgttttgtattaacattaacaagttgtggcctgtaaatacctttaaaaaaaaaaacacgcagtagtgatcaacttcccaacattcctagactatgaaaagctatataaagcttctttatagcgttggttattcaagaagcgtttacatttttataggtaataggcatgctatgtagtccacragggattctccacctcattttgaaactggtatcaagatgctgacaaatattgaggattagagaatcttgttgaattcactctattaacaacattgttgaatttctattaacaatagtttgggtttttttagccacttgactgtttaaaaaagatagtattatcacataaatatggtcagtgttgataacatgccaaatagcttttgcttgtggcgtttatcgatagggcttgaatatgacttttaaattacgttttaataattaaactcactgatttgtttgtttagggtaaactgaaagtttactgtacaaatagagtggactttatatgtactttttttctgaacaggttgctttttggtgtttttaaaaaatagtggtaactttcttgtgcttaagtatttatcatatgatggttataaaggtaagaaaaatgtatgccatgctgtaattggtcatgggtcattcatttattgtgcttattcgtaatcatcagtggctgactataaattagcatgtggtttctttcatatcccagagatgaacattctgaaaattacttaccaatgtatggccacttttgaagtcatatacacttgctttactgaaatgccttcaggaagatgcatgattgggcttcgtgatctttttgttttaggaggtaaattttacagagaggtatttaaaaaacactttcagccttccaacattgctgctgattttttagtctgtgtttaataatattctatgtttgtcttctcttactaagcaaagaaaacccacctagaataaataaggtgatatcccttctattaaacttcaaggatttcaaggtctaattctgtcttatttttgtcttcagtgcaattccttgcaacttagttggtgttcctttaatatttcttgaatgaatgacccatgcacattatgttaaaaaaaactgcaaataagtggagcccagcctgagtcctttaaaaattaaatgggtaaggtatcctctttaggtgtgaaataggcagggccctgtatttgttgtttagagagagaataagaatcttagaactcagatatttcratattttgcctgttctttttcagtctctgtgatcacttctttttcctaatcctagaggagaaaaaaaaaaactttctctgtggagagacagcactgcatcacatactatattgctagaaaatttgctgtaaaattgcgatttcagtatttttaaaaatttgattctgtcacttgagttaaaatttcacattgcatcttgcttactctaagtaagttaatttagtcattagctaactcataaatactcaaggcatgtaagcaaaagggtggttctgttagaataatgtaaaggaaaaacttgctgtgaataaagcaggcatagtgtatggttatccttctctctaataatctgtgtaaccaagagcctgaattttggggcaatctcatctttataagtgttctattaatgttgaaccaatagattgtgtttatagttcatggtgcttacactgagtcagtcagcttttttttctttcttttttttttttttgttttttgttttttgagatggagtcttgctctgtcgcccaggctggagtgcagtggcgcgagcttggctcacttgcacgctctgcctcccggttcatgccattctcctgcctcagcctcccaagtagctgggactacaggcgctggccaccacgcccggctaattttttgtatttttagtagagatggggtttcactgtgttagccaggatggtcttgatctgacctggtgatccacctgcctcggcctcccaaagtgctgtgattacaggcgtgagccactgcgcgcggccagctttttatttcaaatggattcaattcttcaaatattgccagatattgtgcttaatacagccagtttctagtcttcctgcagtggaattttagcaatgataaagatatattgttgaaaattgggataatttcataaatttacagttgtgacattcgagaaggatgttttgggcttagagagtaataagggaatggggaaaattattttcggctaacaattagggaactaagagtgctttaatactattttctgcaagcacattgtttctttgataatcagggatttttcaagtcatttgttaatgtggccttggattagactttacattcatgtttgttagaaaatatcaattcattggcttctaaagaattttatctgactagaaagagttcaaaacatggaacctttaaagaaggcttggagggacttgtatgagttttgggccgttgaatcatggccctcaagaaaaaaacgaggaccacctatatataagtaacaacttaatttaaatttatttttattttattttattttatttttttgatacagagccttactcttttacccaggctagagtgcagtggtgtgatcacagctcattgcatctttgacctcctgggcttgggtgatcctcccacctcaacctcctggtagctgggactacaggtgtgccctgtcatgcccagctaattttttgtattttttgtagagacagggtttcactatgttggccaggctggtcttgaactcctgggctcaagcaatcctcccaccttggcaccccaaagtactaggattacaggcgtgaaccaccatgcctgactattttagattttttttagtgggaaaatgggaagaaagatctccagggagactattaaggaaaagagggagagaggctttcatgtcaaaagacatgaaaggcttttgacatccaagctcatctagaacaactatatacttttagcagcgggtcccaattatacttttctaacacccttgccnnnnnnnnnnnnnnnnnnnnnnnnnnnnnnnnnnnnnnnnnnnnnnnnnnnnnnnnnnnnnnnnnnnnnnnnnnnnnnnnnnnnnnnnnnnnnnnnnnnnnnnnnnnnnnnnnnnnnnnnnnnnnnnnnnnnnnnnnnnnnnnnnnnnnnnnnnnnnnnnnnnnnnnnnnnnnnnnnnnnnnnnnnnnnnnnnnnnnnnnnnnnnnnnnnnnnnnnnnnnnnnnnnnnnnnnnnnnnnnnnnnnnnnnnnnnnnnnnnnnnnnnnnnnnnnnnnnnnnnnnnnnnnnnnnnnnnnnnnnnnnnnnnnnnnnnnnnnnnnnnnnnnnnnnnnnnnnnnnnnnnnnnnnnnnnnnnnnnnnnnnnnnngttctaggtgctagagatgtatcagtaaataacagagagatatggtccttggcctttaggcttttattaagatagaatatgatcagtggtcatgaatcccagggaggcaagatttaggtgataggattttattccttttcttttggagctcagatgcccagtcttgagttactcatagaccttagttcatagctatattgcttcataacagattatcccaaaacttggtgacttaaaacaacagacattttttatctctttcactgtttcactgggtcaggaatttgggcatgacttagctggatgccttagattcagggtgtttctcagagctgtgatcaggtattggccaggcctgtagtcatctcaaggctctagtgaggaaagattcacttctgatctcactcacatggttgttggcaggattcagttcctcaggggctggtggactgagggtctcagttcctcactgattgttggcctggatcctgcctcagctctttgccacatgagcctctgcccaggcagctcactctgtggagctggtattccatttgagtggggccagcaagagacagcaagcaagatgcaagtcatagtctaatctcggaaatggtattatgttatttgttacaggcacacattcaaggggtagtaattatataagggtacagataccaagaggcaaaggtcattgagtgccatcttagaggctccctatgattatccatggatataaggcccttcttttgttatatttattttttgtttctctcctacttgtcataagcaatttctccactcacatattttcctcctcaccttccatagactctctaatatatttaaggtactttcttggatatgtatgcatcctttaaaaatgagtattttatatagcatatgtatttttaatttataaaatgacattgggatttagatcttgttctatgtctgagacctttttttagccaaccctgtattttgatgatccatccatgttgctatatgtaaattttattcattgcttctgtctgctacatggtaccatgtggtctgtatccaccatatttcccctagcagggaataaatagattgactctacttgatttctcaaagatttctgtcattaatgtccaaaaccaagttcctttgtggatctgtgtgagactttctctggaagatttacacaagagtgggattgctgggtcatggggtgtatatatacatatatatgtgtgtgtatgtgtgtgtctatgtacatatacatgcatacataatttccccaagtactgccagattgcactccaaaatgactatgccagtttattcctgcaaattgatgtaaagatttcctttttcccaaatccttgccaatacttagtatcattgcttttttgagtctggtaaataaaagaggtctctcggccaggcgcataggctcatgcctgtaatcccagcactttgggaggcccaggtgggcggatcacaaggtcaagagattgagaccatcctggccaacatggtgaaatcccatctctactaaaaatacaaaaattagctgggcatggtggtgagcgcctgtagtcctagctactcgggaggccgaggcaggagaattgcttgaacctgggaggcagaggttgcagtgagccgagatcacaccactgcactccagcctgggcaacagagtgagactctgtctccagaaaaataaaaaataaaagaataaaaagaggtttctcatggcttcagtttgtatttattggtcactcctgtctgtgcttgttagctgtttgggtttcccttctgtgaattgtcctttatgctctgtcctcattttcttgtgaggtacttttgtccattaatgtgaagaattacagtgatagattttctgatcttaagtcatccatgcatttctgggataaacccttcttgatcatgtggtgtgtgtcttgatgcattgtaggtaaactaatattaggatttccatgttcataagtgaaatgggtcttgtgttcttattcagttgagatgatttcagccacataaaaaagagttgctcagcttttctcttgttttctggatcaacttttatgtggttggaattatttctgtttagaagtttggttaaaaaaaaaccccraggcaggccaggcgctgtggctcacacctgtaatcccagcactctgggaggcckaggcgggtagatcctgaggtcaggagattaagaccatcctggctaacatggtgaaaccccatctctactaaaaatacaaaaaattagccgagcgtggtggtgggcgcctrtagtcccagctactcgggaggctaaggcaggagaatggcatgaacccgggaggcggagcttgcagtgagccgagaacatgccaccgcactccagcctgggtgacagagtgagactccatctcaaaaaaaaaaaaaaacccgaggccagaccaggtgcggtggctcacacctgtaatcccagcactttgggaggccgaggtgggcagatcacccgagatcgggagttcgagaccagcgtgaccaaaatggagaaaccctgtctctactaaaaatacaaaattagccaggcgtgttggcacatgcctgtaatcccagctactcaggagcctgagtcaggagaatcgcttgaacccgagaggcggaggttgtggtgagccgagattgcaccattgcactccagcctgggcaacaagagcaaaactccgtctcaaaaaaacaaaaacaaaaacaacaacaacaaaaatacccgaggccaggcatggtggctcaygcctgtaatcccagcactttgggaggccgaggcgggcggatcacgaggtcccaagatcgagaccaacctggccaacatggtgaaaccctatctctactaaaatacaaaaatttagccgggcgtggtggatgcatggctgtagtcccagccactctggaggctgaggcaggggaatcgcttgaacctgggaggcagaggttgcagtgagccgagattgcgccactgcactccagcctggcaacacagtaagactccatctcaaaaaaacaaaaacaaaacccaaaaaaacccaaaaaaacccccaccatacttacagaaatcatctgggcctggagcttttttgtctttttttaatgttttcttgagacacagtctcactctgtctctgttgcccaggctggagtacagtggcactatctcggcttactgcagctttgacctccccaggctcaggtaatcctcccacctcagcctcctgagtagctgggactacaggcacacaccaccatgctctgctaatttttgtattttttgtagagatggggttttgccgtgttgcccaggctggtcttgaactcctaggttcaaaggttggattaggttctcatatatagaaagtttcatggcagacacatttaacatttattgaagacctactatttgtcaagtagtatgcttagtactttaaatagccatttattgtttatagcrtaactcctgaaagtagttgctatggcagttccacagatattaaaacaggcttagaaaaaagttaagggacttgattaaggtggcacaattataattctagccaagatttttctaacttcaaaatacatacgccttctgctaatccacactgcttcaaaaaatgtatctaatattcactatttattctgcagatgtttaataaaatgtgtgtcatgcaaggatcatatagtctcacacctttcagatgcaaatcctactgtcagataacagtctactagagataagacatatatagaaactgtaatttgaagtagacaagtgtcttgggatgaaagtcacagtaaagtgcaaggggactttagaggagggagagtttattttgaactgaggagttcagggggtagacatactaggaaaactgccatctgagctgggctttgacaatagggagggtttgaatgtgggaayttttttaaaacaatgttttaaatttattttattttatttttttattttttgagacagagtctcatgctgttgccaggctggagtgctgtggtgcgatctcggctcactgcagcctccgactccctggttcaagtgattctcctgcctcagcctcctgagtagctgtgattacaggcacgtgccaccatgcccagctaatttttgtatttttagtagagaccgagtttcaccatgttggccaggatggtcttgatctcctgacctcgtgatccacccacctcagcctcccaaagtgttgggattacaggtgtgagccaccgcaccgggcctgttttttgttttgttttgttaaacagagtcttgctccatctcccaggctggagtacagtggcacgatcttggcctactgcaacctctgctaccctggttcaagcaattcttgtgtctcagcctcccaagtagctgggactataggcatgtgccaccacgcccagctagtttttacattttagtagagacagggtttcgccatattggccaggctggtcttgaactcctggcctgaagtgagctgcctgccttagcctcctaaataaaatatttctttgaggccaggcgcggtggctcatgcctgtaatcccagcactttgggaggccgaggcgggcagatcacctgagnnnnnnnnnnnnnnnnnnnnaaaaatacaaaaaaaattagccgggcatggcggtgggtgcctgtaatcccaactacttgggaggctgaggtgggagaattgcttgaacccgggaggcagaggttgcagtgagccgagatcatgccattgcgctccagccggggccacagagcgagactccgtctcaaaaaaaaaaaaaaaaaaaaaaaacaatgttttttttaaaggagtgaaatagcatgagcacacatatagagatgggaagtgtggtatgtgtgattgtttcttgagggagccctggaaagtattttttaataactatacttatttttaagagacatgtaaacctaaagtgtttctttttttcttcttctttttagcttacagttgaacatgagtcttcttatgattagtgagaatgtaaaattggctcgtgaatatgcattgctgggaaactatgactctgcgatggtctattatcagggagttcttgaccaaatgaacaagtatctgtactcagtcaaagatacatacctccagcagaaatggcaacaggtgagagtaatggctgctgtatgttttaatggcttaagtactcggaagagaaaatttagatcagatgtcaatgctgtatgtagttacatgttaagactgtatgactaccgagcacagtacacagtggctcactcctgtagtcctagcactttggaaagccaaagcagaaggatcacttgaggccaggagttcaagtccagcctagacaacatagcaagacttcattctacaaaaataaaaaaattagccagatgtggtggtgtgtgcctgtagtcctagctactagggaggttgaggtgggaggatcacttgagcctgggagattgaggctgcagtgagctatgcttgtaccactacactccagcctgggcaacagagctagaccttgtctcaaaaataaaaaacaaaacaaaacatgagtatgtgagttattacacagatttctatataatattacttgacactttattatatgaataataatccactttcaccatcagcagtattatgagttctacttaattctaattgctggaatctaataagaggggttttttttgttttgttttttcctcgagacagagttttgctcttgtcatccagggtggagtgcagtggcacgatctcggctcactgcaaccttcacctcccaggttcaagcctcccgagtagctgggattacaggcgcctgcctccacacccagctaatttttgtatttttggtagagacgggctttcaccatgttggccaggctggtgttgaactcctgacctcaggtgatctgcccaccttgacctcccaaagtgctgggattacaggcatgagccaccacgcctagccaagagttttttaaaacaatggttttgacattttttgatcagatttttacttcgtaaaaatagagtagactttattaagccattgtcgaaactgtaaatggcttgtgaatctcacaggtaccatattttttaaaaaactttttgagagagggtcttgctctcttgcccaggagggagtgcagtctctacagccttgacctcccaggctcaggctcaaacaatcctcccacctcagcctcctgagtgggtggaaccacaggtgttccccactgtgacctgctaatttttcaatttttggtagagatgggatctccctatgtttgccaggctggtctcaaactcttaggctaaagtgatccttccacctcagcctccctaagtgctgggattacaggtgtgagccaccatgcctggcctcatattccttgtataatagaactttatgaagcagattatgttgaatcccattgagaaacttcagttactgaggactaacaaaaatttaaaattggaaattgtagaacttacaggtccagtggagggtggtatttctaacaaggctcaactatgtcaaagaggaaaaaaaggttaagaaaataagtcttgcggggcatggtggctcacgcctgtaatcccagcactttgggaggctgaggtgggcagatcacctgaggtcaggagttcgagaccagcctgaccaacatggtgaaaccccatctctactaaaatacaaaaaaattagctgggtatagtggcgggcatctgtaatgtcagctacttgggaggctgaggtgggagaatcacttgatatcagaaggcagaggttgcagtgagccgagatcgcaccattgcactccagcctggcaacagagcaagactctgtctcaaaaaaaaaaaatgaaagtaatagtctttttgaggtggtcttctagatagaatattatacctcagattctgctgagctgctttttaaatattgttcaatatttgtccttaatttttttgagagaaacagcctatctctttgaacttcatctattttcctatatctgtccctccatatcctttaccatatccatgtaattaccagaaagggcaactattttattttatttatcttttatttatttattttttacagacatggcatctcactatgttgttcaggctggtcttgaactcctgggatcaaatgatcctcttggctccgcctcccaaattcctaggattataggcatgagtcaccatgctcggcctagtaaatattttatttcataaggagtcttaagtttgtcagtgaaggactttttagatcttttgttgttaggccaaagacttttacttaagtctaagcttttgtttaaaggtacttaagattaaatcatttaagttataaagcaaaacattatcatcttaaatttcatttcaatattatatatatagtttatttttatttttattttttaccattttctggtttgttttcttttgagatggattttctcacttgttgcccaggctggagtgcaatggcgcggtctcagctcactgcaacctccacctcccgggttcaagtgattcttctgcctcagactcccgagtagctgggattacaggagcccaccaccacacccagctaatttttgtatttttagtagagacggggtttcaccatgtagccagctggtctcaaactcctgacctcaggtgatctgcttgcctcggcctcccaaagtgctgggattgcaggcatgagccaccatgcctggcctaccattttcttattgtggtaaaatatacataacactttactgttttttgtttgtttgtttgttttgagacggagtctcactctgttgcccaggctgtagtgcagtggcgcagtctcggctcattgcaacctctgcctcctggggtcaagtgattctcctgcctcagcctcccgagtagctggaattacaggtgtgtgccaccacacccagataatttttttgtacttttagtagagacggggtttttgccatgttggccaggctggtctggaactcctgacctcaggtgatctgccctcctcagcctcccaaagtactgagattacagacgtgagccactgcacttggccttggccatttttaagtatacagttcagtggcattaaatacatatataatgtacaaccatcaccatatatagtttttaggctgagttaagacccattactataatacagttgaatcaaaactatatataggtttttgagggttttttggaggcagagtctcggtctgttccccaggctggagtatggtggtgcaatcatggctcactgcagccttaactcctcaggctcaagcaatcctcccacccagcctccagagtagctggggccacaggcacaaaccaacatgcctggcttatattttttttagagatgggttattgttatgttgcccaagattagtttttaaattgcgtcaagattccttttctcttttatttttgaggtggagccttactctcaaaactagggccattttactgcattccagactggatgacagaatgagaccctgtctctaaaaaatatttgaaaaaaaaaaaaaagactgcttttaaaaaaataccttggttgcatatgaattgagacctattttagtctgtaggttgtgacccattagccataaaattagtatattctgatcagtgttgtattgatttttagaaattatttactgatatataatagttgtacatatcttgggcatacacattatattttgattcctgtatacaatatctaatgatcaaatcagggtaattgggattaatcagcattttaaaagttaattaaacagaataaaaattatcaaagtagggctgggcatggtggctcacacctgtaatcccagcactttgagaagctgaggtgagaggatggcttgaacccaggagtttgaggttatggtgagctatgatcgtgccactgtagtacagcctgggcaacagaatgaaaccttgtctctaaaacataaaaataaaagtttgacaaaaatgaaactttcacaagttgtgctttgatggttttttttcccccttgggctcaagcaattctctcacctcagcctctaaagtaggcaggactacaggcatgggccaccatgcccagctaattattcttgtagaactttaaagttatgcctaacttttcaatttgttatgcaatttattttattttattttattttattttattttattttattttatttttttgagatggagtcttgctctgttgcccaggcaggagtgcaatggtgcgatctcggctcactgcaacttccgcctcctgggttcaagcgattgttgtggctcggcctcccaagtagctgagattccaggtgcccgccaccacacccagctaatttttgtatttttaatagagatggggtttcaacatgttggccaggctggtcttgaatgcctgacctcaggtgatctgccctccttggcctcccaaagtgttgagattacaggtgtgagccaccgcgcctggcctgttatgcaatttatttatttatttatttatttgagccggagtttcactcttgttgcccaggctggagtgcaatggtgtgatctccggcttgccgcaacctccgcctcccaggttcaagcgattctcctgcctcagcctcccgagtagctgggattacgtgcatgtgccaccacacccggctatgcaatttaaataagaatataaattagtagtatgatttagttagcctggattttttttttattttttatttttttgagacagattcttgctatgttgcccaggctggagtgcagtggcgtgatcttggctttctgcaacctccacctcctgggctcaagagattcccctgcctcagcctcccaggtagctgggcctgtaggtgcctgcccccatgcctggctaactttttgtatttttagtagagatggggtttttaccatgttggccaggcttgtctcaaactcctgagctcaagtgatccatctgcctcagcctccctaaagtgctgggattacaggcgtggatgtttcctatcctggatgttttaattcattttatcagaattaattttgcaattgagggccgagcgcagtggctcacgcctgtaatcccagcattttgggaggcctaggcgggtggatcacgaggtcaggagatcaagaccatcctggctaacatggtgaaaccctgtctctactaaaaatacacaaaattagccaggcgtggtggcrggcgcctgtagtcccagctactcgggaggctgaggcaggagaatggcctgaacccaggaagcagagcttgcaatgagccgagagtgatcacgccactgcactccagcctgggcracagagtgagactccatctccaaaaaaaaaaaaaaaaaaaawtgcaattgaaaacataaatttaataaactgttattaacattttgatagaatatcttgatgtggtttactggatatctgatatcaaaatggagttttgtaacatctctagtaaatggccctcatttaattttgacagtgatatattatagaaatttaaacatccatcttcttctttgaaatcaggtttggcaggaaataaatgtggaagctaaacatgttaaagatatcatgaaaacactagagagctttaaactrgacagcactcccttgaaagcggcacagcatgaccttccagcttctgagggagaagtctggtccatgcctgtacctgttgaacgaaggtaagtggaaaccttttaagaaaccagttatcccaagaagcttatagcattgattatatctaggaggaggatggggtggctgagagacaggaatgggagggagttttctttactgaacgttctctcttttataactcactggtcttgaaccttgtgcctttttgacctatttcaaaaaataagatttaggtaggaataatttaaaaatatgcttttgtgaatgaccttacagtggtagagacagtgttatcttgtggaaggagaatggggttaggaattgaaatatccaagctccgtgtctgtctttgccactctctgtagctttgggaaaataataaaacctttttaggcctcagatttttcttttttttcttttttttttttttagacagagtctcactctgtcacgaggctggagtgcagtggcacgatctcggctcgctgcaatctctgcctcccgggttcaagtgacttccctgcctcagcctcctgagcagctgggactacaggcacacaccacctgtattttagtagagacggggtttcaccatgttggccaggctggtctcgttctcctcacctcgtgatccacctgcctcagcctcccaaagtgctgggattacaggcctgagccaccrtgcccagccaggcctcagatttttcttacgcaaagagaggaagttagactaacagtggttctcaaacagggatcacagaatacttcttttcatcaagctataatgaaaaatggaaaatttttctaaatttgctaaaattgaaaaaatkggctttttaattcatagagaacagtaaaaataaaatgttctgaattttagggttttctctggctttttttccccaacttcctactaccaagtgccagcaratgaacaactagtgatactgatatttactgaaatactgtaactagccaatcatgcatagttttactgcacatttttcaactgacaagtgtgcaggtggatgttatctatttcacttacataatagatttcctagtttgtattatagatttaaatattgactgtgtcatgcctttctagaaagaacacttatgacttcccaggttcattgcccgttaaccttgcattaagatgttgatcagattgttttcagttttaacattttgtcattgcaactctgattacttgtgtttttttttgttttttttttgttttttttgtttttttaagactagttaagggcagtagtgagaaggaggggaagaatagaacaaggagtttgatctgtaactgactgtgaacaatcaattgagataactcactacattcggaccagccttggttacattttattttattttatttatttgttttttgagacggagtctcactctgtcacctgggctggagtgcagtggcatgatctcggctcactgcaacctctgcctcctgagttcaagcaattctcctgcctcaaccccccaagtagctggaattacaggcacctgccatcatgcccagctaattttttgtatttttagtagagacagggtttcaacatgttggccagactggtctcgaactcctgacctcgtgattcacccaccttggcctcctaaagtgctgggattacaggcgtgagccaccacacccggcctggttgtattttataatacaggtactgcattatacacccacagtgtcctgaactattttaggctataggtgttattttattgcaataagccttccaaataagtcatattttccctgtatttcagataagacagctgaggtacaataaggttgggtaacttttccccactatcacaaaactgataaatggtagagctaggatttgaacctagatatattgtgttttataataatgattacaaagctggcactctctgctgtagcagtcctaacaatctctaattaaaaacgtggatttaggggcatcactcccagagagtctgatatggtagatagcaggtagaactcaggaatctgccggtgattctgatgtcggtggtccataggccacattttgagaagacccataccatcatgttcttgacatttaaaatcaattaatgagtactgattatttcttagccacttttatttttatttttattttttttgagacagagtcttgctctttcgcccaggctggagtgcagtggcgctatctcggctcactgcaacctccgcctcccggttcaagcaattctcctgtctctgcctcccaagtagctggaattacaggcacgtgccaccacgcccggctaatttttgtatttttagtagagacggggtttcaccgtgttggccaggctggtcttgaactcctgacctcaggtgatccactcgccttggcctcccaaaatgttgggattataggcgtgagccaccgcacccagccgcaacttttattttcttaatctccacataaaaggactgtactaatgttctgttactgactcctgatatcctttggatatttactaaatttttcccttgcctcatacgcactttcacataattacatttcttgttatagtacataatagttcactaaagcacagtagctcattaaagaaaaatagaaaaattcattgaagtagggggaaaatcacatagtcatcctagcttgtttccttctgttcttttatgcattattttcatagttgcaggtgtgctatatccataatttacaacattgtaccctcttttaagaaaaatcctaataatagtcaacaatcattgcatattactgtgtgccaggtactgtgtttgttgttttacatgtattatttaattctcaaaaccaccttagaaggtaggtactaatttttttagccccaatttctgatgaggataagctaagataggttaagtaatttgctcttcatattttaaacatttatgatttatataccatgtcagatctttttctctgcagttttttaagagttatttgccactgttctgactggtatgtaacctatatatagttaaccatgctcttaatgttttttcccttcttttttcattattataaataaagttgcactgaatggttgtaaaaatttttccacatttataattttttcccctaatttcagaagtagaactaatagatgagtcaagttgtgtttttgcttttgtctgttaatttgttttattcttatttacttgctcttttctccttctggagaatcatcacttgggtcttgtattagtctgcttgggctaccacaataaaataccatacactgggtggcttaaacaacatacatttgtttctcacacttctggaggccgggaagtccaagatcaagatgtggccaatttggttccaggtgagggctctcttcctgagcagacagccaccttctgtctgtgtgctcacatgacagagagagtgagtaagctctttcacatcagggactcttacttacttccttactcctaatattcatattgcgcactggggctttaacatatgaactttggggaggacacaaacattcagcctctaacagtcctgtaactcctctcagttattggtaagatctttccaacaaatagatgttcccagtgggaaatcagttgattctgaatttaatgaagtatttggtcacctcagtctcacaagcagagagggaggatttcctctgaggggtggtgggaagttaagccctaaatggtgttccttcttattgcttctcgctttcttctgtatcgttttctgttcctgattttgaatgctctagattactggtaagttttcctctttgactttatttgtggcatctgtttcttcctataatttattttacttgctctcttaactgggcatcttttaatattctttttatttttctattagtctttatttgtactcatgcttaagagggtcattcttttttttttnnnnnnnnnnnnnnnnnnnnnnnnnnnnnnnnnnnnnnnnnnnnnnnnnnnnnnnnnnnnnnnnnnnnnnnnnnnnnnnnnnnnnnnnnnnnnnnnnnnnnnnnnnnnnnnnnnnnnnnnnnnnnnnnnnnnnnnnnnnnnnnnnnnnnnnnnnnnnnnnnnnnnnnnnnnnnnnnnnnnnnnnnnnnnnnnnnnnnnnnnnnnnnnnnnnnnnnnnnnnnnnnnnnnnnnnnnnnnnnnnnnnnnnnnnnnnnnnnnnnnnnnnnnnnnnnnnnnnnnnnnnnnnnnnnnnnnnnnnnnnnnnnnnnnnnnnnnnnnnnnnnnnnnnnnnnnnnnnnnnnnnnnnnnnnnnnnnnnnnnnnnnnnnnnnnnnnnnnnnnnnnnnnnnnnnnnnnnnnnnncactttgggaggtcgaggcgggcggatgccaaggtcgggagtttgaaaccattctgcctaacacagtgaaaccccgtctctactaaaaatacaaaaaaaaaaaaaaaaaattagccgggcatggtgacaggcacctgtagtcccagctactctggaggctgaggcaggagaatggcgtgaacccaggaggcggagcttgcagtgagccgagatggcgccactgcactccagcctgggcgacagacactccgtttcaaaaaaaaaaaatgtgagtacaaggaggttcattaaagccttatatagaaaaggttagacatagcttaaatgccactagatgtgacattcttttcaaatgtcagctgatgtccctcaaatatcttcccatctcacagaataaaacccagagttttcatgtctttcaagccctatgagacctggttccccacagcctctggaacctaagttcttacagctctctccctcaggcactgtgctgtggccttgaacaagcccagcccacaaatgcttcactcctttcacctgcctttccctcagctccagtgctgaatgacctgttcccttctttcatttaggtctctactcagttgtcacctcagaaagtctgtctctgactttgccacctaaaaaccacccctgatgatcctgtagcccctttcccttcttttttttttttgagacagagtctcactctgtcacccaggctggaatgcaatagtgcatctcagctcactgtagcctccacctcctgggtccaggcaattctaatgcctcagcttcctgagtagctggaataattacccarcaattttttttttttttttttttttgagatggagtctcactctgtcgtccaggctggaatgcagtggtgtaatcttggcttactgcagcctcccaagtagctgggattacaggcatgcaccaccacgcccagctaatttttttgtatttttagtagacagggtttcgccatatttgccaggctagtctcgaactcctgacttcaagtgatctgtccgcctggtcttgaactcctgacctcaagtgatccacctgccttggcctcccaaagtactgggatcacatgtgtgagccaccacggccagccaaatttttgtatttttagtagagatggggtttctccatgttggccagacgggtttcaaactcctgacctcaaatgatccacctgcctcagcctcaaagtgctgggattacaggcatgagccaccatgcctggcccccttctttattcttcttgatagcacttaatattacctgatgtactgtttcatgcactgcttatacacacacacgtatgtaagtctatgacagtaagggttgttgttgaaattattattattattttttaagatggagtctcactctgttgcccaggctggagtgcagtggtgcgatctcggctcactgcaacctctgcctcctgggttcacaccattctcctgcctcagcctcccgagtagctgggactacaggcgcccgccaccacacctggctaatttttnnnnnnnnnnnnnnnnnnnnnnnnnnnnnnnnnnnnnnnnnnnnnnnnnnnnnnnnnnnnnnnnnnnnnnnnnnnnnnnnnnnnnnnnnnnnnnnnnnnnnnnnnnnnnnnnnnnnnnnnnnnnnnnnnnnnnnnnnnnnnnnnnnnnnnnnnnnnnnnnnnnnnnnnnnnnnnnnnnnnnnnnnnnnnnnnnnnnnnnnnnnnnnnnnnnnnnnnnnnnnnnnnnnnnnnnnnnnnnnnnnnnnnnnnnnnnnnnnnnnnnnnnnnnnnnnnnnnnnnnnnnnnnnnnnnnnnnnnnnnnnnnnnnnnnnnnnnnnnnnnnnnnnnnnnnnnnnnnnnnnnnnnnnnnnnnnnnnnnnnnnnnnnnnnnnnnnnnnnnnnnnnnnnnnnnnnnnnnnnnnnnnnnnnnnnnnnnnnnnnnnnnnnnnnnnnnnnnnnnnnnnnnnnnnnnnnnnnnnnnnnnnnnnnnnnnnnnnnnnnnnnnnnnnnnnnnnnnnnnnnnnnnnnnnnnnnnnnnnnnnnnnnnnnnnnnnnnnnnnnnnnnnnnnnnnnnnnnnnnnnnnnnnnnnnnnnnnnnnnnnnnnnnnnnnnnnnnnnnnnnnnnnnnnnnnnnnnnnnnnnnnnnnnnnnnnnnnnnnnnnnnnnnnnnnnnnnnnnnnnnnnnnnnnnnnnnnnnnnnnnnnnnnnnnnnnnnnnnnnnnnnnnnnnnnnnnnnnnnnnnnnnnnnnnnnnnnnnnnnnnnnnnnnnnnnnnnnnnnnnnnnnnnnnnnnnnnnnnnnnnnnnnnnnnnnnnnnnnnnnnnnnnnnnnnnnnnnnnnnnnnnnnnnnnnnnnnnnnnnnnnnnnnnnnnnnnnnnnnnnnnnnnnnnnnnnnnnnnnnnnnnnnnnnnnnaacccccatcattgcttcacatacacgttagtttggtgttatcatcctcccaaattctcattctcaactttccacatctgggagtgtcttttttttttttttgagatggagtctcgctctgtcacccaggctggagtgcagtggcgtgagctcggctcactgcaacctctgcctcctgggttcaagcgattttcatgcctcagcctcccaagtagctgagattacaggtccacagcaccatgcccatctaatttttgtatttttagtagagacggggtttcgccatgttggccaggctggtcttgaactcctgacctcaggtgatccacctgcctcggcctcccacagtactggaattacaggcgtgagccaccgcacccagcctaggagtatcttttctttctttttgagacagtcgtggtctgtttcccaggctggagtgcagtggtgcaatctcggctgactgcaacctctgcctcctgggttcaagtgattcttttgcctcagcctcctgagtagctgggattaccagtgcgtgccaccacacccagctaattttttgtatttttagtagagatggagttttgctatgttggccaggctggtctcgaactcctggcctcacatgatctacccacttcagcctcccaaattgctgggattgtgagccaccgtgcccggcctgaagtgtctttactamtagagtgtctctgagactcttctcattgttactcccttaaactaggccctcatctcatgtctcagtgatatttgtaatcacaaacatctcactgctttctgtgttttctttatcagtatatcatgttcagtattagactaatctttctaaaatgttttcagtggatccttgttggcagttagctaaaagctaagcctcttgaactggtattcatatcttctatggaccgaaccatttctgctcagtattatcacttaatgttcagcattatgtgttagactggtgtctttattatcctttacatggattaagctcatttttgtttctttgcttttctttactgatgttctgtctataattgtaccctcttgtttagttcaactcctgcatttccagtcccagtttcttttctgtcttcatgaggccattcccattgccatggtgctaggtctgtttcacaccatctagtatacgtgcctagctttacatagcttctgtctgtttaactatactgtggtttatttgagaataggactccttttttgtttgtttgttttcccccttgtaaatggctgcaaccaaatctgggagcagagtaggagcctaacagatatttgagaagtctgaattctgttatagaaataaggatgaaatgaggaccaacacaggggctcacgcctgtagtcccagctctttgggaggccaaggtgggaggatcgattgagcccaggggtttgatactagcctaggcaacatagtgagaccttgtctctacaaaatacaaaaattagccttgtgtggtgccatgtggctgtagtccttgctactcgggaggctgaggtgggaggattgcttgagcttgggaggtcaaggctgcagtgacagagcaagaccttgtctcaaaaaataataataataaaaaataaatacataaaggtgaaatgaggtgatgtatgtaaatgtaaagcactgaacatgagttctagtaactgttcatagctagtgctatatcagttttttaaatgggaaaatgattaaattttattaattaaaacacaaaaattatggtatagattgagcttccctgatccgaaaattcaaagtgtttcaaaaactgaaactttttgagcaccaacatgacactcaaaggtcatgccaaaggaagtgctcattgggacattttagattgtggattttcagattagagatgctcagctggtatgtatatggaaatattccaaaatctgaaaaaatccaaaattcaaaacacttctggtccccagaattttgaataagggttactcaatctgtatattctaaataaatggtaccaaattacatacataccattggataaatgtgaattgaatacttgtattgtattctggttgtctcgataaaactctcttctctgataattttttttcagtttccaacaatcagatgcattcatctttgatatacaacaatttcctttctaagtagaggtgaccattacttcccctccattatttctgtaatataactatactgcattcctttaattaaatcaccaacagatatrtcagatttaaattttattttatttttatttttttgaaacggagtctcgttctgttgcccaggatagagtacagtggcatgatcttggctcactccagtctccacctcccaggttcaaacgattgtcctgcttcagcctcccgagtggctgggattacaggtgcacaccaccacgcctggctaattttttgtatttttagtagagacggggtatcaacatgttggccaggctggtcttgaactcctgacctcaagtgatccacccaccttggcctcccaaaatgctagggttgcaggtgtgagccaccgcgccttgcccagatttaaattttagatcttaggtttcaacatcctgaagtttattcagtcgtgtcttgtgttcagttgttgcattggcttctttagttcatagackcttaacttacacagtatgtgtgttcatccatatgtggagttgattatgatattaatgagtttttgtttgattagaccctcaccaggacctagaaaacgccaatcttctcagtacagtgaccctaaatcacatggtaatcgtccaagtacaactgtcagagttcaccgttcatctgcacagaatgttcacaatgacagagggaaagctgttcgttgtcgtgaaaagaaagaacagaataaaggaagagaggaaaaggtaaatgttaattgatttttataaatgaaagttatttttgaaccgtaaaaatgaagactgtacaaatttatttattttttctttttttccttttttgagacagtctcactctgtcrcccaggctggggtgcagtggcatgatcttggctcactgcaacttccacctcctgggttcaagcaattctcatacctcagccttccgagtggcagggattacaagtgggcgccaccacatcgagctaatttttgtattattagtaaagatggggcttcagcaagttggccaggctagtctcgaactctttacctcaggttatctgcrcgccccaccccccgcccccctgccaggcctcccaaggtgctgggattacaggtgtgagccattgtgcccagcccaaatttcaataagctgtagtcatcagtttgccagcgctctaataaaaccttagttatactacatctaggctgggattttccccacttgcaattcaacaaatattttggctttttttggtaactttatattgtgatataatttcagactagcagacaatttgcaggaatggtataaggaacttccatatatactttacctagttttaccaattattaatattatgccccttttgacttatcattttatttttctgtatacccttttcctgaaccatttgagactaagttgtatatataatgctcctttaaccttcaatatttcagaatgtatatcctgagtactaagacattcttttacgtaaaaacaacacaattattggctaacacagtgaaaccccatctctactaaaaattagccgtggtggcgggcgcctgtagtcccagctactcaggaggctgaggcaggagaatggcgtgaaccsgagaggcggagcttgcagtgagccgagaccgcgccaccgcactccagcctgggcgacagagcgagactccgtcttgaggaaaaaaaaaaaaaacaaaaaaaacacagttatcaaaagctgtaaattttacattgttatagtactgttcatctaatccacagacctttataaaattttgccaattatcccaataatgtcatatagagatttccccccttctgtccccgctaggtcagattacaatgtagaaggacacatcgaatttagttatcatgtttctttagccccttttaatacaaacatctcagcttttgcctttctcggactggaatttttgaagaattcaggccagttattttgtggaatattcctcagtttgggcttgcctgatacttcctcaggattagattaagattattcattttttttttttggccgggcatggtggctcatgcctgtaatcccagcactttgggaggctgaggcgggtgaatcacttgaggccaggagctctagactagcctggccaacatggtgaaaccctgtctctactaaaaatacaaaaattagccggacatgttggcaggcacctataatcccagctactggggaggctgaggccagagaatcacttgaacccgggaggcggaggttgcagtgagctgagatcacaccactgcagtctagcctgaccaacagagcgagactcagtctcaaaaaaaaaaaaaattattcatttttggcaggcataccattggtatgatggtttttttctctcagtgtatcatataagaaggcacagggccgggcgcggtggctcacgcctgtaatcccagcactttgggaggccgagttgggcggatcacgaggtcaggagatcgagaccatcctggctaacacggtgaatccccgtctctactaaaaatacaaaaaaattagccaggcgaggtggcaggcgcctgtagtcccagctactggggaggctgaggcaggacaatggcttgaacccgggaggtggagcttgcagtgacctaagatcgcgccactgcactccagcctgggagactgagtgagactccatctcaaaaaaaaaaaaaaaaaagaaggcataggatttctgtttgtcctattactggtgataagttggatcgcttggttaggtggtgtctgcttggtctctccacaataaacttaccatttgacccttgtaataatttgtgggaagtactttgagactatgtaaatactctgtttctcatcaatatctcatctgctagttttagcacccagtgattcttgtctgaatcagctatttctgcactgactgcaaaatcataattttctaatgccagtgttgcttctatattaattataaaagctgagtgtagatgttgctttggtttttaaaaatttttgtttgttatttttaatttgacacataataatcatacatatttatggggtacactgtgataattcaatacacatatacaatgggtaatgatcaaatcagagtaattaacatatccatcacctcaaacatttatcatttctttgtgttgggaatattcaaaatctgttcttctagttatttgaaaatgtaccataagttgtttttaattacagtcacctggctgggcatgttggctcactcctgtaatcccatcactttgggaggccaaggcgggcagatcacttgaggtcaggagttcgagaccagcctggccagcatggtgaaacactgtctctactaaaaatacaaaaaaaattagccggggtggtggcacacacctgtaatcccagctacttgggaggttgatgcaggaggattgcttgagcctgggaggcggagtgagccaagatcgcgccactgcactccagcctgggagacaaagtgagactctgtctcaaaaaaattaaaaaataatagtcattacagtcaccctatagcactatagaacactagaattcattccacctatctggctgtacttttgtatttgttaaccaatgtctgatacacccaccttcccctacccatcccagcctctagtaaccattattstactctgtacgtctatgagatcaacttttttagcttcgtcatgagtgagaacatgtgttatttatctttctgtgcctgccttatttctctgaacatgatatcctccaaactcatccatgttgccatgaatgacagaatttcattcttttttgtggttacgtagtatttcaccatatatatgtatgtatgtatgtatgtatatgcatgccacagtttctttattcattcatctgtcgataggaacttaggttgattccatgtcttggctattgtgaatagtgtttataatagtatggcggttccttaaaaaacaaaaactagaactaccatataatctagcaatcctgattctgggtatatccaaaggaagggaaatgaatatgtcagacatatctgcactcctatgttcattaatcctattcctcccatgaggaacctccatactgttcatagtggctatatcatcttacatttccaagaactttgtatatgaattctttctctaaatcctcaccmgcatttgttagtttttgtcttttttttttttgtggagacagtctcactctgttgcccaggctggagtgcagtggcatcatcttggctaactacaacctccgcctctcaggttcaagcagttctcatgcctcagcctcctgagtagctgcaactacaggcacacgctaccacgcctagctaattttttgtattttagtagagacggggtttcaccatgttgcccagtctggtctcgaacccctgagctcaggcagtccacctgcctcagcctcccagagtgctgtgattacaggtgtgagccaccacgcccagcagtttttgtctttttgcttacacccatcctaattagggcaagatggtatctcatggtggttttgatttgcaattccctgatgattagtgacattgaggatttttttttcatatgcctcttgaccatttatatgtcttcttttgagagatgtctattccaattcatttacccattttttaattggattatttgtggggggttttttgctcttgtttgagttctttgtatattctggatattaatcccttgtcagatgaatagtttgcaaatattttctcccattctacaggttgcctctttattcttttaattgttgcctttactgtgcagaagcattttagttttatataatcacatttgtttagttttgcttttgttgcctgtgcttttgaggtcttcctaaaatcttggcccagaccaatgtcctgaagcatttctcctacrtcatcttctaataatttcatagtttcaggtgtaaacgtttatatctttaatttattttgagttggttttatatatggtgagagttagggggtctagctccttatttctgcaaatggatatctagttttctcagcaccacttattaaaaacactgcacttgctccagtgtatgttcttggtgcttttgttgaaaatcagttgactgtaaatacatggatttccggattctctattctgttccattggtctgtatgtctgtttttatgccagtaccatgctgttttggttactagagcattgcagtttagggtcaagtagtgtgatgtctccaactttgttccttttgctcaggatctctttggagtcttttgtggttctccttttctatttcttttttttattttttttttgagacgaagtctygctctatcacccagtctggagtgcagtggcaggatctcggctcactgcaacctccacctcccggattcaagcaattgtctctgctcagcctcctgagtagctggagttataggtgcccactaccatgcccggctaatttttctatttttagtagagacggggtttcaccatgttggccaggctggtcttgaactcctgacctcaggtgatccgcccgtctcaacctcccaaagtgctgggattacaggagtgagccactgtgcccaaccaattttttttctttctttctttttccttttttttttttttctgagatggagtcttgctctgtcaccaggctggagtgcagtggtgcgatctcagctcactgcaacctccgcctcccaggttcaagcgatcctcctgcctcagcctgccgagtagctgggactacaggcatgtgccaccatgcccagctaattttatatatatatatttatttatttatttattttattatttatttatttatttatttatttatttttggagacaagagtttcactctgtcaccctggctggagtgcagtggcacgatcttggctcactgcaacctccacctctcrggttcaagcgattctcctgcctcagactcccaagtagctgagactacaggcgcaggccaccatgcccagctaatttttgtgttttttagtagagacggggtttcaccatattggtcaggctggtttcgaactcctgaccttaggtgatccacctgcctcggcctcccaaagtgctgggattacaggcgtgagccacctcgyctggcaatattttgtatttgtagtggagacagggtttcaccatgttgatcaggatagtctcgatctcttgacctcgtgatccgcccgcctcggcctcccaaagtgttgggattacaggcgtgagccactgcgcctggccagtgttttatagtttttagcacatgtcatatatatgtcttgttagcttttatacctaagtatttcatttttgtaatgattgtaaacagtgatgtatttttaatttcagtctgtatgttaattgttaagctatagaaattcaactgagttttaaaaattatttattttttaaaagttgtggcaaaatatacataacataaaatttaccatttaaaatatttcaagtgtgcagttcagtggtattaagtagtacattcacatgttccactagttgtggaatcatcactactgtctatccacagaacattatttatttttcagaactgaaacactacacccattaaagtcatcattcttatcattctccccttcatcccagaccttggtaaccaccattctgtttctctatgaatttgactattcgaggtacctcatctgagtggaatcatacagtattttcccttttgtgacttacttgttttacttagcatagtgttttagggattttgccatgttgtagtatgtcaaaatttccttcctctttaaggctgagtgctattccattgcatatatatttcatgctttgtttatcattcattkgttgatgtacacttgggttgctgtcactgtttggcttttgtgaataatgctgctttgaatrtgagtgcacagatatttctccaagaccctgcttttaagatttttggatatatacaagaagtggatttgctgggtcatatggtaattccatttttaattttttttttaagacagagtcttgctctgtttcccaggctggagtgcaatggcgcgatcttggctcaccgcaccctccgcttaccgggttcaagtgattctcctgcctcagcctcccaagtgtctgggattacaggcacccgccaccaggcccgactaatttttttagtagagatggggtttcaccatgttggccaggctggtcttgaactcttgacctcagatgatctgcccgccttggcctccaaaagtgctgggattacaggcataagccactgcatccggcctcatttttaattttttgaagaatgacaaaactgttttccacagtggctgcaccattttatattcctaccaggattacagtttctctacatcctcatcaatgcttgttattttcgggtttctttgataataaccatgtaattgggtgtgaagtagtatctcattgtggtattgatttgcattttcccaatcatatagttgacatttttcccaataatatagttgacttttttgcatatagtaaaatgcacataacataaaatttaccattttaacggtttttaagtgtacggtgcagttgtactaagcgtatcaacattgctatgcagccatcacaaccattcattttcagatctcttcatcttgcaaagctgaaactctgtactcattaaacaataactcaccattcaccctccctgcagcccctggcaaccaccattctacctcctctctctgtgaattcggctacttatgtaagtggatcatatggcatttgtctttttgtgacaggcttatttatagccgtccctgctatctttaggttactgtttgtgtggagtatcttttttcattcttgcacttttaacctatttgtgtgtctagatctaaagtgtctcttgtagacaacatataattggttcatgtttttttattttaaaatttattttattaattaattttagagacagggtctgactgtgttgcccaggctggagtacagtaaatattcacagtgtactatatcataatgcactaaagcctcaaactcctgagttccagtgatccgcgcccctacccagcctcccaggtagttgagactataggtgcacaccctgtcagttttttgtccgttctgccagtttgtcttttgatgggagggtttaatccatttaagccaattactgataaggagggacttctgttatttcagtctttatatgcctatctgtctttttccttaattttctacattactcgccggggatggtgctcatgcctgtaatcctagcactttgggaggccaagacaggcagattgcctgagctcaggagttcgagaccagcatggacaagatggtgaaagcccgtttctactaaaatacaaaaaatcagccaggcatggtggcgggcacctgtaatcccagctactcaggaggccgaggcatgagaatctcttgaacccgggaggcagaggttgcagtgagccaagattgcaccattgcacccccagcctggacgacagagcaaaactccatctcaaaaaaaaaaaaaatcaaaacaaaaaaataattttctacattactgtcttcttttgtgtttagttgtttttttttttttttttttttttgagacagagtcttgctctgtcacccagcctggagtgcagtgacacaatctcagcttactgcgacctcagcctcccaggttcaagcgattctcttgcatcagcctcctgcatagctggaattacagatgtgtgtcaccacacctggctaatttttgtatttttagtagagacggtttcaccatgttggtcaggctggtctcgaactcttgacctcaagtgatccacccgcctcacctcccaaagtattgggattacaggcgtgagccactgcgctaggccatttagttgagtttttgcagtgaaatgttttaattcccttctcattttcttttgtgtatatttgtatattttatagctgttttctttgtggtctccatgtttctcaggctggtatatggtggcaggatcgtagctacttgtagactcaagtttctgggctcaagcagtcctcccaccttakcttcctgagtagctgggactacaggtgtacacctccaagcttggctgatgttttcatcttttttgtagagacagggtctcactgcattgcccaggcttgtctcaaatcctggccttaagcaatccttgcatttcagcgtctcaaaatactgggattacaagcatgagccaaccatgtgtgactcacagagactttaaaaattcccgtgtgtggttacttttgaatttcctagactttaaatgtctatttccccaaaagggaaaaaagagaaaaatgaaggggatgggggaaataaaaggtcggtggccctttaactctcctgaagttgcttcagcctgaaggggaagggcttgcaacaatgggaggaggggtgcaaccatagctgcccctgtgactgcaaggtcagaagctgcattcggcaatcaaaacacacatacctagtttttggaggacagggtcctttttgaccatcctggctcctgtgaactgcctgcagactactccaggagcacgtgtacagttgcctactaagggcctacgggctgagttgtttattccattttgtgctgctatcacagaataccacagactgggtaatctataaagaacaggatttttttccctcacagttctggaggttaggaagtccaagatcagggtgctggcatgttcagttgtttggtgagggctgcatcctctggagtagaggaacactttgttctcacatggctgaaggaataagagcaggaaatccaaatgctgtgtgatacctctttgtaagggccttaatcccattcatgaggaaggaacccttgtggcataatcccctctcaaaggcccaacttttaatactagcacattagctactgagtttcaacaccttgcttttggagggacacattaaaaccatagcagtagctgggctgaaattaaccagaattaaccataatttgtcatttactatccaggtttccccctggaagttgcagtcctcccaatagactccagagttcctaaatagttgcatcaaacagattctgcaggtgcagtttttgtttaggtggaaatacagattcttgatgcttcctactctgtcagtcttccacgatcctgtcccaataattgatttttatatgtttatcttctatcttgtcagcttaatactatgctagaattgttcattctaggagaatttttgtagattccttagtattttctgtgtggacaattatgttatctgcaaatatttctgtatttttggatttctatgccttttatttcctcttcttaccttattgcattggctagaacttccagtactatgtcaaatatttaagagtgacaaagtagatgtccttgctgtgttcctgttcctgattttaggaggaaagaattcaatgtttcatcacagagagtataatgttagctgtaggtgaggtgtttttgtagatgttctttttttttttttttttttttttttttttttttttttttgagacagagtctcgctctgttgcccaggctggagtgcagtggcgtgatccccactcactgcaagctccgcctcccgggttcacgccattctcctgcctcagcctcccgagtagctgggactacaggcgcccgccaccacacccagctaattttttgtatttttagtagagatgaggtttcaccgtgttagccaggatggttttgtggatactctttatcaggttgaggatattccctttaaattctatttttctgagagcttctgtcctggataggtattcagttttagcacatgcttttctgcgtttgttgcatgatcacatgggtctttttctttagtctcttaatatagtggattatattgattaatttttgaacattgaactagtcttatgtccctggaataattctcacttggtcatggtatgtaattctttttatatcttgctgaattctatttggtaatattttgttaacaatttttgcatctgtatattcatgaatgatactggtctatagtttttcctttgttttgttttttggaactgtcttcatctgatttcagtatcagggtaatatagccttttataaaatgaattgagaaattttccttctgtgctctggaagagtttgtgtagaattgatttaattcttttttaaaaattttttttgagacagggtctcactctgtcacccaggctggagtgcagtggcgcgatcttggctcactgcaacctccgcctcctgggttcaatagattctcgtgcttcagcttcacgagtagctggggttacagatgcgtgccaccacgcctggctaatttttttgtattttagtagagacagagtttcaccatgttggtcaggctgatcttgaactcctgacctcaggtgatccacctgcctcggcctcccaaagtgctgggattataggggtgagccaccacgccgggccttaattcttttttaaatgtttctacaatgaaactacctgggcttgaatatttctttaaaactatgaatcaccttcattaatagttatggtactgttcagattatcttcttttattaggtgagttgtggtagtttgtgattttcaaagaattagtccatttaatccaagttgtcaaatttatgtatgtagcatttttgtaggattccttatgctttttttattttttgagatggagtctcgctttgtcgcccaggctggagtgcagtggcatgatcttggctcactgcaagctccgcctcctgggttcacaccattctcctgcctcagcctccctgagtagctgggactacaggcgcccgccaccacacccggctaattttttgtatttttagcagtgacggggtttcaccatgttagccaggatggtctcgatctcctgacctcgtgatccacccaccttgacctcccaaagtgctgggattacaggcataagccaccatgcctggccatattccttattctttaagtgcttgcaggtctataatgatagctcctttttcattccttataccagtaatacgtgttctctgtcctttttgcattgtcagtattgctagaggtttgtcaatttttaatctttttaaaagactcctttgtttcattgaattttctctatagttattctgtttttaactttattgctttttgctcttatcaatatctttttttttcttttttcttttttctttttttttttttttttgagacagagttttgctcttgttgcccaggctggagtacgatggcgccatctcagctcactgcaacctccacctcccaggttcaagtgattctcctgcctcagcctcctgagtagctgagattacaggcccccgccaccactctcagctaatttttgtatttttagtagagacagggtttcgctgtggtgggtaggctggtctcgaactcctgatctcaggcaatccctcctgccttggcctcccaaagtgctgagattacaggcgtgagccactgcacctggcctattattttcctttttagctttgagtttattttgttcttttctacattcatgaggtaaaagcttaaatgattatttgagacttttttgtttgtttctgagacggaatcttgctctgttgcctgggctggagtacagtggtgcagtcttggctcactgcaaccaccacctcccaggttgaagcaattctgcctcagtttcccaagtagctgagactataggcgtggaacaccacgcccggctagtttttgtatttttagaagagacggggttttgccacgttggccaagctggtctcaaattcctgacctcaggtgatccacctgctgcggagtctcactcttatcgcccaggctggagtgcagtggtgtgatcccaaagtgctgggattacaggtgtgagccaccatgcccagcctgagactttttttcttgtctaacatatgcatttagtgctctaaattgccctctcagcactgctttaactgtgtcccagaaattttgataagttgtatctttatttttcttcaggtcagtgtgttctttgatagccattgagacttcctctttgacctggattatttagtaccatgctgtttagtttccaattgtgtggagattttcttgttttcttcctgttactgatttctagtttgaatcttttgtgctttgagaatatacttcatataatttcaatttttttaaacttgtctaagtttgtttttggcttaagatatggtctgttttggtatatgttctgtgaacacttgaaaagagtatgtattttgctgtggttaggtggaattttctataaatgtctgtcggatcctttggatggtggtgttattgagctctatatccttgctgattttttttttttttttgagataggatctctgttgcccaggctggagtgcagtggcactgatcatagctcaatgcaaccttgaactccttcggctcaagggatcttcctgactcagtctcccaagtagctgggactacagatgtgtgctaccacacctggctaattttttaatttttattttgtagagacaggatttttttttttttttttttttgagacggagtttcactcttgttgcccaggctggagtgcaatggcgtgatctcggctcaccacaaccttcacctcctggattcaagtgattctcctgcctcagcctcccgagtagctgggattacaggcatgtgctaccacacccagctaattttgtatttttagtagagacagggtttctccatgttggtcgggctggtctccaactccgacctcaggtgattcgcctgcctcggcctcccaaagtgctgggattacagacatgagccaccgcacctggcctattttttttttttttgagatggagtctagctctgtcgcccaggctgaagtgcagtggcacgatctcagcttactgcaacttgtgcctccggggttcaagtgattctcctgcctcagcctcccgagtagctaggattataggtgcccatgaccatgcccagctaatttttgtatttttagtagagacggggtttcactgtgttggccaggctggtctcaaactcctgacttcgtgacccacccacctcggcctcccaaaatgctgggattacaggcctgagccaccatgcctggccgagacaggatcttattttattgcccaagctggttcttgaagtcttgagctcaagcagtcttgccaccttggcctcccaaagtgctaagattataggcgtgggccaccacacctggcctgagtttttttcttgaaaaaatactttttttttttccttaaaaaatactatgctacttcctctggcttgcttttctgagaagaaatctgctttcatctgaattgtttttccctataagcaaggtgttgatattctttcattgctttcaattttttctgtgtctttggttttcagaaattaaagtataatgtgtgttggcatggagtctttggggtgttctatttgtttctgaggctatttttcttcataatctttcaagtacattcataattattgaagcatgtaaaaggctttaaaatctgtcaggaaactaacatcactgtcattttggtcttggcatctgttcattgtctctttacatttaatttgagattttcatggttcttggtatgaggaattttctgttgaaacctggacattttcatattatatcatgagactctagatcttatttaaaccttctgtttagctgatttttcctaacattgctctggcagagagattggggtgccaccgctgccaggtggggatggaagttcaggttccccagccagcctctgtcggcacctgcctaggggcagaggccttctcattactgctgagctgcggtggaagttctccacacgctctccagggacactgtggttggggagtggaagtctaggttccctctatgatgtccagtgactgtggcggggaggggtgggggagagaacatgcaggggctcttgttcatttcatttttgggaatgaaagtttcagcttcttatttagcctctgattctaccctggtgggggtttgaggtaactcactgtaggcttccagaagtagaaagtcctaggccttccaccctgcctttgctgccctgggtggggccrgggccacaagtctttggtggtgcttgactggagtagagtgttactgtctaaaagctctgtcttgctagactgccccttccttggtcctttgcctagaaagagcaagcttctgttggggtgtttttgtttgttcaaattggcgtatccaggttgccggctcttcagccccaagtttggatatttgaaagaaagaaaacccagggaactcacaccatgtttgagttccttagtggctctgctggcttctttgcacctttcagagtcctcctgtgtttgtggtatgtataatacccaagggttttagctctgtttagcagaagaaatgctgaaaagtatgctccatcttcctggaaatgagaacccagctgtcatttttaattaactcttttaattgaggtaatgggttttgtatttataattttgccagctttaaaagaactagtttttgtttttgtttttttgagacggagtctcactctgtcgcccaggctggagtgcagtggcctgatcttggcttactgcagcttctgcctcccaggttcaagcgattctcctgcctcagcctcccgagcagctgggattacaggtgtgaaccatcacacctggctaatttttgtattgttagtagagacggggtttcatcatgttggccaggctggtctcgaactactgacctaaggtgatctgcctgcctctgcctcccaaagtgctgggattacaggcgtgagccactgagcccagcaaaagaactagttttaaacccaaggacttatgtcctgattaatccgtctatctgaaactttattttgagcatgaaaaaaggagtctaggtccctttgaatccctcaactgtttttttccacttcctactggttactgttttcacttagaacaagttattgtttgtttttatttgagatggagtcttgttctgttgcccaggctggactgcagtagtgcaatctcagctcagtgtaacctccgcctcctgggttcaagcgattctcctctcagcctcttgagtagctgggactacaggcatgtaccactatgcccagctaatatttttgtatttttagtagagagggggtttcaccatgttggccagcctgatctcgaactcctggcctcaactgatccacccccctcagcctaagtgctagaattataggcatgagccactgcacctggccaggagcaaattattagatagatgtatatctaaaagaaattgtactacttcaactaattaagtaaaatcctattaaatatgtcagcatttgaagttccacagctttctttggctgtcctattacaacactgtttctttcttctgcctacttaaatttgttttgctttgtctgcgaacattcccttagtactgtgttctatgggagaaaagaaagagaaagagaaaatgccttatatttgtatcttccctggcttacagtatatgttcctgatagtcaggtacagtgtccttttcctgttctccatagctgctaacacagaacagatacttgttaaatatctgtaaatgagtaacaactttataaatactttgaagaaaagattatcttcttctcttttaaatgttacacagttctggctgggtgtggtggctcacccctgtaatcccagcactttgggaggctgaggtgggcaaatcacctgaggtcaggagttcaagaccagcctagctgacatggtgaaaccccatctctactaaaaatataaaaagttagccaggcatggtggtacatgtctgtaatcccagctactcggaaggctgaggcaggagaattgcttgaaccggggaagcagaggttgcagtgagccaagatcgtgccactgcactccagcctgggcaacaagaatgaaactccatctcaaaaaaaaaaaaaaaaaaagttacacagttccttccttgaatcttttatgctaatattggaggctcaatacacacattgtggaactgatgcttatttggccatctaggttaacattttgaatatcataaatattggttaagtctggacattaataatggcattagacagcaccagttggcaaaggaatcatcatgttacgtgcaaaaaaaatgttatgggaattgggtaacaatcttagtacggcagaaaaaatgtttatttaccctaatgcagggcttcataaattttcttggcctataatattcataagtatcttagtaatttttatatagcatctctaggccaggatacccatccacttatgaaaaatacctatccatttatgaagaagttaggttcaaacagtttatgttctagcagtttaacacctattgggccctgttacacagtttctcaaaccctgcagtcagaacggacattctaccctcattcctcttccacattgattttctctctgtacatcttatcacagcaactgcccaaaacccagcttcacaaaaatatggtattattcaggccggacacggtggctcacacctgtaatcccagcactttgggaggccgaggtgggcggatcacttgaggtcagcagttcaagactagcatggccaacgtgctgaaaccccatctccactaaaaataattagccgggcgtggtggtgcacacctgtcatcctactcagaaggctgagacaggagaattgcttgaacccaggaggtggaggttgcaatgagccaagatcacactactacactctagcctgggcgacagagtgagactctagctcaaaaataaataaataaataaataaataaagcattattgaagaggagtatagcagtcttatgtaggaatcgtgaactacctctagctagtagttcacacagtgttcaacagatgttgctgtgtttctttcaaaaatttaaactatcccacaatacctcgtgagtttgccattgtgtcctgggtattgagtacatagtttgggaaccgtggccctaatgactgtcatcacagaggatgagaggaatcccatgtaaggactgagatgtgtcttttggagggtagtgggaataatgaaaagggatatttttaggagcattgatgagggacaagtaggtgtttaaagattgagccatagtcttggctaaataagccatctgtctttaatcttatctcctctaaaggattgaaatacattttgtgtatatctgatattcacttgcgaccacatttatctcagtattaatttttttatgctagccagttcatttgcatggtcatttttatttttctttgatacttttgatgtatcaaaccaatgttgatgtagaaggatgacttagagtctttggtcctatccttgttattgtattattattattagccttttttttttttgagttggtgtctcggtctgtcacccaggctggagtgcagtagcatgatcttggctcactgcaagctctgcctcccgggttcacactgttctcctgcctcagcctcccgagtagctgggactacaggtgccgccaccatgcctggctaattttttgtatttttagtagagatggggtttcaccctgttagccaggatggtctcgatttcctgacctcgtgatccacccatcttggcctcccaaagtgctgggattacaggtgtgagccactgcgcctggccaaatgatgtattagctttttaaaggacgtcacttgagtccaatctgtgtttccgactcacagaaacaaaataaatgaatcaaaagcgcttgtttttttctcttcatgtagaacaaatcacctgctgcagtaacagaaccagagacaaataaatttgatagtaccggatatgataaagacttagtagaagctttggaaagagatataatttcccagaatcccaatgttcgatggtaagttatatcacaaccaaataattgggtgctggtgatgctattcggaatggaaaatggagcaaatgtgagcatgtactgaagagcagagcttgaggacagaaccggagtatgtgcagcgtgagcatgacttccctgcattcagcctattccaatttttgtctgagagtctgaggtttttgtttttgttttttagagacagggtctcactttattgcccaggctggaggacagtggctcgatcatagctcactgcaggctcaaactcctagactcaagtgatcctcctgccacagctttccaagtagctaggaccacaggtgcacaccaccacatctagctaattttaaaaaatgttttgtagagatggagtcttgatcaggctggtcttgagctcctgggttcaagtgatcctcctgcctcagcctcccaaagtgctaggattacagtcatgagcctttgcacctggccaaggcaatgatttgtatgtatgtgtgttgcttattatctatagcatcctagaaatgttgcttttattttcttttagagcagtggttctcaacttgattaatattacatgtaatcaaagatctgtaatgtattacaatgagttataaaagttaacttttccacaaagttaggtattttatatttctgttaaaaccttaatgattattaggtatgggtttgaatgatattaaaaaatattggggacattaatattttatacaatgaaaatactttttttaacagaaattgccacatgtagcagtagtagtaggtattctagtggttggagatgactttatagtaatctctgtgatactctttaaccttggcatctacctcttagtaaagctggaggcaaagcagctatgttgtagcctgtctctgctttatacgatttttattctttatgcttttttttagttttaaaatacatgggctcattgtttctaaatcatggagattatggaatgaggaccataagagcaggagtttaaaatgagwtgacacataaccctgaagagtgtgcctgtagactatgttctcgtgatccaggctaaaaactgtcaaccgccaataactgaagaaaaggttgtgctctttatatatctgctggttgacatggtgggcctcatcacagtgcattagttcacccgggctcagagagaggctcaccattctgtcagcagtgcaacatcatgtgcttccagtggttctcaagagtgactgcatagacatgtatcatctaaagggttgttaataaaatgtcttctctttcagggatgatatcgctgatttagtagaagctaaaaagttgcttaaggaagccgtagtgttaccaatgtggatgcccgaattctttaagggcattaggagaccatggaaagtaagtttattactgtgatggcattgtcaaagtaaatggcagcatgttgatacagagagccaatatttatctatattgggaaaagtggagggagaaagtggagtcaggaaatgtttaaattaaaaggtatatgttgtgctactgagaattttgttagaccagaagctgttgcatgattcctagaataagaaatacatacaatgtgatctttggaaagttgaatacacagcattaaaatttagaatttggccgggcgtggtggctcacgcctgtaatcccagcactttaggaggccgaggcgggcggatcacctgaggtcaggagttcgagaccagcctgaccaacatggagaaaccccgtctctactaaaaatacaaaactagccgggcgtggttgtgcgtgcctgtaatcccagctatccgggaggctgaggcaggagaattgcctgaacctgggaggtggaggttgtggtgagctgagatcacgccattgcactccagcctgggcaacaagagcgaaactctgtctcaaaaaaaaaaaaaaaaattagaattcaccccatttagaatgagctcatatttgcaaatatgacctagtcagctaatgcaaaaacactccattttatatgtcatgttgcatgattgtaacctgtattttggggattgttctcaataaattaatgagaaatatctgcatgtgataaatactttttaaagtcatgggctgatctaaaaaaagaccatcaaaaaagcttttcttggatttggaaaacacactgataggtaactctgcatgtatgaatagttgtaaaaatcctttatacattaagtgataagcaagatacaaaatgatagatatactttgaataaattatatatatatatgtattttgtttgttttgttttgagatggagtctcgctctgtcgccaggctggagtgcagtgcgatcttgcctcactgcaatctccgcctaacgggttgaattgattccgctgcctcagcctcccgagtagctgggattacaggcatgtaccaccacgcccagctaactttttttgtattttagtagaaacggggcttcaccatgttggccaggatggtcccaatctcctgacctcgtgatctgcctgcctcggcctctcaaagtgctgggattacaggtgtgagccaccatggctggccgaataagttatatttttaaacaacctaatttgtctgagcaaaaggacaatcaggatataaatccagatgctaatggtacctctgttagggtgctgatattataaactactttttctcatctttgagttccaaatttttcataatgtggttatcttcttttttaacgggaagagtaaatttgtgacaaagtatcctcctgtttatctgtttgtcttttatttgtcttgatattatatataagttggtcgaaatttgctacttagtaatgacacttttatgaattagaacaatggcagataaatcctctgctgaggctattatattcgcaacagggagtactgatggtcggcccacctggcacggggaagacgctccttgctaaagcagtagctacagaatgcaagacaacattcttcaatgtctcttcatcaactttgacttccaaatacagaggagaatctgagaagcttgttcgtcttctgtttgaaatggtgaatgtttgagacagctctaatgattctttacctctctaaaaggggagaaagtgagctgtaactatctccagtatatggaatagttaggcaggatgccattttgcccagagtatgagtcctatgcccttaaagctagatttctttacaaacatgaataattagagtttctctttgtctctttttctccagatgtagatccaaatctaccagttttggggcatgctcacattatgggatctgcattactaatcttctgtaggaatctgaaattatgttttttaaatcaataggtttagttataatatgataaccacagtattgtaacaatgatgccaaamggtgagaatcataatttattgtggaacttaggtcacctccgatctattaactgcaccaaatgccttcattttaatgacctaatctttggattaggttctttcttccaccaatacaaatcagagtaccaatagaagaaatgtaattcaacaagttctggtagagtgtttagattgaattccacagccttttaaacttcagactttgttaagcttcactgattacgtcactcttgcctctaagaaacagagtagttttatgtaattaggatagagttatgctattagtgacaaagacgtgaatcttcttttttttgaaatgggttctcagtcttgcctaggctggtatgcaggagcatgatcacaactcgctgcatccgtgacctcccaggcycaagtgctcttcccatctaagcctcccaagcagctgggatgatggacatgagccaccacactcagctcattttttttttttttttttttttacagatggggtcttgctgtgttgcccaggctgatcttgaactcctgggttcaagtgatcctcttgcttcaractcccaaagtgctagatttataggcatgggtcaccaatcctggtcaagacatgaattctattttttttgacagggtctcattctgtcacctaggctggagtgcagtgttgcaatctcggctcacagcagccttcacctcctagcctcaagcgatcctcccaccttagcctcctgagtagctgggactacacaagtgcactaccatgcctggctaatttttgtatttttagtagagatgaggttttgccatgttgaccaggctggtcttgaactcctgacctcaggtgatctgcccaccttggcctcccaaagtgttaggattataggtatgagccactgcgcctggccttttttgatttttttgtagagatgaagtctcactacgttgcccaggcagtctagaactcctggcctaacactcctcttgcctagaccccataaagtgccgggattacaggcaagagccattgtgttcagctttttttttttttttttttttttttaagataagctctcactatattgcacaggttgtagtgcagtggttattcacaggcacaatcatagcatactgcatcctcctctctcagcatcccaagtagctgggacttcagtcgtgtaccactgcactcagctttcaagccttatttttattgtccttagggtaatgaactctcagcaaagttagccctcattttgtcatagttccagcaaaagtccaaagattaatatttggcctgttttgagtttcatacctatgccgaaactccttgtttttggtcagagaattggagtgctctgattggccaggtctgaataaaacccctggagttccaagtaaagttagcctcttttgaagtagtggaataggaatgagaggggcccggcatggtggctcatgcctgtaatccccgcactttgggaggttgaggcgggcagatcacttgaggtcaggagttcgagaccagcctggccaacatgatgaaaccccgtctctactaaaaatacaaaaattagccaggtgtggtggcgtgcacctgtaatcccagctacttgggaggctgaggcaggagaattgcttgaaccggggtggcagaggttacagagagagggagaggggagaggggagaggggaggaaagaaagaaagggatgatttgcaaatgaaaaagaggcttctcttaccagaagtgtgctgtgcagggagaaccaattggtgtcctctaccgtaccttcctgggccagctaaacccaggacacatagcctttccttgaagtcagatcattctacataacctcagtatgtgggaagaatcagtctagtcacttttgcttggtgtggcaacagactgaagtttaatttttgttgatgtaggtgcttttgatagatgcttcctaaaattttagttgagaattttcttggatgttttaatgatgatgaagttcactctttccctctctccatttgttgaaaaagtacaaaaatatttatacataaagacccaagtattgactctctttaaagatgaaattatcccactaggtacagtggctcattgtaatcctagcattttgggaggccgaggcaggaagattgcttgagtctaggagtttgagaccagcctaggcaacataataagacaccatctctaccaaaaatataaaaataagcctggtgtggtggcacacacctgtagtcctagctactcgggaggttgaggtgagaggattgcttgagcccaggagctcaaggttgaagtgagccaaaatcatatcactgcactccagcctggatgacagagcaagaccttgcctcttaaaaaaaaataaataaataaaaaacggttcattagaagccatattttagctgttctaattctatcccatctccccagtattagcgtgagagaaagatgcacagtgtggcaggctccttagctgttttgttgttttctttctttcctcttgttttagagacaggttctcactctgtcacccagtctggaatacagtggtgtggtgtgatcatagctcactgcagccttgaactcctgggctcaagggatcctctcacctagcctcctgagtagctgggactcagacacgtgtaaccacactcaactaatattttaattttctgtagagatggagtcttgctatgttgcccaggctggtctcgaactcttgggctcaatccatcctcctgcctcaccctcccagtgttgggattacaggtgtgagccactgtgcccagcctccctcagctattttctgattgctaatctgtagattattttaaaatgaaataatagcttaatagcttgatattgcatggtttcttcctttaggctcgattttattctccagccaccatatttattgatgagatagactccatctgtagtcgccgagggacttctgaagaacatgaagcaagcagaagggtgaaagcggagctgctggttcagatggatggtatctgtgtttagcttgagttgaacagggacgggaggttgttaggtgtggtgtctccagttccagtgggtcaaactttactcatagtgctaacccaagcttttaataggtattcttaacttcagatggactagagggggtggcaagaagttcctgatagtgatagtaatagatttggtacactgacagtggtgacaagtcagaattaatggccacmcacagggcacccttttggtatatacaactatcttactttagctatgaaattgaaataaaaataaatgcagataaattggccttagagtttatgtacgctttgaaaaagatttaaaattgttatgtatttgagatctggcttttcgattaaatctattttgagtcatatatttgcatactacagaactcattttctttggattacaaattcacataggtaccagttaacctaagtcttaaggaggcattaagactgtgcttccttgtattgttgtactaaatagttgttgatctttaaatagctgagcttcatttggtataatccaacttaatatctttttcactctccccttacccttattttaggtgttggaggtacttctgaaaatgatgacccttccaaaatggttatggttctggcagctactaattttccctgggatatagatgaggctttaagacgacgccttgagaaacgaatctatattcctttgccgtcaggtatcttcctttcaatcttgtcagaaagcctgttaactttcatgtagttttgtttagagaatttaaaatttgttattaactaactttctggaagagatacatgaggagtatcttcctttacagtactagtttggctatatgccttaatactaaatagtaaggaattaaaaagtaaagaatggctctttacttaattatctcttcttagagatccaattcttactggaagacaacatctcacacaaagaagatttgagacaatagtatactatgtttatgctgcaggcttacattttaaaatttgtttctaccattagcaaaaggcagggaggagctattacgaataagtctacgtgagttggaattggctgatgatgttgaccttgcaagtatagcagaaaacatggaaggttattcaggtgcggacattaccaacgtgtgcaggtatgaattatcatggaagcataggtttttgtaagcataaacttctagtatgaagttttttggttttgttttttgagacacagtctcgctctgttgcctagactggagagtagaggcgcagtcacagcttactgcagcctgaaactcctgggctcaagtgatcctctgacgtgaagtttttatgctgaattaagacagatcaatatcttggtggtggctcacgcctgtaatctcagcactttgggaggccaagtgggagatcacttgagcccaggagtttgactggcctgggtaacattgcaagacctcatatccatgaaaaaaattttaaaaattagccgggcatggtggttcccacctgctcaggaagctgaggcaggaggatcgcttgagcccaggagtttgaggctgcagtgagccatgattgtgccactgcaccccagcctgggcgacaaagcaagaccctgtgtccaaagaaaaaaaaaaaagatgaataaagacccacattccagttttgttttgttttttgagacggagtctcgctctgtcacccaggctgaagtgcagtggtccgatctcggctcactgcaacctttgcctcctgggttcaagtgattcttgtgcctcagcctcccgagtagctgggattacaggcatgcaccaccacaccyggctaatttttgtatttttagtagagacggtgtttcaccatgttgaccaggctggtgtcgaactcctgacctcaagtgatycgcctgcctcagcctcccaaaatgctaagattacaggygtgagccaccatgcccggccccacatacattttgtagtcagggtcacaaattctggttttgttggtgttagcaggtgctggtaagatatctggtatctttcatgtcagtgaagagtctacagttcatttgaaagctacaagttcaagaagctaatgttaggataaattgtgtaaaatagaaaatcagtaattgtcttggattaaataaattgttggtgcctttgttcactatattataaaatacgaaatgaytgtgaaatatattgacttggcatatgcacagaatacagtctcattctcagtgaacttatcctaaatgtgacagaatagcagtaaaaagaaaaaaagaatgtctttaatccagctggttcaagtaggttttgtcctaatctaagtattagtagagacacttaattaaccaggggcttgactgcgctcgtttcctcctttctaaagtgagcataccacacagggttctgaggattaaagctaaagtgtatacatcaaacagctctattgctatccctttgcataaatggtggctgctattaaggataaaacttggtaaaaggcaagagctgtttgaatctgaagttttgttttttttttttaacacaaatgagaaaaggagaaaccctgaacttacctagcttttcctctacatggagaaaatatttaattttcttgttaacagtttctcttctcttctgactctgtgatgcttattcttcattttattgaatagttataatgaaattcaaattgctagctttaaccccacttttactttttctgggattttatattcagtattaattatttaaattagcatcctttttcattacagaagatttaactgcttaaaaatcaatcacaacaggctttgtattccaataagtttctatacaatactacatatatatgtaatataattagagaatgctacaacagatcaattgaaaatttttctattaacaggttttcatttaaccaaagtaacattgtgtgtgttgttgttgtttttaacttaaaacctagggatgcgtccttgatggcaatgagaaggcgcattgaaggtttgactccagaggaaatccgaaatctttccaaagaagaaatgcacatgcctacaactatggaggatttcgagatggctttaaaaaaggtttctaagtcagtgtctgctgcagacattgaaagatacgagaaatggatatttgagtttggatcatgctaaattctcacatgtaaactgtgagaaatgtgccttaagtgtttgaatattaaatgcagtaattcattgtactgagtgctatattttttttaactttcataatggtaagatttttttwaaaaaacccttatgattctgaataaaggcaatatttttaagctgaaaatttgttttactttagcattactagatttctattattatttcactgaccacaaatgttacttagcttggaaagctgtcttttttttctttgctttttctatttttttcaagactgtttgtttcttctagctgaactggccattcatactgggattagccaacagaccataagaaagacatcaatcttggctcttgtttgaaaccaatagctacaatggcaaaccatcacgtttcttgattcagggcctaggaaagctgactttatatgcacttttttttttttttttttttggtatataaactatttattaacagacaaggcctacagacttacttcttcttagacacacccacgatgcggccacggcagcctgtggtcttggtgtgctggcctcggacacgaaggccccagaagtgacgcagccctctacgggcccgaatctttttcagtcgctccaggtcttcacagagcttgttgtccagaccattggctaggacctggctatattttccatcctttacatccttctgtctgttcaagaaccaggctggcatcttgtactagtgtggattctgcataatggtgatcacatgttccacctcatcctcagtgagttctcccgccctcttggtgaggtcagtgtctgctttcctcaacaccacatgagcatatcttcggcccacacccttaacggcagtgatggcaaaggccattttccgccacccatcaatgttggtgttgactactcggcaaaatatgctgggacttttcagggatcactagagacatggcggcagcacaagtggcggcatgtaggcctcctgtggaagagagctatatgcacttctaacttggcatcttctctcctactgtttgctgctgttactccttctaggaagaaaaaaatattggctctagctccagttaaccttacccattgcctctgggtgccagcggataactgaaaatccctgaacatttttacacagtagctaattaaagcatgagccaagcccagtatgtcttccttcccacctggtgttatggtagcttcccttcacctcctgggagagttttaaagacacattttactttgcattttaaaaaaataaaataaaattcttacttgacttttattttgcctatgtaagaggctgcactataggcaaataggcatttctaaacctgtgctgctcatagtactctaatcactcattaactcatgcataccaaacatagctaaagtaaagtattaatggtatgagttaataagtgaaataaaagttaatggtataaaattttagataagatttccatgtgtgactacttagaagaaaataacttaccatgttatcccaaccatagaaaacagagcctcaggagattgcggaccttgctgtggtcccaagtcttactgagaaagacagaagcctgggtagggatcttctgactgcagagcctacactctccaatagaccatgtagcctcctaaagttttttcttcactagaatctgtaagcttatggttaatagataaaataagaccatgtcatcatttggagttagaactggtgctttctaatgacttagggaatgagaaagggtgtaaagaacaagtgttactggttggtaactcaaggatcaaattgtaagttgcagattatttttttcagcagtatggagagagtattgcataatagagctccatgcaatgtaattaatttaaagtctggcaaagtgaaacatcactccttcattctacttgtcatcctctccacccccatcacacacatacctatttggcctaaatataaagtggtctcaaaaaaaccaaccatggccgggcatggtggctcacgcctgtaattccagcattttgggaggtctaggtgggtggattacctgaggtcaggagtttgagaccagcctgcccaacacagtgaaaccccatctctactaaaaatacaaaaattagccgggcatggtggtgggagtctgtaatcccagctactcaggaggctgaggcagaattgcttgaacttgggaggtggaggttgcagtgagctaagatcacaccattgtactccagcctaggcaacacgagtgaaactccatctcaaaaaaacaaacaaacaaaaaacaaccattactttcttggatagtgttttcaaaatgatgggttgcagtatatatatatatatatatttttttttttttttttgagacagagccttgctctgtcgcccaggctggagtgcagtggtgtgatctcggctcactgcaagctctgtctcccgggttcacaccaattctcctgcctcagcctcccgagtagctgggcctacaggtgccccccaccacgcccggctaattttttgtattttttttttttttagtagagacgaggtttcaccgtgttggccaggatggtctcgatctcctgacctcgtgatctgcccacctcggcctcccaaagtgctgggattacaggcatgagccactgtgcccggccagtaaaaatattttttaatgaaacaacagaaagtatcacatagagggccaggcgcggtggctcatgcctgtaatcccagcactttgggaggccaaggcaggcagatcacaaggtcaggagatcgagaccatcctggctaacatggtgaaaccccatctctactaaaaatacaaaaaattagccgggcatagtagcgggcgcctgtagtcccagctactcgggaggctgaggcaggagaatggcatgaactcgggagacggagcttgcagtgagccgagattgcgccactgcactccagcctaggcgacagagccagactccatctcaaaaaagtatcacatagagatgagttatatgtactcgttcacattgtaaaatattaatatgtcaatatgagtgatggttaaaaaaggtaataaaacacttttagggtaaacagcactatatctagaaccacaagaccaagggcacagtctaattcatgacatcaatggactcattcaatttgagccatggtttcagccagtgtaaatgaaagtatacctactcctgcatctcagccattcttacctgggcaaaggttttatatcagtgtaaccaaaacagctatacttttttcctcaaaaaaaaaaaaaaaaagtttattttagagtgagaacatgtcatactacttttaaatcttggagcattcaaggtaagtagtcttggtacaggatacaatcaaatcatgatacacttcagtgattttatactgagtcacatacttaatataaaggcacactgtactgaataaaaaaataagtgttaagttcttgaccttttaaattagaattttataaagtgcttttcataaagtcttatatattatagtaattaagtggatataatttccttaacaaaggcaccttgaaaagttattggcacatgagattttgtctggtcttttttttttcttttgataatttcaaagtctcttcacatgtgttctcttccactttaagttttccttaacaattcatcatatgaatagccagcccttttagagaataaggtcaacttttttttttttgaaacagagtctcgctctgtcacccaggctggagtgcagtggcgtgatcttggctcactgcagcctccgcctcccgggttcaagcaattctcctgcctcagcctcccaagtagctgggactacaggcgtgcaccgccacacccagctaatttttttattttttttagtagagacagggtttcaccatgttggcaggatggtcttgatctgacctcgtgatccgcccgcattggcctcccaaagtcctgggattacaggcatgagccactgcacccggccgagaataaggtaaactttaacttggcactgtaaaggtcaattttcaggcagtcttagagtttagcaatttctctagtgtataaactgattcttaacgatttaaagaaaattatattcaagtggcaaatttggaggcaacaggctacttcggagtccatgatatgagatggcgttttaaatacatgttttatcttcaaggttttcagctcttttctctggaccatctggatataagttgatagctgtcacaggtatgacgtccactttatccaactgaagaattcctctgaaatagaaagtgattaattactatcaaaattaaatgtttcctctgcctgtagtttgatagtgagaaaaggctacttcaaggttataatatacacctaaggttaggtgcttttgctacattctatttaaaaattcatagtggttgtacaaactgagcccaaagtcactttaaccaaactggctgagagaatagaaaggcatcgaggaagttcattatttcctattttagggaagaatagggtaagtatagatctccaaggcagagttaggttcctagatacacccaggctgagcaaaaagcctaagcctaagcctctctctaaataatactcaccaccacaacacaaccttaggtctttagatagtgttgctctttttgttacttaaaatccctgaccagagagtacgtctttggattgaatctaggaccctgcattgtaaattcagtgttattctaataagaacatcaacgggggttagttgtttatagaaccaaacagattctaaagttcacaggggagtaactgcaagaacagccataagattttttttaaaagaacaatggggagaagacaaagttgtcttaagtagctctcaaaggttttattaaaacatgatagtaggccaggtgtaggggctcacacctataatcccagcactttgggaggccaaggcgggcagatcacttgagcccaggagttcaagatcagcctgggaaacatggcaaaaccccatctctactaaaaatagaaaaaattagctgggcatgggacacatgcagtcccagctagctagctattcaggaggctgaggtgggaggatcgcttgaacccgggaagtggaggttgcagtgagccgagatcgtgccactgcactgccgcctgggtgacaaagttagcccctgtctcaaaaacaaaaacaaaacatgagagtaattaaaactgtgctactggcacaggaatagacaaatagatcactaggacagaaaacagtccagaaaaagactaacatatatggaaatttagtttataataaggtaacattctaagtcaatgataaattactaatggaaaaatggcctctgtctgggaaacaaaatgagaactctagctttaaaagtatacagaaaagtaatgctaaaaaataaattttggctgggtgcagtggctcatgcctgtaatcccagcactttgggaggctgaggtgggtggatcacctgaggtcaggagttcgaggccagcctggccaacatggtgaaaccctgtctctactaaaaatacataaattagccggctgtggtggtgcacgcctgtaatcccagctactcgggaggctgaggcaggagaatctcttgaccccgggaagttgaggttgcagtgagcagagattgtgccactgcactctagcctgggcaacaaagcgagactctgtctcaaatatataaataaataaataaataaattttaagaaaatataatggctgggcacagtggctcatgcccttagtaatcccagcacctttggaggctgaagcaggaggactgcttgggcccaaggagtccagcctgggcaacatagtgagaccctgtctctacacaaaataaattttttttaaaaaaatggctgggcacggtggctcacgcctgcaatcccagcactttgggaggccgagacgggtgggtcacttgaggtcaggagttcgagaccatcctggccaacatggtgaaacccatctctactaaaaatacaaaaattggccaggcatggtggcgggcgcctgtaatctcaagctattcaggaggctgaggcatgagaattgcttgaaaccaggaggtggaggttgcagcaagccaagat

SEQ ID NO: 94757 - DNA, 567899 bp, Homo sapiens
  misc_feature (1)...(567899): n = A,T,C or G
tatgttttatttttttgcctgttaaactcagatgtaaactactaattctcctgtatcccccacagagtaactagcactgtgttgtgcccttaataaatgcttgcaaatgacaaaatgaattctgggctttggttaaagatgacttcagcatggaaatgagcccctatgtttgtgtgtaggttttaatggttcattttcttgtcagacttcccctggttatgaatgctgtggcggcatcagcagtataaagggaggattttattggagaacatttggaggattagaaaaatctccaaagctttggaagcaccgcatcctgtgttcagacttctatttctttctgtctcaagaccacaataagcacagaagaaagatggcaagatccacagggttccatatgtgaagccagtcccccagcccccctcagaagtaggtgggaggaggaaaggagcataatcattagagaatttattattcagctgtgttaattctcatcaggctgcaactttgcatacgagctcttaaccccacaagatatagttattatttaatgcatgatgtatttagttttaagttatcctctttcctggtttttactaaaataacaaacaacaaaaaaatccccatgataattcatgcattcagaccaaaagaattcaaacaggattcaatgggaggctgtatagccggtacctttatacctctttatagtgagccgtgaaaaacataatacattttggtgggcatagaaaatactcactagcataaagggagaataaggcaccatttattgtcccagaaaaaataatttgtcaaacacatactgggttactgtgaagaccaggcattttttcccccagagtttattcttctattaacatcattagacgaggctttttgaaaatggggagcggctcaccagtgggaacctaccagctctggaagtgactgttactgtcccatccctccacctcaatccaattcacacttttatgattggcttcctttttgacccatgcttgttaattatatccagctgtaggcaaattgctcttccaaattggcaatactgagctctcaagctgctcacattttctgcttcccttgataaaacctttggagcatgcattttcttgactagtgtttctgaactaatcctcagttatggatgttttaagggttcaagggacttacaaaataactctggttgtgaatacagtgtatgtctttccatctgatcagaaattgcctaagaccatatagagagaatttcctgagaaatgcaggcaagtggcatcactatttctcttattcctgaatactctattgttaaggtctaagagccaagctaactggacaggtcacagtgcaactccagggaggagttaggctttgttctacaatccaaggccccagtgcccatccagggtgatagcttttaagggtatgacaagcacatttttccactctggaagtccctgctctattcatgggctttattgtcagaaattccctgtccctcttgtccccagggattctcttgacaacacacgtacccatgcaagaagtttcctgtaagaaagtgcttataggtgtgtttttctttcaaagagaaaatagaagcttatttccacctaccaggtcaagaggctctgcaagaattggcttgaggattttgacacctgactcaaataaaaatttttagagataagaattaggtacataggaattggaaaaaaatcagatttagaatccgaagaccccaggtcagagttacaatcctgctattagctagcagcataaccttgggcaggtattttaattgctctaagctttgattttcctcctcagttaagtgaaattaatcatacctgccttgcctccttcacagagttggagtgaggatagatcatgatccatcatattcatgtgggtgaatatgctttacaaactaaaaagcgtaatataagcagttagttattattaacaagctgagaatattatctaattgcttataaatacatgctgtgtgtacactcatgatctgccactgggtaaataaaaccttgcttccgctcagtacaagtttgtgcatagtcctttagtgaacaagacaaggaaaataacatttagcagctgttatcaaccaggccctttcatgtctatgctttttttttttttttttttgagatggagtctcgctctgttgccagactggagtgcagtggcacaatcttggctcactgcaacttccacctcctgggttcaagtgattctcctgcctcagcctcccgagtagctgggacaacaggtacatgccaccatgcccagttaatttttgtatttttagtagagacagggtttcaccatgttggtcaggatggttttgatctcctgacctcgtgatccgcccgcctcagcctcccaaagtgctgggattacaggcgtgagccaccgtgcctggcctcatgtctatacttacaagcaaatctgcagctctacaagaaaagaaaatgtatatatatatatatatctatctatctatatatatagatagatatatatatatagatagatagatatataatttaatcctataaaaatattattacttcattttcacaaaaaggaaattaagatacggtggtattaaatgttgtttaatgcaatgttcccaaattctgttccctggaaccctggtcctgagacctactcctctattaaagcgttctatggtccaaaactttgagaaacaatgaattctttttccttctccaatagacttatagcacatgataccatatcggaaaccatgggaaagattctataataaagaagcttgctatattgaagaaatctgttaaactttgctcagtccagagttctccgagctaatttaatcttgaggctgtatttttgaattatacttatttaaatctgatagaactgggattctacagaaaacacttgccaaatgcagatctaagattatgattggagttagtgtgtggtagatctgcaatcagaacacaaagctgtcctcttttaaaagaaataatgtaaccataggccaaaacaataggaaaatagagaagagctcccataaaattttagtatactacatctattgctaactatattaatactatgttttgtaatttttttcagccttctttttttcttggttatagtacaaagacctttgtcttctgtttttgtttattgttgtaaaatatacatagcataaactttatcattttaacaattattgagtatgtaatttggtggcattgagtccattcatgttgttaggcaactattaccaccatccctctccagaacagttttatctttctaaactgaaactctgtattgtcttctgatgattttacccaacatttgatcataagcatttttccatcttgcaatttacttttttcataactttcatttctagtggctatgagatattctaccatataatgcttatgaatctgcctattgtagaatatttatattctttctcttttgaaatgataaacatattaaataacatttttcatattttggattatttacttgcaatagcttctagactaaagaataggaagattttagtgatttttaatgcaggctgatgatttcttttcctaaaagtttaaccaaatttatacttctattgattcatgtattcatttattctttcaaacaaacaaaaatctactaattcctaatatttgccacgcacttagctatgtagaagacccaccagatttctactcaagtgatttcaatccatactggtcgcattagttatgcacaaaaggaataatgtacttacctaaaagttttattgcatgcttttgatttttagtgagaaaccatctgtgttggtttgctgatttcttttgagaatttcctttcttctctttgcatcgcctcccccacttctcacttaagtatgtgtctttgggtaagttacttaatctataaccttgttttcttatttgtcaaatgggaataattgtaccaaagtcttcacggaattgttgactgaactcaatgaaacactgaaaatcttgatgtctcagtgtgacattgtatactctaagacagtgcctagaacatttgaagaactttctaaacattacctgctattattattacttccatgatagagaaattaataaagtttcatgaaatgaatcttctatcagctgtcccccaaaatgggcaaggtaagaattgtgtgcactttgtcctggcactgtgtgaaaatatttaaagaagttttttgtttgtgtgtttaaacaaacaaattaccacgtcatgaacttcttttacatttcttacaagagtagaacagatgaattagtatacagacagtagggttttgtttgtttttactgggaaaaattgctgctaaattttaggaagttctgctgtcctcaaaaagaaaaatatgtccctcagttttttgttacctgggatctaggaatgttctctaattaaagaaatggaatggtgatggtgtgttgaaaggtataggttaatgagttaaaaaaaaaaaatctacattgcaccctaaggaaggatgaacttaactatgctgaactgaattgacaagggttgagctagtcagtgtgctaatgagcaggctactattctcatagaatttttaaaagtcttttctgcctgatatgtatgtgtgtataatatgtatttatatatgtatatatttgtgtgtatatttattacatttttgtttccacaggctctgtcataagtctggtcattaatagcatatatttgattaaaagaatatgtggcttggtaaattatgtgaatgttatattaaaatgaatttcacattgtcttgatttacaaaggctaagatgtctgagaaactgagagatgtcaatcaacagactattgttttagcaattgtacataacacataaaaattctgaatcaaagttattatgttattcaattgtgaccatacctattttttgtgacattttacaaaaatgaataaagtatgcaccatacagtcttaccacagaagtaaggcagggtggcatatggcgaaaccacttcaagctgctgaagtagttaactgtgaaatattttactgtcataatatagcattattttctgccagatgaatcattccgaagaagctgttttcatggtcagtgtaaaagtccttttgttaaatacttatgtcttaactacctactagatattaaaaaaaacaaaaccacacacacaccagacctaggtgcaaggaagggataataagccctgatgcagttcttaggtgagaactggaaaggggccggagggtttcagagcaacaagcaaagtcagtgaagcagagtaaatccaaatacttggccaatgacaaataaaccagaaaggagacacgccagctgttcacgctggaaagttactgatcgtttattctggttcaagttttatttattctatgaataagggacaagttttcgatgggggtggggtgtcttattccttattacaagaataaggaacggggagttttcaaggcaggcgggtgtttcctcagggcgcttccacactcccctttcaatcagcaaccgctcggggggacctccaccttgggacggaaccccaggacgcctctcctcggacggcgggggtttctctgcgcgcgtcctcggtcgtctggtcgcacggcttaccgaactctcgcctctcaaattctgagttctggaacagggcagcgagctgcgccggctcccctttctcgctcgctccctccgagcagcggctggcggcggggcccaggctgcgaacaaaggcggcgcggggcgcgcggccggggctggcgcgcgtctctccggcaggaggcggtggcggcgccgcgcccgagcccgcattcctcagaagcgcccggagcccgcggggcgacgtcacccccggctccgcccccgtccctccccgagcaaagtaactcttgactaacaggagcagcctccgccgagcatggagagctgccgccgcggccggccggcgacgctggcgacgctttcgcccctgaggtagtttggcgaccgcgaagaaggaaaaagggcgggcgggcggctgtcctctcaccgtcctcaccccgcgaggcccggcccgctcctccgtcgtggatttcgcggcgatccccccggcagctctttgcaaagctgcttgaaacttctcccaaactcggcatggatacgactgcggcggcggcgctgcctgcttttgtggcgctcttgctcctctctccttggcctctcctgggatcggcccaaggccagttctccgcaggtgagtggccggggggcgtccycgacgaacgcctggagtcctgggctcacgaggggtgagccaggtccccgctagggctggggacaaggatcgtggggagctctctctgtccgggggtggggaacacagggtagagggagggctgtccccagagttcgtgccaggtgggacgcggggcacccattgttcctctccgaagcttgctcggggctcaggctggcacggtctagccggagagtgtggggacctgctggcttcggcgtctcgcgtggcctgcgccgggctagtggggaagagagaaagaaaaagtagttacgactcccgtgacggcactctgttgcttgtggtgcgggtttgttgctgtctgccacttgggtgtttaaacaaattccctgggaagccattgtcagaaatgtggagattcgaagggactgacctcggcgcgctttgccaggtgctttttgtcccgggaataacctcccctgactattgtctaactacttccccgtccctcccggagtccccttttctcctcccccagctctgggttgctcccgggcttgccctgtgcgctcgggcactgcttggagcatgttctgtgtgtgtgttggcggagccctgtaagatgtgttgaaatgcggttctaaggacccactctgagcgttcatgggcatcgaggtctgggcgcctggtggaggaagsctgactcgcgcgtgggagcccgctcctcgggcaaaaccaccgccaggctggccccgcgctccccggatccggcctggggctctggccccgcgctccccggatccggcctggggctggaagcggactgtaaatgtctgccttctgccggagaacccaaaaggagacaagtggagcgtctcgctgtagccctgggggttctcggtcaagccgctcagagaagtccgtgaaccctggctctcccggtcccgccctctgttcccctccagttttgttatccttcgtgtaggttggttgcttctttcgttctctcctctgggggctctgaagtttcaccaggtggacgctggggagcgggctcccgagcacttgtctacctcccgccagtcctgacaacttttctggccaacctacccagcttcgcttggctggcgagcgcatctgctgctggggttcgcggtgcagatggagacgcagtggtggccagagggtgatggagaagacgggaaaagcgacagccacgctcctggctgaagccgcaggacgcaaataacttactttgtacctgacagtttctcacgttgttgtggaggccctgtttcctggaaataaactcaaattgttgttttctggagtaatcgtttatttcccttccattgctctcctacccccgccccatttagaactctgtaaagggagttaaacaacagattcaggtggcagcatgtgtcgtacattcaggcagagattatgaaatggcagcacgcagaggaaaagccctgtatataattgatgtacgcagagggtaacagctctatgcaaaaaataatccaatggtttaattgaattctttctggagtaagcattactgcatgcatttctgacatataatgcccgttagcattgaaaccgtgcttgatgtaactcattatatgcaggcaagttggagtgagtattgatttctgcacagtgtttgtcactgcacggagagcctacgcttgaaaaggcttgtagtttgttaattgaaagtttgaactctaccagttgcataattaaacttacatgtattcaagagttgcaactattaatgtctcaacagcgatggatatattttcagcagttagaaaactttttctctttttaaatgttatttaccctttaattaacaaataaatactacttttcctccagctgaatgtgaaaatgagcttttctgatacctggagtttagatacgtacaataaacaattgtgttcttagatatctagttctaagtactttaactaaatatgcctggcttttctttagtgacaaagcataacatttgacatgatgttgtatatttaattaatataatgtgcattcctaaaaagtacagtaatcacaggattgcatctcaagattttgccctttaggaatgtatgcccagaaatgaatgtcttttattcccagagtttaaagtcagattgtggatttgcctttctccacaaattataagtttgttttgtaaatacttccttttttttctggctaccataaatcatttgatattttattgtcataaaattctatggcagtcagatttgttgcagacatagattagagatgtattgaagattggaggtgtattccatattgctggtttttcttatattttactttaactagtgaacttttattccttttgagaaatttaaataaacccactttaaaagtccaagacaaattcatgttgagaatttaaaaatatctgaagtatgtctttcaaatcatactcattaagatcagtttactttccratatcatgtggttcctaatgtagtaagcttcaaaagcaaattttgaaaggctgagcattgttgggactttgatgtgtcatatacttattcagttttctttgtttaaaccaaaaatgtaagagtgttttcattattgtgacttttttcttagcttttgcagttaaagtgtaaaactgctgcactgtgagcctctttaaaaccagaacgttctgtaaatcccaactcatacattctttcagtttcacctctcacttaaaatgacacccatgtcatatctgaggaaaccgaggcatagaagaataaagaagtattaaagtttattcactgggttgtatagctgtgatctcttgatataatgtaagaaagttttctgtagaaggacttagatgactgacgaaaccagatgcaggtaaggtgacttggaaactcagctttctcctctgtaaaatggggataataatacccaacttgacctttccacatgttttttatgattaaatgaagtaatttatgggaactagcactgtaaattgtaaagcactgtgcagctatctggggtgtaatcatcattaagtgccttagtctcagctttttactscttccaaattctctctccagtaagtgcaggctgttcaggatttgtgtgtgagtgtgtgtgtgcgcacgtgtgtgtgtgcatgtgtgtgtgtgttttcactcagccagtcattcatttaattattgtttaacatagttattgttaaacataaacatactagattggccagaccataattttgtcagcacaawgatcgattatccttaatttttttaacttacctcgtataaatccttacttgagttagacccatggaagagtcactattaacattcctggcatttctaactacagaaaaaaatatttttagtcagtttctttagctgtttgtttaactgttggttcaggttttcaactctgtgttgagaataatatgtagctttctagatgcagtcttatcaatgacctagagagggactattgtctctcttgtatgataggagcctggaaatacagctcgagatcctgctttgtctatagttcctgacatgtcaccctgttgatgtgcacttagaatgctgtaactcatctaagcagcacctgagcagtatctgactccttgttgtctctttaggtgagattaatttctcttatacttattacctgctaggaagatactttggagccagcttgctttaaggtttgcctgttagttttttttggttttgattggctaaatatccctcgatccctcaattcattaaaactccacgttctaatcactagcaatcatatgtagctggacatttccaggactgtttttttttctctctctagttctcttgcatctgactcttgattttcctaggtcgtgagatgtagttttgtgtctggcctacccagacggaaagaggagagtctggctgctgtttggacattggcatgtgtgctgctgacagctcttctctttgtgctcataaaagtgaatttcaaaaataaatcaacccctctgccactctgccccctcccacactccctcctactcttttctagcaaaaacagagccccacatatatatacacaagatcacagcccttttgtttttgccaaatatattttagtgctgtacatgtccttaagaactggaaatatgactcatccactaaccaaagctaatgccaacattcccaccaaatctcatatttctagcaatgatggtttgttacaggtttttctggcctttaaggtaatatttaattcatgtgataagattccatatagaaaaagtgtgttggctactaatatttttaaagtgcagtataccaggtctactcaaactggtattaaagacagtgaacatcatgctaaatagggatctgtgctgctcccatttcccctacttgcttttcatggagtgcaggaagagagatgctggaagattgagagcaggaagcatcaagaaagtttacagattgttcttaaagacaaaacaaagaacacagggattctgtgtgtgtgcacgtgtatgtgtgtgtgtgagtgtgtgtatgtgtttttgatcttttacttaatttttagaagaggaaaaaagtcctatggtatttttgacttgtttattgaaatcagcctttgcctttgcgcaaacacattttctagttctgtcaatgtaaaaatttccctctgtgtattcytctcagtctttacactttgatcatatgtatctggtctgtgttccttcttcaaatggtgtttctttttgcctaaaaaggttgtaattgcttttgaacatgacttgtttttttaatcaaaactcatgctgtttgtcatagtactgaaaaaaaaaagtacaagacatcaattcatgataggtcttaaaacagtatttgataacaaagtaagtgaataatacattaatcaggctattttttatttcaattgaagcaaaaagcaaacttgcatatccatgaactaatcttttaatgtcacagaacatttatttgttgctgtttctgaagtctttaagttcccttttataaatggggatagacaatttcagaaccacattgcttgatattttgagataagtgagataagttacatacaactatgccttggaaaactkaaaaaatgttatgatgtttgatatcagtgtgaactctgaatagtttgtaaacttcacactccacattagtgcaaatgtgttttgtgaaaatactcctaaagaaacgtagtttcacataaaaggtttttaaagtttcatgaagattctgttgtgggaagtatgtttattttccttttgtattcttgtgggaattcttttgatctgtatttaatattttaataatgaaaactaagtgtatgtaattttaaaacttagtttcgtgaggttttttttagattgttgaggttctgggaaaacactgggcctgggatctaaggatcacattgatcctctcgtggaacattgccatttccccacttaactctggttgaaatttttggcattctccttcgtgtgttgataatccataaaaattacaagtggcttattttgtcacttacagttgttttaggatcaaattaagttgtcctaaatggaataatccgtgtttccacttgatatgattattgagctctgataatgaaaatgatgaacagggcagtgctggctgaatcctccaacaggtgtcattctaggaattgttttaataaggggaattcagaaacaaggcaaaataaaatagtgcgtagtggagttattgtttgtatttattttgttgggaaatgtgaaagatgtaagtatgtagtcctctgtgtgaatacacacacacacacacacacacacacacacatcttaacaatgctaggacttagttgtagaaacatttaggttagaaagaaggtaagggcatctagagatggtatcaaaactccatacttaacatttttggaaagagtagtgaaaatagatcactactttatttcatagatgtagaaacaagtggaaaataagctgtatataatctatactgtatactatactatactgttatacttttaaggataaaataataaatctttctccagattggtatctattaatataaacccttcccagtgcagcctgttccttaaccagctgctcataggccgattctccaagcgctgttcaaggcagcagctgaccagccacagaaattcccttaatccgtgttggatagtggaggtgacctagcagctgcttaagtgacagactggcaacagttccttgatgtgatttttcttaggtcattcagtaaattcaagagtagagaggaaggctttctagggtcctcactacccacccagggattgatgactgattgcttcatggtcattggattcctcactgcaaggtgtcctgggattttgtggttcatggaccaatataattagcatcatctggaaatttgtgatgatctgtgatcatcagagtcaccccagatctactgaatcagaatctgcattttgatgaaatccccaggtgatttgatggaacatttaattctgggaaacactgctctaggacaaagaaagctcagtttaaaaagattgtcacatgaactttaccatagaatttcaagaatattgcaaaaggattaatgataacctgaaatacatttccttggatttatatttctttttcctttctttttctttttctttatttctttctttctttctttctttttttttttttggagatggagtcttgccctgtcacccaagctggagtgcagtggcacgatctcggctcactgaaacttctgcctcctgggttcaagagattctcctgcttcaggcttccaagtagctgggattacaggtgcgccaccatgcccagctaatttttgtatttttagtcaagatggggttttaccatgttgcccaggctggtcacgaactcctgagctgaagtgatattcctgttttagccttctaaaatgctgggattacaggtgtgagccaccatgcccggcccctggagtatatttctgatcaatatttacttgattattatttaatattccagacacatcaaaacaacagtactatacaagctttttaaaagaatgctcagatgactttgaaaaaaaatattttcataagagactaaaagtaagactagttttggttatgaatattttgtataagaatatttaaagataaacatactcttcaaggaaccaaacatgctatatgcaaatcatttttagcataatgttatgttgatacaggaaatactattccctctgacattactagkagcagtctcttgctttataattctctttttcatctaagtgtaatttaagatctttgtagtaaggagctcatttataggacagtcaaatttaatgaatgggagttggtaggtagaatgcattaaatataactggtgttctttttattatcttttgtgctcatatttaagaacagagattcttgtcagttttctcaagagaaaaattatgatgtaatagacagtgtacactattcatgtcaaaacacaattttacttgcattttatagcttgctttagcattcttttagaaaatgaattttcccagaagacctaattgccttcttattaatgagcctgtaagtgttttttgttatccatttactattctaaatgtgtctacttgtgctagctgtttcaacagtgttgtctctgattaaatcacaactgctatatttgtttttgccattcactagtgattcagaaaatattggcataatgacgtggttatggcagagactaataaaaaacaagaagtaaaaattaatgttcacccattacagttggctgtatcatgagatcagaagctggagtttgggataatagcaacgttctctatatttttgatactgtaaataaaagtctgcataacctatattgtcttaaatataaaatatataatttattgaattaatgaactgtaaatcagtgtatttccatatgtacttaatttagacactaatgtttaaagaaagatttaataggagactgatcactgttagaggagaagtagtggtggagagactctgagagggcactttcgtatatcttcaagaacttcacagttactttttctagtttgactccaaattctggaacttgtcttttttactagtactgcttttattcttatgagcaataattaggttcatttattttcttatatgttggagaagagagcttttcctaaagcaattgcaaaaataacaatatgagctgtaatttactgagagcccatgacctgctagggcctgtgatcagtgttttacataattttaaatcctcacaatatcctttaagatgaggatcatctccattttacaaactaaggcctcgaggggttaagtaataacttgtcccaagtggctatatgagtcactggtagagtcaagattcgttaatgaatgtacacaaatgtttaaagattagacatttctttggttgcatcttggcagaaaatgtaacccagactggttgcaacaaaaggtgaatttatttgtctctcctaactacagttcargtggagcttgatttagaagttgacgtaattccactgagacatgatgtttctctgcctgcttagtttagttctagggtattccaggagcttcttargctccatatagaggcacgatggctgtggcagctcccaccgaacaagatcccaggttcaagtcccttaaggaaatgtgaattatctgctggttgcacctgataaggctctaaggtttacagtgcttgaatccactgatcttgtttccaaccattgaatctaaggctctgactgaggggaagttagtgtgctgattggcttggcccagggtttgtaatctttctaatggggaagaaagaagatgggagatgatggggaagagacagtaggatcagattgttctctgttgtggaccactaggtgatctctaagtgggaaagcgtggaagagaaagagaggaaagaggcaatttgtgtctggcaggcttgtatacatttacagatcacctgtttttaatctgagagtgtttatttattggctttccctttaaggactactttaaagcatgaatttatattatttccattattttattttccttgtctcagtattgaattagtctaacattaaaaatttgtagaatttggtgttaaaaaagatcttagaaattaatgaccccttcatttgacgtaagttgcccaaagtcatacaggtaggaagaacttgagctcaaattaaagattttaatgtataggttagtgttcttactatatatgtatcatatattaatgtatactatatatatatcattttccttaacagtaatctatataattattatttaagattaaaaaatttttggcttgtattccaaatttctgaaacaatatttccaaatataaacctgacttagtgattggatttgattagaatagtagtctgcatataaggtgataatatgtctgtgaatgcaagagactatcttagataactgcttggttttcagatatcatgacagaatttatacatgtatgcatgtataggtgtttgcatgtatgcatttatttatttttaatagaaagcaaagggtaaagtaagctgtggtaaatgatattgacacagacaaaacctactaactctactatttttgaaaacctcaagagatgatggtgattttatttttaattttgatcctctaacctctgctgcctaaatttattatgtatatctgagcaacatgggatattaggaagagttgctataagaaatatcttggggtactgaataatgaataaaatgtagagaagtagcagctgtttgcctagctacctcctctcctaatgagagatttacccaggctgtcttaatcacatgttagtgctagtggatttgactgaggaccatggctgtgccagttgaggccaggggatagtctccaggcactttaatggtccgtaatggaccttcaatggccagggcagctggcctggcacataggggtgtagacagtggttgaggaggaaggtttactgacttcatcatgcttccctttgtcactggaggcttgttttcgtacacttttgtctattatcataaataacttatgataataacttatgactctttttctgtcttatttatgtccttatgtgatgactgtcagtcctaaatgatgaagtttgtaataatttgccctaaccacctggtcagttggagcagattgctatctggtgttgactcattatgcccctttatctaaaccaacacttaaatgctcaggaaatatatgaatgaggtgaaggggctggcagcaacctacctcagaaccaatgcctttggagatctatgcaggaggctgtttaatgcacagagcactggccttgctayaggaggacttatgttccagtcttaagctctgtcactttctgaaatttgggagcagtcctttctgcttgatctttcatttctttatcaccaaaatgagaatattacaatgaagaatgactttaatgtcttgtctagtctactgaaccagacacttttaaggtgaaatgaataatatatgtgaaagtagttttatatttgtaaactaccataaaaatgtaaattttgttaggaatagaaactttgacaataaggaaagtattgctgaaggcacaaaaagtgtgtatgctgaagaagggaaatgaaaacaataaataaatgcttcatatatttgcatgtttaagtgatacattgcctctcaatgttggggaaagtggtataataaagaagaatgagcatggttcttgtgaataatgggtgattctgcaatcatgtatcataaagagcagtccccccaacttttttcacatatatgtatttcctatgtatgtataaataaactttaatgctaccaggtagttcactagccctcccatatctctgggggatacattccaaggtgcccggtagacgtctgaaactcgtatggaacccacccttaaatatactataccatgttgtttcaatctgataatggaaatggctactgagtgactaacaggcaagtgggctgtacaatatggacacactagacaaagggatgattcatgtcccgggtaggacggagtgagacagcatgtgatttcatcacgccactcagaagggtgtgtaatttaaaagctgtttatttatgaaattttttcgttttcttttcttttcttttcttttttttttttgagatggagtttcgcacttattgctcaggctggagtgcagtggcatgatcttggctcaccgcaacctccgcctcctgggttcaagcgattctcctgcctcagcatcccaagtagctgggattacaggcacctgcctccaccatgcccggctatttttttgtgtttttagtagaggcgggattttgccatgttggccaggctggtcttgaactcctgacctcaggtgacctgccgcctcagcctcccaaagtgcgggattacaggtgtgagccacagagccctgcttgaaatttttcatttaatatttttggaccacagttggccaagggcaactgaaaccacagaaagtgaaactgtgggtaagggggtcctactgtatttgtatttcctccagatattcaatatagattatgtgattataaaataagttattaaagaaatgtaaatgtgttttaagtacttatatatatcatatatagaaagttgtgtgtatacttttttccttttaaaaattttcgtgataagctagaacatgctcttgccatctaagctgttctgcctggtttttaagagcatgatcctgatgaggtttatatcctttcatttattctttcactccatgaatctttgagcaccttactatgtgcccatgctgtgccaggttttgggtatgctggcaagtaagccagcagtgacttgtcccagtgcctgtgcagcatttataatgttaatgactattaaggcatggtaatatttgcatcgctgcccacatctagtgattcacaagtgaagcttggggctttgttggtaactgaccatatattttataactgaccatactcctgagatgtggcaagtgtcaaagctctgtctgtcttacagtttgctgattcacttcagaacttgcctaggataattccagtctatcagtagtctttccatagtctcaaaactacccaaacaagtaaaagcctaccgaaaaagaattacaaacacrttgccacaatgatagtaaaattccgccaagtggaatttcccaaaacttgagtaatccgaaatgtaaacaaagtcaggcagaggagagagcacatttgttttctggaggtttgctgtcactaactctccctctggaagcaggatcaagaagattggtggacagcctcttagactacagtgtatgtcaatgtgcatttacaacctgaatattcacatgcataatccctggttgtttggctgcagaatcctgtttgctctgacctgcagctgcttatgaactgcctctcttgcctggactttgatcagccctctctctgctattgcttctgtagcccattgccctgtctagtgggcagccacaagagagggagaccagtggctggcagagtcctatcagccaggaatgagggtgggctgtgaccatcacctaattgccctggcacctgcatcccataaggcactgtttggtcattcattatgaaggggacaacagtagttatttaagtacactcacggtcttaccaggaaatggggattttgaacttctgtcttaaaagaggcccacatggcctctagagtgggcctctagtgtgaattaaggagagaaaagcaattttggagaagtgtaaatttttcctaagccaaattaaagttactagattacatatacccaaggttcaaaaatagaaatttaaaaaactgttttttgttagttgagtcactgatattttatgcccattttgtgtttaagcaaaagaatacttatcaaatgctgatctccacacatagtatagagcatagtgtttaagagtgcggacattggaacttractgcttgagtgggaatatacattccaacatgtttttactacatgatctgaccactttccttcagtttccacatattcaaaatgggaaagtacccattccagatgtaggttttgagaaatattgagttacagtgcttaaatgagtgcctggcacactaataaaatttgtccattttagttattattgttaatgaaattgccagtgtttgcagaatatctaatctcatgctgttatctcttaaaatctctaactacattatcttttactttaaaataaaaccaccagagaataaataataggatgcctgaagtaaatcagctcaatatgctgattaacaaagaccacaagcatcactttatagaatataatccagtgtttatgaaaacaagaagcaaacttattctttttttatgttagaggttacagtgacttataataatttttttttttttttttttttttgagacagagttttactctgtcaaccagactggaatgcagtggtgtgaacatagctctctgtggcctcaacctcctgggctcaagcaaaactcctgcctcagccttcagagttgctgggaccacaggtgtgcgccaccatacctggctaatttttaaaaatttttttgtagagatcagggtcttgccatgtataaaaacctacccaacatctttggaaaatgcatttaaaattctctaggtaggttgagggaggtgggaagtttttggcctacaaagaattgcttaccttctagaacgatttaatctcagatgataaaatatgaaaattctaaattgggaataaggttaaaataagaattgaccagaaagtggaggaatgaaatctctgccactccaagcagtgcccatcccagtaagtattatgtcctatctgggagtagcactcagatttagaatgagagaattagaattaatcaacaagataagagggatctctttaatgcctaagaatgttggtatattgtttccccaatggttatagaatgagaaaggaatatcactattgcttctgtttgcatttgacacatatgctaaacaaatgcactggcttttagaacgtgtttatgaattctatataacatttttctttttctttttggaggttgcctagctatttaattttccttagttcacaaaacaatgaggtagtttcaaatctatttgaaccccaagactttttcaagctgctgtyctctgggtaaagccacttagtcctggcacatggtggaaaggtctggctaaagttttgacaattattagctcatttgcagagttgctctttgacctgtcaacacagaggaaagcttttctaagctgtgagaaggattttatgttagactcgagctttagatttcttttatttttccaactttttaacactatcttttctagctttaattgacacaaacttctcttttccttgtgtaacacttgtgcactccagatgttagaaatccctgttaactttcttaccggagaagctctttgcactgcaggcttgaatgtcactgagataatgtccttacaatatttgcaactttgtgttctgactggatgctcctactaacctaggtcttctttgtgattgcggtggcagcagctgtcttcataaactcatcttcatttattttttattttatgtgtgtatttattttttttgagacagagtttcgctcttgttgcccaggctggagtgcaatggcacgatctcagctcactgcaacctccgcctcccaggttcaagcgattctcctgcctcagcctcctgagtagctgggatagcaggcatgtgccaccacgcatggctaattttctatttttagtagagatggggtttcttcctgttggtcaggcctgtagtcccagctactcaagaggctgaggcaggagaatcgcatgaacccgggaggcagaagttgcagygagccgagatttcgccactgcactccagcctggtgacagagtgagactccgtctcaaaaaaaaaaaaaaamaagtaaatttcttaagttgttatcattttggtatactgtttgaccagattcagtctcaataaaaggagcattaacaaaacttcaaaacttctatggcacatctaaatttaaatatgaaacagttctaaaagcagggatgtatacttgcttgtcctggaccccagaatcgtgactcacttattatttggaaagsagactgctacatattttggtcacaataatacctaaaggatactgaatcagaaaatgagtaactgaaaatgggagatctctataatgaaaacactagatagtagtatacttaaatakgatagtgtacatgagaaaccataaattttaaccagtgtgattcaggctctggctttcaatctatttgcactagggtatcggacaaacccacaaccaggaaaggtgagcgcagatattgccagaagaacccaggtgctctgattgcttactccttaggcaacgtttcagattttgcaaggtacattgtgccctttcccggctaattcttatcaggaatgcacatcccagttgaagcctgctaattgctytgagggctgttgtttttacctttaatttaggttcaggagtctgtagggcaatcctttgaagttcttagttacttactgttcactgaagtatccacttgagatctttcctggactctctccacagtttgttcacaatttggcacaccattggctgaaagtactctatccttgctccttgctcattgacagttatactacaggctgcttccagttgccaacacattttagaaaagcatataattttattaagagtttttcctgttgctttcacatgtagtcaagtaaagggcaggggacagagaaggggcaggatgtcatgtcagcatttacctttccagaggctaatgctttgaaagaataagaggggtccttttaggtcaagactcttattgttcttgtcacctgatttgttggcattgcagttacatcacgtgttgtcttttatgtgagcaatgacaaaaaggatatatctattctgtacatttwtatcaaatatgatatccttcaaagcttgttaaaacaggtgatatcagtctgtgttcttaatatggtcttgttggcaacaccttattggggcgggaaccattgatttgtgcatttccaggattgattactatccctaataaagttagtctggtaggcaaaatagcaagaccttatctctmcacacacacacacacacacacacacacacacacacacacaataataaccaggcatagtggtgcatgcttttagtcccagctattttggaggctgaggctggaggattgcttgagctcagtagttaaaggctgcagtgagtggtgattgggcactgcactctagcttgggcaacagagcaagaccttgtctctaaaacaaaatacataaagttaggctggtgagctagggtctcttcatttaacaaaatatgtatgacagagtttatctgatttctttcatgttagtttggttaagttaatcaaatagtaaatgcatgttcattctgtgccaggcagtgtatatagcacagagggcaaaatgatttagttgactaagtccctgcacttaatgaccttacagactatttagaagatctagaaataagtaagatataattaagagtgggaggtacaaaaagtgccatcaggacgtggagaaagtacagtcactcactcctgggtgattagttaagtttctcggatcaggccatcaattggcaaaatccttatgaatgggcacaaaatgtacttgggaaaatgaggaagtaatagcgatggtggtaaatgtttaataatcagctctcaagccaaaaagttcaggttttatttgtttgttttgagatggagtctcgctctgttgcctaggctggagtgcagtggcgcgatctcggctcactgcaacctctgcctcctggcttcaagtgattctcctgcctcatcctcctgagtagctgagattacaggcatrtgccatacgcccggctaatttttgtatttttagtagaggcgggggtttcaccaygttggccaggctggtctcgaactcctgacctcgtgatctgcctgccttggactcccaaagtgctgagattacagatgtgagccaccatgcctggccaaagttcaggttttagcacttgccagtttccatggtataaatactaccaccatggctgaattcaaaggaccaatgtgacatcactgaacacaaaattaggaagagatgcatagtaacacacccttrtttagtacttccaccatacagatacaagagaagtaaatatcctgcaaatataattaatagtaaaataattagaaagtgataagttttgatttattacctctgtttttaatataatttatttagctgtaagtttatataatttaattttaaataatggttgtgactaataactggcccacaaaattcctgaacattttagcaactgactttcaggagctggtataggctggtttcagcccagcccactactccatgccttataatttggcatatgggtgtgaggaatccagtgagataatcctctttaattatgggatctttctataacactttcctaattgaacagtttagtgtaagaaaacctggtccattttgaaactccctggcaggggtttagttatcaagaaactttaggttcgttgacacaaaatgttgatgtcagaaggctttggtgcatccactgtggagcttaatctcaggaataaatccccaagaagaagactgtttttctgtttaactcaagtttccccactatacaggattgactctctttggtctcaggtgctgatatgactattcaagctctctttaagtcctgttaacttagagcactgctaggactatataaaaggtaaacttttcaatgtctttgaactatggacatttttcatgctaaacaccatctttcccaaatactacacagtaggtagtgggttttcagtaaatgtagcttgtaaattactacatcatctttgtactaacaaacctcccgtggctcacaagagcacccaatatttaagttattcagaaatattggaagaatcaacatgtctgtaaaagtaggtwgattttcatccaattctgctatacattgccactttgatggattttaattttgggtgtatgtatgtgaaattgttaacatctacaaaatatacattattaaatataaagcatgttttttcatcttaatactgcatttgggctttgatttaatggtcttttatcattattttctactgaattatcagttacttttaagcagttattactatttgttagctaaagttacttttgattatttcacttgagttttaaaattctttcattatttaatctctatcagtgttagaaaagtggaatgttgttttaacatatgctcttataatatttgtttatataggacaaaaatatttcatgttccaaaaaatgtcatgtaagattaatgtagcgctaaatggaaattcctgtgctccacatgcctttgttaggctccgcccacaaaaaacctagtgtctaaaactaagatattcacattttaaggcatattgtaagaaagttcttgaaattggcagattgtgaatatgttgtatatgtattttttcccttttaatgggaagggtgtgtgtgtgtgtgtgtgtgtgtgtgatttgagtttagtaatatatgacaaagtgctgacagtccccaagtgacttatgacttattttgggaaaatggattttctccatatgatttctctttgtatatcttatataaaatcttttatcttgtagcaggaaaaaaatttactttcccttatatatgaacaatttcaagaatttggaagcattccaaactttacagtttaaacatagatttcaggctgggcacagtggctcatgcctgtaatccagcactttggcaggctgaggcagatggatcatttgaggtcaggagtttgagaccagcctggtcaacgtggtgaaaccctgtctctattaaaaatacaaaaattagctgggtgtggttgcacacacctgtagtcccagcctacctgggaggctgaggcaggaggattgcttgagcccaggaggtggaggttgcaataagtcgagattatgccactgcacttagcccgggctagtcccagcctacctgggaggcaggaggattgcttgagcccaggaggcggaggttgtagtgagctgagattatgccactgyacttagcccgggcaacagagtatagatttcataataaagattcctcagactgtgcaaaacaaaatgtagatttttaactcttctcagttagtactctttctccttgaggaaaccaagtgggagaagacatagagacaaataatattcagaattaataaaggtgtagcactaagtcgattgtttcctgtacttaaatggttatataataggaaaaagacatatgttcatataaactctcagggatttatttttaaagagcaatctcttctgtgtgacctgtgatcagtagacgttaaactcaatctcttacctttatgcctataatactttaacaattaattgatattcagagtgatggctgaattagctaagcataatcaaaaatgtaattatgctgggtaaattgtaattcataaggctggaaagcttaccagtagtggccrcagtgattgaaatgagactcccccccccaaattttcagttaatcacatgattgtattaactaggatgacccatttttagagcatctgtttytgacaacttctaatttgtattactctctatttcaacattctgtttattcagcagggcctgataaagatttttagttcatgtctcactatatttagccactccttcactgcagcctgatgacataatgacaacaatacatgagcatcaggattttacctgcctctgcatcagaaactgaagccattggtgtatgtttctctgggccatttacatgtcttgcctgagtatttcagaggtaaacattgtatcccttttgagtgttttgagtccaccaacctatagggacataactttaaaaattattttcaataactaacattttagtgtttactggtcctagcattgagctaagtatcagctcattattttcaaattgtatgtaaccacccatttggtgggtaccgaattcaattcagtaggtagcaaccagcttaaggaagaaaaccagaccaaccatgaaatagaatataacaaaaacaataacaaaggtaatcatacattttgtagaggaagagagaagtattgtttcatgaaactttggttttaatggaatagatttatgtatccttatatgtctgtgtactgagtcacaatgcaaaaagaatttctaactgtgggtctggccaaaaatatgggaaagttactatacttctctcatacaatgtttgctataaatcctattcacacaactttataagctccaagttttttctcttaactattatgtcgtggcacttcctggtacagtgcaaagagcatagagtttgcgtaatttggtaaatgagtaatttaacttatatagcctgtttccttatcctcaattcgtgtataatttctggatatttacagggttgtgagaatcaaactgggtaatttatgttggatattcttttccaaattgagctacacatatgtaagttactatgattgtaatgccttgccctttggcccttcaaatactaattgactactgggtttgacttaggaagactggattgtcttttaaaatatttttcgaacctgaagatttacagttcagtgttttcacttgtagagatcagtcctgttgagtactttttacacagtcttttgtttcttctttatgacaggatgttgtgaataaagctaaggttttttttttatttacttttcctattttggtattactcttgacaaaagcaatggaaggcaaatgtactttggacatacctgtatgaactcattattcacatttgtcttcaaataaagctgcattttgattttaaaacaaaataacactatgtaaataaaactcgatttaaaatttacgttgaaatacctattgtgatactcaatggaacattgaaataattttgaccaataaaaatatatccaagacttaacaacaacaaaggaataaaaaagatacacaaaacctccaatcaactgtaaaacttgtgagtagagatatttcagtaattgaaaatagctagcagagtagctgtccgctgcctgtcttctctctctctgccattcattctatttatctatctatgtgggtatccagctgaattttttgtcaagatatatgtttttattccatatttattctgtggcctaatccaaaatataatcataaaaatatatattttacattttatgtatcagtgtggcataaccttataattcagyatatatcctgaagactttgagttatgcacattgtcatacttagacatagttctcaacctttagaggatcagacagttatctggacagaggagcattgatgccactgttctccagcattcccttagcctcatcttgctaaaagcagaagaggatattgggatgcaaataaagtagaggaagggctctttgccaagtgctgtttattgaactgagtaaacgtctcccccatgggttggagggagctggttcgtttaagtgggcaagaaaagccagtattcttccaagtaatgaggtttcttaaataaatattccaaatgtagattctctgggctgcatcaacaaggggcaagcctgaaaagtcccctcagtatccaggagcccaggttgagaagggttctgttttgaaactggaaactgtccgtagtttggatgggagaatgcttggaatggaagctaggctgtgatttgtctttttaacattcttgacagaaaaagggtgttaaggaagcaggatgactacagtttcaggggatttatttacagctcctaagaaaattaattgtttttttgcttttgtttttgtttttttttacaactcagacaaacattatgctaatagaaaagtatctaaatctactcatgagaaaaattctttaaggatgcatattagtcaacctgttcttaaaactacttattgttaaaaatacttcgtaatatacacaacatattcttttaaaatgttctacarttcagattttaaagtgattcgtagtcatctcaccccacctccagttaatgagattttactgtttatttgttagctacatctaatagaaaggaaaaaaaaaaacaacctttttgataggtgataattacttaaaaatttggatccaaattaagagaacagagctcatcaaaatatggatgtattaacactggaatgtataataatgggaaagaaggtataagaatgacagagtgagaaattttaaaagaggggaaataggatgaattcaatcaaaacaaggaagccaaggtgtttaaatgggtgaccctctcactttgatgtttatctgattgaaatttgacattttctatttactcatttcaaaccaagataaaaatctcaagtatttaaagcaacctattttctgtctagtttgtgttcaaattattattattattaaagacagggtctccctatgttgcccaggatggtctcaaactcctgggctcaagggatcgccctgcctcagcctccagagtagctggtattacaggtgtgaaccactgagctcagcataaaatggttattttttaagtatatatagccaggcataattaaattaaatatagtttaaaagtgagtttaatgttatttttttcctcctcttcctgggatcataaaatgattaatgttaaaattagtgttctgctactgactggaacatacatgtttattatttccctctaatgtgaacacttgctggtagtatagaatatagtcatcttcaattccgacagttgacataaggcaattttataagtgattaatcacatactattgtgcatgtaggagggttttggcttagagttattttggtgtactttttggatgttacgatttttattttataagtaaactcatgtttgttacctgtaatgttttactgattccagaacaacttggccttctttggtttattgtaatgccaagcacaattatattttgagtaagattttgtgagaaaaattatagtcttcttggtttataaataattgtgttatgagagtaattctaaaagccacacctgaaaatgtcacattacaacatcattagtttattataccttgtgtaacacttttgcttttcataaaccaagaagcaattagagttagattatacaatatttgtttagaagataataaatcttacaggatgctaataatttaaaaagctgcatatgttgttactaatgatcaaactgaaagaaattatatgatttcaaacatgactgtctttctgatcgttcaggacaggaccatgtaaggataacatctggacctgatctcacatctcaaggtcttaaagttgtcacttcacttaggtttaatattttatcttaaaaatggttattcatcaaatattcattaaatgctaaccatatttacracattctgcgaggaaccatagggttacaaagtatatgacaaattccttagatataatatataataatcagaggtggaattttacaattattattctctattctctactttactactggactgggttttaggactagcccccatccctgctctacttttctgccttaagatttagggaaatgttttttctgataatcacattgctggaatctaagatgggcttcctcatcaagtttgctttttttcttgagattttgaaagacactctcagtcttcagctgtatattgagcaccttcactgtggcatgctttagggactgaggtcatagtccttttcattgtggacttttcatcctggacttttacagtctggggtagatggatgtgaaacatatacttgtcaatatgtaatcctaagtttggaaagtccagaaaaaaatatagggggtttagaagaatgtgtcttacccaaggagtgcacaggaattttgacattaggaaagctaggcaggagatacaagcaaagagtcccacctgtgtgaagacatggagactggagagaatgcggtgcattggagagaatgcagtgcattgcagcaactgagagaagcccactcactatggctggggaagaggcgtgaaggagagtctggtgagagtggccaaagcttcaggtaaaagccagagcatgcaggaccttataactaacgatgacgacttaaaggaaaagacatgatcaaattttcataagtatcgccctcagtatagtgtgaaaaagggtttggaggggccacgtggattttggtgagaccagttaggaggacattgttgcagtctaagtgactgtagggtgagagaagtgtacaggtaaaggtattttgaaggtgggagtgatggagcatgctagtagatttgtggggacttagagagagggaaggatgagagatgctgcctgagtatttggtttgaactgtaacatttaaggaggatttttttttttaggctcttgcctccacgaggatttaaaaacaaatttgcatattaccttttccttacagtwcacataattccttttttaggcaacatggctatatattcttttatcttttccctgaaattgcgtctcttattaagatttaaagtatatatctatgtacatatgcatttgtttaaaatgtagtcatttaaaattcagttctaaacaactgggtccttaccccaggcacctttctatattgattctcctttaacttccttgagtgataagctttgctatttttgaagttctttgcctattcactttctcttctttagactgtgtatgaatggatagatacacacactcacccacacagtttgttttaaattgcacagagttgatgtataataaaatatgaagaaaggaagaaatatttttaaaattcttatattttctttagtggtttgtcttagaaaatgaacacataccggagagttgagaactgagatttttgtttattttatttatttattttttgtgagaatagcaaaggctttacaatgtgactgcttactaatgtcagaaaaatagcaattcagctcttactttctcccctatactttcagggcgttatgacagttttaatgtgagttgtaaaatgtagggaggtatactctaattctctttcacacacataaatcaagtttcaggctcttttggaaatgtttactagaaaaaacatcatgggcagattttaaaatgcttttggattgyatgacggcgtggtgccacttccattgaagtgttgtaatattttattttccttcccaaagcgtcaagataaatcctgtaaacattttttctccttttgttgttttggttgtactattgtgtttggctctagccttttgcccccagggaaacaaaagtgtttttttttaactkcagtgctcccgctgagtactccagctgttgggcagcagtttcaaagttgttccctatttacacactgcaagtctggcggatcacaaagcttcctacatcttatctgaaacacaatatactaatttcagggatatatttagaaggaaaattgttgtcaaaatttactataatgtagcttattttatcttttaaatttaaaatctactaaatcattatatctttaaaaaatggtgatggtgaatgtcagcataacacgtaatcttatcgaaacaattaaaatttatcaattagcaggttcaagtaactacactttttttttttttttttttttaagatacagggtcttgctacattacccaggctggagtgcggtggctgttcacagttgaggtcatggctcattgcagcctcaaactcctgggctcaagccatcctcctgcctcagctgcccaggtagttggaccacagacacctgttctagtaactactgtttgtctatatttaacgttaaccaatgtggtaaaccactagtgtgtaccagcactatgttaggctttgtttaggttttgccctctaggagcttcagtctgtttggagaaatggacatgtagataaatgttataactcacgtagaaatgaagtgcttagagaaggcagatgacagagttactggctgtatctggagaagttggataaagcatcatagatgaggggacagttacctttggagtttccagatgaagagatggaggaaaagtgccttgatgacaccaagtcacccattgtgcttgtttaccatgtggttaaaataaagcatttgcatttggtgatttctaaactctcttctagttctatgaattgaccacagtataagtatagttgtttctgtgtgtgtgtgtgtgtgtgtgtgtgtgtgtgtgtgtgtgtgtgtgtgtgtgtgtagggggcgggaggtacttttwttttttttttgagacggagtctcgctctttcacccagctggagcgcagtggcacgatctcggctcactgcaagctctgcctcccgggttcacgccattctcctgcctcagcctcccaagcagctgggactacaggcgcctgccaccatgcccagctaattttttgtatttttagtagagacagggtttcactgtgttagccaggatggtcttgatctcctgacctcgtgatcagcccaccttggcctcccaaagtgctgggattgcaggcgtgagccaccgcgcccagccagttagcggggggtacattgactgggcttgagatgttcgtatgtaataaatttttaaaaattgcagttttaatttccagtttttagtgaattttggtcaatagaatttgctcttaggaaaaagtaaaggaggtgaatgctggctttcttttgcaatagaaacagccaactcactcattcatttaacatatattgttgagtgcctaccatgtgccagatattgttagagagcaataaaaacacatattccggcttctaaaatacttacattttggtggcacatgggacaccacactctggattgggggaaaatttrgggtatgggttgccacaaaaatgagcaaacatcagtgtctcctgccctttccaaaaagcacaagggggctatccaagagaagggagaaagcaggtctaggcttggaaaggataggtggaaagtgtggcactagcaaggggtttttggaaggcaagggtttccatatgcaaagattgggagatggagtatttcagctgaagagaaaacttaagactrttttcaggccaaacagtccaacttgaagagtgggttatattcaatagagtagtaggagatgaattagatactgagcatgaaaataacagctatgaacttgtcctcatgccaggtgctgcggcaagtgtatttacttattaaatacttcaaaatcccgtaaaataaatattattgtgtctccatgttacagcttctcttggggccatatgagtaataaaagacaaataagtttcaarctcaggtctgtctgatatagaaatacttgatctcaaccaccataatatattggaattttcatttttggatagttaggctacaaggttctcttgaaaattttgagtaggcagttgcttaaatatgtacaatgtaacagtatgatatatcccataatagtgttagatttggggtattctgggaacatgctgaagaggcaaactactcagttgggggtggatggatggaatttgcctaggaggggatatcagcattgagaccaaagacatagagcagttatcagagccaatgaggagggttttcttgatagagaaggcagcatgtgaagggcccagaagtacggtactaggaactgctactggtatctttgaagattctgtaatagagatgaatgtggcaatttgttgggactagatcatgaaacccttgggtgttatgcaagggaatgatgactttatcttggaggcaacctgatgatatggaagagttttaggcagataggcaggggagtgataggatcagacttccacaattagaagattatgttaaattcatttaaacaaatgtgaacagtagtgaatcaattcccaggggaagtttcattgccaagtattcttcctgccgtgaagattagcctgttagttaccaagccgctttcgttttcagtgtctgtgcttgtggtcggtaacttttgctgctgttgttctgctgctgtctgccattccattcgccatctatcacgcacacagaaccctggccaggatcatgaagggcgattgaaaaggtaacaagagaaaaaaaatgatagattaatgtaagcctgatgtttgttttagtggcagattttggtgttcacatgagtgcctgagcctgtctaaattaatctcatattctcaccacagtcttctagcttgagaattgactgcaggtaaaaataattggaaattattggtgtagccgaaactgcattacagctgccaagtgtggatacaccggagccaggctgcttttgtctgcttcctcataaacattctttccgcattctttatcagcacataatcctgagacacaaaaagcctttgtgtcccactgggaatgtgagaaaatcaaagctatctattgsttttgctcctgttaggaaccactaacatttctatattaaccacccatgttttgaattgagatagatgttatcagcaagatgtgtcctccatttatccccaaagatatcactgtcccaatacaagaaatcttaaagacagactgcaaatgtctgttttcatccacttgatgctgtgatttgtggatacttgttagacatgtgaatttaatggggcttagcctaatagtaagcatttatatagaacttcccatgagccaggcacttgtatagtaatacatctaatcatcaccacagtcatgtgaggtagctattattgttttatactgtttgttatgcactgaattgtattccccaaaattcatatgttgaagccctaacccccaatgtgattgtatttggaggtagggactttaaagaggtcattaaggttaaatgatgtcataagagtgggccctaatctactatgactgatgtccttataaaaagaggaagagactccaagaatgtgtgttcacagaaatgaagacagaagaccagaaggtggctatccagaaatcaaggagagtcctcaggagaaaccagccttattggtatcttgatcttggactttcagcctctggaactatgagaaaattaattaattatttaagccttcaagtctgtggtattttgctatgttggccctagtatactaatacatacacattttgctgtgtgggaaaatgaaggcacagagaggttgagcgactgccccaaggtcacatggctagaaaatgacagaattaggatttacacatggggagtgtgattgtggaatcaatgctgttaatcaccatgctgtactgcttctcatgaagacagaacttcccagtattggggcctgggcggtatgaccatattctgcctctggcatctttcctccccttattttctgtacccagccctctgcgttctagtgtataatactcatggactgttcaccttgggctatactatgtaggaatgatgcatctgcagaatcctttactctcgtcatggttggcagtttgctctggtttgagcaatttcatggctcagaataagtagggtcagcaaacatgttaacatttttcttgtcacgaattaacttttcaaataacagcaaaactcagcttcatttttttccccagttttagtctcattgattcagtaaaagaatgcttttgtagtctattcttgactgtcatcttttggaaaagatttttttttgtgaaaggacaggaagaagaaaagaggagagaaaagcagttgtttgaattaaagtgaccatgttaacacctatgactggtctgatgaattgagtactttttaattacttaaatatgtttagtatgttacatgttttaaaatagttcttaaaatgtagtagcgttttttcgtagacacttaagcttcagcatacctgaagaaatgatacagttgtaaaaatgcaatacaatgaccatcgagggtgagtaagtgtgggaagcttcctgaaaatgcagatgcagaatggattatactgcatacatatctacattagggttgatctgggaaattataaaaagtttatttctgagctcattaaacatttcctgcaaatttaaaattgagttggttgtataggaaaacaaaacttataatgaatacatggactcttttcctgatcctccttttaatgaggtaattaaatgaagaacagacaatgtgtacatggccatgtgcctttcatatagtgtaatttaatacagatacatggccacatatgaaaagaataaaattagattttattgattttatattttccttaattttatatgactaagagagttatatgacaagtattgtttaatttctgaaaccatgttactatcactttagttatcatgattcaggccggagcatatgcatcatttccaggtgaagtttgttccagctcatggatcaagccattatctgctctgtgtgcaggactcttaccaggataagaagaaacaggagaatgcattgagctttactctaaactgtgaaaataaacataaactgcctttggaacaatttatgcagtttttttccatcatgaagccaatttgttatctatttctgcatatcagtaaaaacatgttccttattcaaartaaaatatttctctttatatgttactttatttaatacctgaaggtgcactcctcaacttatggcactaatattcgttgctgtggaaatattttcagaactcaagtttatgatttgtggaaagtgtactagagaatcacatgaattattaattaattattttttaaagtatgcttttttctcctattcatggtaaaaataaagaaatgtaaattatgagaaaaagattattttaatatatggtagagtttttttctttctcattagagatcagtggctttatagcttagagtagtttttcttattttttttttgtgtgtgagtaaacttatcctacttttaaaacactctatttgttggtacaagctgaaaaagtatttattgcattttcttcatagttgaaatttacttttaagaattccctttagatttcaaagaattaaatgacatttaaatttatttattgcaaaacttcagtaccattatgccaacttatgtatgatgcttttcttcttgaaccatatgcctttactgcctactgccagaaatcctatggaggttttgctctgagcactccagtaagcaattttggaatgtaattatccagcatattcaacaagaaaggtgaggtggaacccttatttcaaagaaaattatctgcttttgtttatgttagaaatcgcgtattctattggctcctagagagtaggcatctggcttgtggatgcccagtatctattctccattctgataacagcatccagattttgctttgggaattgtgatggttaatatctagtggcaacttgatcggattgaaggatacgaagtattgttcctaggtgtgtctttgagggtgttgccaaagcatatgaacgtttgagtcagtggtttgggagaggcagaccctatgtctgggtggacaccacctaatcagctgccagcgcagctagaataaagcaggcagaagaaagtggaattaacagagttgctgaattttctggccttcatctttctcctgtgctggatgcttcctgcccttgaacatcagactccaagttcttcagcttttggactcttggacctgcaccagtgatttgccaggggctctcagatctgtggccacagactgaaggctgcactgtcagcttccctactcttgaggttttgggacttggactggcttccttgcttctcagcttgtagacggcctattgtggaacttcaccttgtgactgtgtgagtcagtactccttagtaaattccccttcacatatacaactatcctattagttctgtccctctagagaaccctgactaatacaggaatctacacctcattgaatgcggttttgggggcagaaaagtttgataccttttcttactggtgataaggctctcatctgaccgctcctattacaaaagacaggttaacaagagaaaagcatagcaaatgtatttaatcaagttttatgtgacctgggagtcttctgaaatgaaggcccaaagacgcagggaaaactctatttttattcttaggattgatgaagaatggacactcccccatcactctgttactattagatcattcccttttgtgaacacctgtctgttcattcttcttggcctttctgtagtattgcttcctcttgggtatgctgctggacccgccctggaatgaggctctttagggaaggatggagaagggagagggtgacctttctgggttttatggcctgttttggaggagaggagttgccttggggaaaacaaattttgttttctatgacttgcttcaggggagatagagggataggagacagaagggcaggagaaagtcagaataaggctttgcttctgaggctgtttttgaggccttcccagtttcccagtgtgccacagtgccatacttctgtgtcattttctgaagcccaacacagtcctggagggactttcggtcaaggtgtcctgccttcttttatccaggaggtgggttcctgagctacaccaggaaaatatgagtcctacttcagaaagccatcctctcacaggtagtgaacattgtaaaatttaaaatgtcagcgctcacaacatgcagctttcctgccatgtgaaacaaacagtagaagagaattagggagaggaactggaggtactctgccatgttaacattccctggttcagttgttgttgagagctagcttctttcttgtgtatcctgtggtttaactattcaacatttcctttgattccacaagtcaatacattttttctttttttctgagctagtttcagttgaatttctgtcacaaccaaagtgatatctatgtcaattaaatattttttctgtgttcatattcataaatcctccctccctcccttttttatttttttcctttcttccttccttccttccttctttccttccttccttcctttctgtctttctgtctttctttctttctacaggatctgcctctatcacccaggctggagtgcagtggcacgatctcagctcactgccacctccacctcagcctccccagtaggtggatgctgcaggcacatgcctccatgcctggctaatttttgtatttttttgtagacagggtttcaccatgttgcccaggctggtcttgaactcctgagttcaagcaatccttcagtcttggcctcccaaagtcctgggattacaggcatgaaccaccttgcctggccatattcataaattatttcaataattataatcagagtatagatataattgtgttttctgcctttttgaagtaacatgattttttcccctaaactttttctttatgtttgtcataaaaaccatataatatattaattggtgtcatagttagtttaccactttatccatgttactaataaatacttgggatttcaaagcagaagagggatgttgacaaggtccaagaataaacagaatggtgcttctgctggaactatgttattaagtaatacattaataataatcagacaagcacaccctttttattagttttttaaactaaactaactaaaaaactgtcaccccctttttattagttttttttaaaaaaacaaagataacagaattttgtgcatttttggtagtattctgtgggttaatttttaacagctggattattgagaaaatatgaaactatttaatgaacatacattttagaattcaactaaaattgaacacaaatgtaaactctgccagtcactacttaagtggcattaattaaacaattgcttcttgatcaaaatgaggatagcttgtcttctgactttgttataaaaatgaaaagatggtatgtagattttaaaaagtgtgtttatcactcaagaaagacgctgatttttctttgttttacaattatttttcgtagaatcagacattgcttatctggtcattattaatttattacttaataacatatttccagcagaagctccattctgtttattcttggaacttgtcaacatccctcttctccttcgaaatcctttctttggtggtgattactttcagtcttggtccccttagaagagctactccatcgctcttccatgggctcttccttcattcgctagcattcctcatggggacagcaactgtgcaaaatagtcttcttttatttgcttcattttatttatcatagcaacacacatgagacacattatctctgtgtctcttcatgactgggaacttgcctttgtaataacagtgattgttatatattaggcattatctgtgtgtgtgtgtgtgcatgcattttcaatgaatgactttctaggtaaaacattttaatgatatagatctatgtaaggctacattggcatgagatgccaggagatttttccattcactctgttttcttcccagtgaaagaaatggttgaaaatctgatggcagcagaactacatgaagactaaatagcacaatagctggttacttacttagaacctgatgataaatttgtgatgtgtactaatataaccaactgttctaaatttttaaaactgattatgggttgattgccacagagtcataggttaacatttttgtagacaactaggtatttctgataattttcctaatcatacagttgaattgtaattatatagcttgtatttatttgtgggtagcattaaaactgcgtataatttacatttggtatatggacctcattcttccttttcattgtgggttcagagacctcagtctaatgcatttgatcccatgtgcctcctgttgagactgtctgcttcttaaaatggaaatttaatttttatgatatttgtatgtgttttgaagcaaattaaaattatagtagttagagttgtggatttgatttgcattttctgaaaggaaaggaaactattgagtttaaaaatgtgattcgatttgaacaaactatgctaattaaatttattttcaaggacactattagcagaaaaaatataaattggtgcaattttccattgcctcattttgtatttcagaagtataattcaacattttctcaacactttgtttttaaaataaagcattaacaaaatttacaagtgacttatttgtgttttaaaagtttactttataaaatattagtcaggaaatagtttcttccctagtttacttgtaaccatggggacaaatatatgtaagtattatcacttgataactggctcaacaacaatgaaattagcatcacaaactcagacttattcaaatttgttgaagctagtttaaagcctctaggtagaaatttattgaaggttaataatttactttaaaatttaagattacaaacaggattgaaattaacctgtagcaagcattatgttttcaaaatagttataattttactgttggggtttaaaatcttgctaagcatttatcattaaggcttctagagaaggaagtaaaaagaagggttggtggtactgaaacctatatttttgagaaaacataggtttgctaaaagatcactgtactttagtctgtcttcagcataatttaggaccaagggtgatgaataagtccattaataccaaatgagaaaaaaatgggggatttttgtttgttttatttgatacacgtggtaaccataaggtgtctatctaggatttaccagttaattatatttgaagggcactttggtcagtagctaggatatgtttctgaggaattaagggaaaccagggatgcataacagaaccacgaagaggggaaaatacatgggaaaggaaatgactgaccctggaaattattaggacatcctgcccaggatgtcattactaaatctgtgttccattattttyataaaaagatatcatctrtacacaccagaggacaatggcaagcagacataattgggctgtgaacatttcatatcacgttagcctagtacttttaattagagtttcagtttaattatagtataattctaaactagttgcaggcactgactatctgatgagggagtgcagagattttatttgggacaggttggttcgtcatatcaagggatagctgtgattgggtgcaaaatgacattgaatgcattgtgcaatgtctgagacctgagattaggggaacgtgtcagttcctttagtcacattagagttccattactatgttttggaccttcccttgttcaccttaattaatacatagttacccagaaagagagtcaggttcaatattactacactttacctatgcaaatttataatatcagagggagaagaagatgaaaaggaaatgaaaaatcaaaattaatattatttttgaattaaattatttttataagaaacatgctgctttttgcttttaaacacacaaagtagcagatgtaaatgaattaataggataaagcaagttgctagaaaaaaatacctctcataggaagtaaaatcagaattgtattattgaattaaattattttaatgaaagacatgctgcttttttgcttttaaacatttcgagtggtagaaacaagrtgtaaatgaatttgttggataaaaaaagttgtagaaaaaacacgacttttgtaggccttgataatgtaataaggtactactttgctcaaacttttgaaaataaatagataaattgctgggcctagtgttgttggcattactacactgttgagggcttctgtctaaatatttaagagacattcagattagtataattttattttattaagaatcatgcagctaaggaagttagccttagttggcccagctaagaaaaaaggacaatgttggtgcatcaagtggttttatgagcaggataccacctggttccgtgctctgacttcatttgttgttgtctggaataataactcttcattggcttaatgcctttgcttgtaagagacagatgctatctgatccctcctgtcagaagaattcccagaataagccattcaaccaagaacaattgctgtcttgttgattgcaaacagtagaagagggaattctctgtatttcctagcaccttgctgtttggttggtgtgtgttcatcagtagcagaaactgttcactgaccgacgaactgaagtggtacatgggtggcttttgaggcgcttttctgtgatttggctgttactactttgagttaacttctcactatctaagatgtccacattgctagtttacttttagcctttccattgagtctgtttcctaaagtatgtttctatccacctcttctggtgtataaattttattttaaacaggtctctgtttctagtccttcttttctttctccaccccttttcctcccatgtctcatgaccacatctcattcataggcaggattttctttaaggccgctcccatttcagagtagcgtaagcaatacattgtggctaagaacaaatatattacagtgcaatatgaactatgagaaaatgtaaacagagatgcaactccgaaatgtatttccaaattcactgtaggcttgggtggatattatagccctgcctgtttcacttatacttcacgtcttaaaagatctggggaatgttttccaacatcattcagcacagttctaggtctcattagggccggcagagtcaattttcttgtttgaactgctaggggcaagtcctaaaaacaaacaaccaaaaagaaacagtgtaaattgctaattcgtgtcattgcctgaaatccatgcaagcaggattcgttcattagttcttatttatttatttttgggatagcatatttgattagaacaaaattcagttctgagaagaaaatgtacggtagccaaacagttcattttagaaccccccttcatttagttagccagcctttgtagtgtgcttgttttctgcaaaatgttgtctatgtagtcctggaaaagataaaagacctataagacccaattctttgaagtatgtatgtcttgctggatactcttaaaatgtatattcatgaaagttcttggtagaggatgaagactacctatcaacaagtcaacagtattataattataattataatattttcaatcagaatatctccaaggcaactgaggaatgatactgaatcaggtcaagaaagagggaggtagatttacaactagaggagaaaaagatgtggaagggattcttaataaaggaggtcttgataccacaatccctgcaatacaatgttacagtatcacatggggaaacagacatcattatggtaggaaaataatgaattagttggtcacttaaagagtgagtttccattcatttatctaatctttgttcatcatcttgaaatctgcattggttagtctattggggagttttgcaagttgtaaacatccatcaatgtaaagcaactaaaatgcagagcatttggtatgcaaaattgcaaatatgaaaaaagatatagaatttcatattctaaatcttggcaatgaggtaagggaagtggccagttaacagttgaacctaaataattggccacatatttcatgttaacagctgaatgaaattaaagactatgtatgaatgaagaaaatacattttcaaaattacttcaaaagataargtgtaatttgagcttttagttttttttttttcctctctctctctgaatttagaattgaaaatgcaaacctatttgactctttatgggtcttgcagtttgttctcagggctgtaatgtgtataaaagtaaatgactgtccagggtatggtatgtgtaccaatctagtagcggagatatgttggtaagaatgtgacaaagagaatgacttaaggaagagggattatagcactgggtaaagagaagtgaatttggagaagcagtgaaagtatttttaatggcttgaatagtacagtgtaagattttaggttttgttccctgtgatgtatgaagagtgggccttggccatgggtggctgatgtggtattggaagcattctgataaagtgggcagaacactggactggaagtcatgaaccctgggctttgtagccttggcttcacgtccaattatgtgaacttgtggaagttaattcacctttttgagccttagcttttcatcaggaaaatgagggtgttaaactgctctgtaagatgccttacctgttgtgtgaggttattctgtcaattcagaactgagaagaaactgaaggtgtgtggatgagctagggactaactaattcatatgtgaggaataaggacatgagctggaaccacatttaaaattgaagaggaatggatagagcacggagatatggtggaggtggaaatggtagttttttagacaggacgaatgttgataaagaagagaaagagtcacaaataactttatgagcctaggggtttgggaggacaaaagtaatactgaagattacagggaatttaggaacacttgcttattgttgggggaagaagagctcaggttttcacctatccaattttagttgacatgtgagtgagatgtcctgcaggcatctggaagaacaagcgcgaaaggggaatgagagaggtcaagcctggtgatggctcctgggtttcagccacagtcaggctgtcattagaacagaaagtggatgagaacaatgagctcactgaggaaggaatcagaaaaaagaacattggcctaaggtgtggtattggagtgggagtcggggcagcactttcgtgtaattcagagccaacatgtctggaagttggaagtcaagggcaaacatttagagaaatgggaaaggcaaagggaatctgagaggttcagaaagccaccactgagtttggttatgagatatagtaagtggattctgggcaactgccttgagccttgagctatttcttgaatattgaagtgaaagaaataattttgtggaggaaatgaagattataagaatagagtgcttattttaaccaaaaaccagaagttagacattctagcaagtaggaaaatagtgttaagtaaaattcaagacacttaatttgtttgctgtgagaaaagaaaagcttttttctccttttaattctgctttcaacgagcaattaactatcccctctaatcatttctctttcaaattctacctatactggtttaccatctatccaagtgaagcatctctctcttaggaaggcagagagtgaaaacctatgtgtgaaacctctttcttaatactcctattgcaattaaaaatgtaccccctcccaatctgtttactacaaagaggccctatgccagcttggtgtcatgaccaccatctgtaaacactatgtgtgaattaagatggattttgttacagtgaaatttggacattgactgggattgagtcaacatggaattttataactccatttagttcatacggcttaaagcaagctcgcagtgatctacatgaggatggccaaaattactgggttcccctccccctaatttttagtgtcataatcatttcagaaataaaatgcagaattttttttttccatctgagacattgaattagttgcaataactttgcaccagaatcatacagttttattgatgctggggaagtaaagccctagtgaactgggccattgaacacaccataaactttgtggcaggacaagttttctgggctagtcattaagcacccttttttcaactggaacaataccagctacactctagtagagtcagtgtttgctgaggctttattccagcttcaaatctatccccctgcccactgagaacatttggcttgctttatagctctctagggaggagtgggagcccaggagcactggctgaggaagagtcagccagctggatggctaaggtgaagttggtatggagctggttgctcaactcacctgtgagtccaggaagaggaagtactataaggaattttgtatcttaggaattttatttcctagcaatatatcttaacctaaaactggagaygcttctttatttgcctgtaaattagcaaaactttaatattgtcttaccaattttatttttgtatccataatactgcttttctctgatatgggcaagtgaaaatgaaagtaactgaaaatgttctgctgaatagcaaacacccaaggcatcgtcatctttacttttgctaaaaaacaaacagaaaacccccaaaactcacatgtatttgaaatcatctctttccgagagtggcagagtatcataaaaatccaaaatggcctgtgcctatggtcttgttttgtaacattattttgtttgcatttgtcagcatgaaggtcactttagggctacctgaatatctgtattgcactctccagtgtggagagaagaccaaagaaggttagagcagttccggaactagcacatcaaataaaagtaccaagcagtacttgaggtgtggtcagctgcaactctttgcagccaccaatacttaggcacagtgatgggtccagaatggatccagtgagaaggcaaaaaaggaaggtctcatgtatttgctggtattctatcagaaaacaagagttaggaaggagagtgtaagtaaggcatgaaggagtccatgagccataagcaaaatcacatcaatttttaaactctttgatctttgttctgctttttttccccactgaatggtagatatcagaacactatctccaaagattgtctgaattaattaattcccaagtaggcaggaataccaaaccctctctttcaatgagtttaaatgacgttccacacatttgccctaagtaaggtgatacttaaattgtatctttacacgtattgtgcagttcctatcctaggcctcttcattttggtggcagtggcaatggcatatggagagtgatggctggagaaggagttgttaaattatcctcaaaggcctcagaattgaacattgtttcttatttctgtcctatgaaaaaagacggattttaattatgatctttttaaaatcaggttgggtttttactaataaaaaaagtcagtgtttaaattgtatatttgaatgttttctctctacatttttttaatcacaaatatcagctacatgttacacagtttttcatttcttagtctttttgaatgaaataagtagtcttttctttggtgcttttaaatactattagttgaaacttggtggttattcttgaaatttagcttttagaatttaatttattctaaagtgtacagaaaagagattgcaactttgtggtgaatgttgaatgcagctatgaaaacaatgttaccttttttcaagatctcttgcctagctataatacatctgctagttactaagtgtaactgtgtatagggtacagaaaagagattgcaactttgtggtaaatgttgaatgcaaccatgaaaataatgttaccttttttcaagatctcttgcctagctataatacatctgctagttactaagtgtaactgtgtatagggtacagaaaagagattgcaactttgtggtaaatggtgaatgcaaccatgaaaataatgttaccttttttcaagatctcttgcctagctataatacatctgctagttactaagtgtaactgtgtatattttctttaatagaatttgttagcttcctgaaataaaattagcttgctttatttgccacaaatttgttactttttctaaaatttagttcagggtaatttcacaccaaaatgggtaaacatttttatccttcttggctttcatgattgctctgacttcttcataaaatttggaaatcacgttttaactttttattgcctctttattaagtgcttggaaaacacatggaagcctttttattttacatactgtggtaacatcctagtaagattttattcgttttcactctcaagattgattttttttttttagaaaagcagtttagaaagtacccatactcgttgaaatttgtcatcatctagaccttaatatcacatatcctaagttccccactaattatttgcagatttccaggacttaaatatgtgctaaacctgaaaactatgaatgcatttgctgaatcaaaccaaaatgaaattgttttcttaactatgaacgagactaaataattttaaaacactactcagccacagtaaaaagagtgttgaaataaaactaaatatatatatggtatacacttgttgaactaagcctgctttattaaaatgactttatgattctccagtgtattgtttatacatattatttctaaagattcatgtttagctgataattcatactgcttacatatttttggattggttgacctcagacaacaaggatggtttctagcacacaacacattctgaacatatcatgagcaagatgctacccaagttgttttgtttgttttcttaaatatttaaccaacaacaaataaaagtatatattcaaggtactaatatgatgatttgatatacatatacatgtctaatgatctccacaatcaaatcaattaacatatctgtcttcatccagagttatcatttgtgtgtgtgtgtatgtgtgtcccaagatattgttgagggtctgattttatgaccccagtaaaaatgatggacataggctcttgatatgaggggaaaagtgctgtaaacacaaagactgccttatggggtgagagtgtagttcttgggtgacagaagtaaatctgtactgtgaatgtcctctttggagaattacaaaatgacatgatgactgaactgtaatggaaaacttgttttggtaagatatcctttctaaattttttttaagaaaaagaattctaagtgctgagttcaaagacttagtagaatgctactgataggaggattttagtgtcagtattaaatactgcacaaatacttgacactgaacatcgtgtataatggatatggccatatactgtctttttaaaggaagtgcttcctgctttttctccaaaatagcaacatatttttctcattagtgaaatgatggctctcaaataaatatcccagcccagtcctctgtttttcagcccagcctgtgcttcagatttacctaagaccataacccacagtgatgcccaggagtacctcaatctcagcatacttaaaagcaattgtattatttgtgcccaaccttgtttcttatgaattttgcagagttttagttacctaaacttgaaacttgccagttggccttggttcttcctaccttccttacatcaaatcttgcactgtctccttaaaatctctcatacctatgtcttctgcatattccagtactgatgtagttaagaccttcagagtatcattcctagaccgtggcagtagtctcctgtcttccactttagttgcacagataacatcccctaaccaatctatctttcgctgttctcgcgaagtgatctatctgaaataaaaatctaatcatgggagtctgtcttaaatgttcactgcctccctattgccaacagaaagtagctttacctctcaaatgttttctatgcacaagtcactctttaaaaatattatattgtataatccaaacagcaactaaatgaggtacttacctttattatcaccattttataaatgaggaaacaaatacagagaaaataaatacctggcccaaggtcacatagctgataataacagggccaggattcggcccaagcagtctgatgatagatgccctgtgtgtaaacactatgcaatgatacttctaatttcttarcttcccacaaaggcagggtttgaatttcaaagtgaaccaagagaggatgggcccattttatatcatcctataccaatgaatgtggcctgccttgccacactgtgtaaaggagattgtttcacattttatggtataaacttaatgctgaaaggcagtagttcttatcgcctgagttggtacaagtactaatggttcttaagctatttattacattgtatggcatcagttttagttgagacattgggtgtttgtaaatgcattcgcaacacccatacatgatcttttccttttagcagcatcttttcctgcccttgtgctgttgacagtttggggcatacattttgctgcaaagaaaaagataatgacagtgagcattggtatgaaggtatttcccttcttgcttctgcctgaggcacttgtgagttttcagttgttgcagaagttctgaaaacttttatattttgatggacagagccattgaaaaccttgtttcttgaagttaagtttgatttgagaaaaggagtatacagatacttatatagccatatgttgccaactccttgccatttattcagtccacagcttgttcttgttctaagcatttattttattttctgaggtcattggtttttctcctaggatcaggtgagttaggaagatcattttttttttccattgaagaatgtagtgttttctaggacacagttcaaacttttgtgaatgtcttaagtcagtttctgatgtttctttcatatgagaacccttcatctatttgatgacagctctcatgtcccgtgatgtcacctctgctttaaataaacattcatgtttctcttacaacatgactttcagggtttgtttgtttgtttgtttgtttgttttcccctaccatcctgctctccctttgaattaggagactcaagggtataattgaatatggtttagtgttacctagcaaaacactggcagtgatcttacaaataatttagttatcagtccctacaccttgttttattatttctcgagcctaagacagtggttattgcatgaagatctgtggcccgttaggttacatggaaaggagtgattcatgaacagactaaaaattcagattatacaaaatatgtcaggttttgtttttgttttactttgtctttaatgtttgttttctactttgtttattatagaaatggatgctcattctagaatgaaaataatggagtttcaaaaatgtagctttttaacccagtagtagctttacaagataggttttgtatgctgatcagcaggagattctggttatctgagtcttcagaacattcgttcaggcattctgtactctgagagactttaagatcatggaaattaagagttttgaaagttctcaagttctcaaaagcatccttgaaaaataactaggaggtgagtcatttaatatttctgaacatctgatttctgatcgtaaaaatcaattaggaaaattaccactttgcatccataatagtaaatattgatttgggaaagaataatcattggatactaaattggaattaatagaaatttgacagagagcaggatatttgcatggtcttaaagcacttccctacagacattttgttaattgcaaggcaaaaaaaaaaaaaaaaaaaaaaaatagtaaccatatagtggaaaaactgaatgtcaaaattaatatcactgaggggaggcagacagatatcatgtgctttcagktatgatactataagaacacaaaaccacttttgtagcattctggtgaagaatgcattacctgaatctcatcatgaggaaatatcagacaaatccaaatagagaaattgtctaaaaaaatacctggcctatattctttcatggcagtgtcatgaaagagaaaaaaggctgaagaactgttttgcattaaaggagatttagagatgtgagttgaaactaaatgccatgcaggatcctgggttgaatcctagactggaaattatacttaaaaaggacattatggagaaacttggcaattgaatatggactgtgaattatatcaggtgtttgaaaaattttaaaataaaagaagaaatacatattttagaatttgcaggcaatactgttgtctcatgcaacaactayccaattctgctgttgttcacactgctgccacaaataatgcagaaaagaaggggcatgattttgtcccagtaaaactgaatagatgaaatcaggtggcagactagatttggttcacaggtttgtcaaactctggattatataactgtggtgtatcaatgttaagttttcttaatttggcatcaatattgtgattatataagagaatattgttacagttggaaatatatattattgaaatattggggttaaagagcaagttgtatgcaaccactctcaagttgttttaaaaatattaatatgtagaattatatataataaatggtaaatagatgtaaagatgggaaatacatagtagaagatgttgaaaattggtgaacttgggtaagggatattcaggagttctttgtgttagtctcgcaacttttctgtaagtttgaaattatttcaaaataaaaagataaaaacaaattcagggagttccctaagctaaagggggggggtgtcaaaaattcagggagttccctaaactaaattggggagggtgtcaaaaaacaaaacaaacaagcaacacacatgtgcacacacccacttgccgcatgtagctcgggtgcaccacctgtgacataacgaaccatgtgaataaacagaagcaacacaaccgggcttctgaggcactattcaaataaaacacagaattaatgaggagaaaatttcagagaaacaaagaacagaattagaagcaaaagctcagcagaatcacctgatttcacttggctttatcctctctggagggaagaagcagccttggagagatggcaaggtgtggctgtgttgctgtcaacttctactttgccctcttgaactgtctccttcatctttccattctccaccctcttctttcccmcctctcttttcctctctctctctcttttgtttctgcaaccgccttttttcagtcttcttattttctttggctatgttttattgcccgctcataagctggcacacagacttatttgcttctgctatgttcttattatacattagctcaattaaagtaattgaagagaaaccataatcagcatgacgatattcaactcatttgaaacccagccccaaatacagtgtgaaaatacccattgttaacttcatgcacactccacatacacctgttgggccactagcttataggtaaaaataaaaaagaatgtattttatcagtgagtccatttgcctggtccatttcacagccaggccacattctccttattaattgacctgcttttgttgtgagttttttttttttttttttttttaggttgttttgtatctagtgaatgcctttctgatttaaatttttcagtaatttataattgctttcctttaaggcttctcttttctcctctgtaatattatccctgtccatctctattgccccaaactgttcttggtaagtttctatcattattatttttttctggaacaggattgtctgagccttttcttctcatcttccctaatagctagaatcttctgcccattcacttttcccccccattcatttcctgcctcagtttctacttccaaatgtcttgaaaagtaaaattttattttgttgagtaaaatgtaaaaagaatctcacagtacttatatcagaaaactggatgccctgtaaaataccttgatgtgtggcatatttcttacagtggctgggaaaatgttgaatatatgtattctctgaccgttttcaactattggccatgactatcattttctcccaggaatattaaattcatttaaagcccagagaacagtgttgcataaaatttgcttttaaatgatgtccttcagtgatatttattgaaggcattatcatatattctaagaatattttgattctctaacttatagaaggcaacctagctcttaatgtaatgtgattttaactttccttgtcttgtttattttcagtttggtgacttactctctcctttaaaaaaaaaaaaaaaggaagaaagaaattcactacatggttaaatgcagtgaaaatgtgtactatagtttcttttttttcctttctttttaactgtggatgttaagctgtatagcccagacttgtaatagtttgcaggaaaggcttcttagccattaaaaaaaaaaaaaaaaaaaagagagagatattgtttcttcttctagataatgcctcattgaacctgtaaaatctgtatgttaagaattatttaaaagaaaaattctgcacaatattgatttctttttttgtcttgcctcttctgacatagaaaaaagctgcaggcaagtattaactgaaacactttctaagtttcaacaccaagttctcttacttgaacttagtgtttttgaaagatgatggtagtgctatagtaaagcagagactttgttagaggcccaaagtgaaaagcactaggctattatgaataattttgtgaacttacgttggattgattttaacatgactacttttgtttaaaaaaaaacgcattagaggttaagaaaacgatttcatagaaaaagtcaaagctcaaacaacacttcataattagcattcaggacacaaaaacacttgagaactctagaaaaccttagaacattccaataaactcatatatatatatatatatatgaaaactgagacccaaggatgaataactaattgttttaatggggtctgaaatagaccatgagttccccaaactacaagttatataagatggttagtttattattctgcttaggaataacaggatgtataatgttttcattgttgttagtttgttgttctgttagttgttgaagtatgtattatactagttttctatggctgctgcaacaaattgcaacaaagttagcggcgtaaaacaacacaaatttattctcttacatttctggaggtcagaagtcaggagtctcactgggcccataaaatggtctgcagggctaggttccttctggagtctgtaggggaagatccatttccttgcctattctagtttctagaagtcacctatctttcttggctcatggccctttttctctctctttaaagcccacactgtcatctcttttctttgctgcctccctcttccacatttaaagacacttgtgattgtattgggtacaccttggtaatccaggacactctccccatctcaacgtcagctgattatcaaccttaattcctctttgccggataacctaacatattcacagtcccagcgattaggatatagacacttgtgtktgttgggggcgcattattcagcctaccacaagtctaatctaaatattcacattaaaataaaaatatgacttgaagcagccaaagtcttatttgtttggaggcatagatatcaagttaacttgattgttttactcttctgtttcttctcctatcctcaacacttgtgctagaatatctctttaaagctactccagggtgttagtaaataacaataatataaaaaatggccagcattttgtttcattggatttgaaatggatttctatgttggaatatacattattttggaggtatttttaggttattggaagccgagtgcatcaagcatgctctctttgtgtgcattctttattaatttgtaacagcagcttcccttggcatacatctacagctaagtacacaagctaaccttttgtttcttgatagatggcttaatatatgctttctagctagataaaataaatggaggaaagcacttccttatagtagtcatttctgtttcttcaatgttagatactggtttgtttttgctcatcttgccatggatatagtgatctttttttcctacaaatgtgaaaagtacatttatcgttgctatcacctaaatacttcgtttcaaaaaattgtgagatttctttatcaatgggaacttctgtggaaaagaaacttaccctatgttggtgaaattgaatacattaaggtttttttttttttttttttgaaaaggtgtttaatgtgtatattgaatttccctggcttgaggcagtgttttcatttcgtacagagattttaggaaattatttctgattgaaacagaaacattggaatttgtcaaagggttagagaaatctctgactaaagcaaagtgccaaatactagttaggttagagaaaatttaggagaaaataaaacagaaccaatggaaatttgcttcttgggtgggtggacatgtctaaatatgaattaccaacatggaggttttggtgttgtccaccgaagtcatggaattgctggaggttttggtgggaaattcttttctgcaaatctattttagaaaaagttttctactcatgacaatttatatcaaagataatatttaacagtaatacaaacttgagaacagaaaaagtccaagtagaggcaaattccttgaaaataaacattactgataagcaatgttattgtattgtattgtattgtattgtattgtcaggctcttaaatgaaggccctaataaacttccattgaagagtttatttaactaaaaacttgaaattcaggatttgtgtgatgctgccagactgaaatttggtctaagattgtgtgtgtgtatatgcatacatgtttagtaacatatgcatgtcagcctgttaatattcctacaaawtgtgagccccaaattcgtttgtactggtggctcaatcagcagttaaagtgttgccctctccatcatcaactaagatttctctaatcagaatagtctttatttatttatttgataataatttgtgtgtccactaattgccacgcgttgtgcgagatgttagacgcaggatactgaatataagcaaatgtggtccttgacctcatggagtttatagtgacactcaagtcaagaaatcaattaggtagttggatatataggtgtagagggcaaaggattatatctagattatggaattttaagaattttaatgggacagttacatttgcttctaattgaagctattgatactaaggaaaaattccaacatttaatggccaatgagaggattaatgggacagttacatttgcttctaattgaagctattgatactaaggaaaaattccaacatttaatggccaatgagaggattaatgggacagttacatttgcttctaattgaagctattgatactaaggaaaaattccaacatttaatggccaatgagaggactatgaatttgcaaaggaaacctacgagtggccagaaaggttggaagaaactagtaggtttacataatggaagccaagaacatgaagagaagtaagtgatcaccggtattgaattttgctgaaatatgaagaagagtgagggctgcaaacatgcttcgcgttggtgatatgaaagtcatcagtgaccttagacaaagtggtttcaatgacacagatctgtaagttttcttacggttaggatgtagttcttctgggagtggatatctaaactcactggaagtgaacatttgctattttgtagaattctcatctatgtgcagggtttactttcttctttttgtatgtgatatttatcttaccctctcaacatcaaactgagtaacattagcaagataggatttgccattgttaacactgcactaggccagtccaatggctcctgcttataattttagcactttgggaggctgaggcaagaagtttgagaccagcctgggcaacgtggcaaaaccccgtctatacaaaaaatacaaaaaaattagccgggcgcggtggtgctcacctgtagtcacagctacttgggagactgaggtgggcggatcaccctgggatgtcaatgctctgcagtgagctgtgactgtgccactgcagagcctggaagacagagtgagaccctgcctcaaacaaaccaacaaaatgcagttcactgtctgccttgatataagcataattttctttaatcctcgtgtccaaaatataatagtaaaagcttcttttgttatttttagtatcattcagttttagttgattctcaacttcagtctctctgatattttttaagggtttattcatttgtatattatttttctcttacatttcatttaaaatttatgtatattaaatgccttagctgaaaaatattgtgtgcatttctttgaagcatactctgccttttctgttgattcattttccttgtatattcaattaaaatgagccatattgtatattgtgtgcaacattgtatattgtaaaatgagtactcataaaatccgtttttctcatcccaaattaaaataatttatttttaaatgtctaaatatctggccatgcctactatcccccttgctagttattaggaacctaattgtcttgtgtttctagactctgacatttcaaagacctgaaatgcatctacttacagttgttaccctgtacctgtaggaggctcttgtacattatgcatagaaagtgcctcaaatataattgctttattttctagattaagaaaatctgtgttagaatattcgtctttgacaattcttgcctatgctattgtcttctttaagcttcagaactaatttgctttgcacttagtatggattgtctgacacatgaattaacaggtaaaatattgtatatccagtgtgttttttcttctattagatttctttatctgtaattgtggcattgacaaagacttggcagtagatactatgaagacagattcagccaagtaaactgacagtagttgctacaagaaaacattcaggaaaaaaacatttagtaatttttttcccttagtctgagtaacaactgagtaacaagtcatagtaacaagtatgacttgcttcctaggcaggcaaccagtgcagtgacacaggatcccaaattcagaagagggtccacacttggggtttaatatcctgttattactgtcttgaaatttttattaattttatctttgattttggttttataaatgaagccccatgagacaatgggccgagagcttgaggcttggaccctctgctcacatatggtctgcctcccatgcctcttgccttcctggggtgggttagtgggagcttgggcacaggtgtgggtatggttgagtttggtaagtatttactgagttatgatacagggccccaggtacctgtgagggtctctaatcacctcatggatagtcccatgcccaagagagcttgtcattcaatagcaaataaaaaataagtgacaagttgagagagacacctgggaagaaagataaaggaattcattttcctggtgtttgaataaaaggcctgcattttcattttgttctggacaagtgataaagtcagccctgacaattgttaatagtgaactagtgcttggaaacaagcttcacctttggaacttattgattcgtttccataatttttacattttttttaaacatggtatatgaatagatttggttgtacttagaaccctaaggaattcccaaatattttataataagaattgtctttccacagattaaattgtttgaaattgagctatttatagccttatagtagtaacaaaaggaatttgaatttaaaatatggatttgcaaaattaatatcaaagttttacaattatttttaccctgaaattgttgaaaaaaaagcaacttgtttaattaaaactcttcatgatcttttaaaattttcattttatttcatgatttagtgtgtgaagactttttttacgtaaagcttttctatatcttcactacctttccctgggtcccacgttcatttcagccttgtctttactctcaattggtttaacataccaaactgctcttgttggaaattataaattttatttgactgctttattgtaggacatatttgctttgcatgaggacttttaatacatcagaatagtgtagggttgtccttggcaaaatcccaaaccttttttcagagcaaaaaacaaacccgggagagagaacaaattgtctttaatctttccatccatagcctttgtgacctctgttattgcaactcctgtagacctgcagtgttttttttgtgttgttattgtctttttttttaaatctcagtgatcttattttattttcttctaaattaaaaaaaaataacattggtgttatggctcgaattttgtcctttgtcacaagttggaagagttggttatgctggtgttacaggtactcacgggggaatgtgctggagctgttgtgtgaccatctgttgwatatatatatatatatatatatatatatatrtatatgtgtatatatatatatatgtatatgtatatatatatatttaaactaaaataaaggctttagatggctcctggtgaaatatataataacatgttaaaaattcttaatttattacttttgatgtatggttctatcagcacagcagatttcagagatctgctttgttgattttttccaaattaactttttccttccttttatatctcctaaggcagatcacacaaatggatattttgggttgttaatgcactcttttcttactcaaaagtcctagggaccttaagtaatttactttgccttctgtgccagctttcatctagtttatgtcttcatattttctttccatctagagactagacgcctgtttgacttaatagttgaatttatgactttttacttgacttctgttgaagcaactgtttagctacatgaagagatttttttttgtgtattttttatagtttggctcattgcctaaaatattatgcaatagtgagtaggtgctttgcattccaggcataatttagtttatctaaaagtttgtcatgtaattcatggaggaatcatttatttaaaagtaaagtttggccgggtgtggtggctcatgtctgtaatcctagcattttcggatgctgaggcaggcagatcgcctgaggtcgggagttcgagaccgcctggccaacatggtgaaaccccatctctactaaaaaaaaatacaaaaattacccgggtgtggtggcaggcacctgtaatcccagctactcaggaggctgaggcaggagaattgcctgaaccctggaggcgggcgttgcagagagccaagattgtgccactgcactccagcctgggtgacaagagtgaaactctgtctcaaaaaaaaaaaaaaaaaaaaaaaaaaaccgtgaagattgacttttatagagaaggctgaattattttgcagaaactaaataaaatttgaataaaatacttcaatttctcacttcctaatagctatattagttttatgttgttatctggaaaggtgcatatctttaaagtataaacttgttttatataaaactacttaagataaaatatcaatgttatagagctaaatgctgatgggggccttgaatggttggtaaacgttggatagatgtggcatcaaggtgcatttcacaggtaaattgaagcctttgtggtttgaagaggtgaatgtacatcacaggcattcaacatgtgtaagcagagacccccagttctaaactggttattaaccctgggaatagcacattggaggctgccaggtgatccaaacactagcatcaaacacttaattttaactgttgtaagagagacaatagatagtataaacaagcagagagaatataggacaaacttggaagggcagtgcttgacttttctagttgtgaataaattctgaaccttttcttccacactttatctgcatttgtcatatagggggcatcactttctaatgtacagttttttaaatattttaccttttgtggtgatatgtttattgaggacaggcatttattgttccttttttatagtccccttgataacccaattaattaattttccaagtgtcatgcacagtgtgataggggttctaggtgtagctagatgtgggactaaaaaatatttaacgaagaaattaaaatttacctatttttgactgggcacggtggctcccatgtctgtaatcccagcactttaggaggccaaggcaggtggatcacccaaggtcaggagttcsacaccagcctggccaatatggtgaaaccctgtctctactaaaaatacaaaaaattagctgggtgtggtggcaggtgcctgtaatcccagctacttgggaggctgaggcaggagaatcgcttgaaccctggaggtggaggttgcagtgagccgagatcrtgccattgcactccagcctgggcaacaagagcaaaactccatctcaaataaataaataaataaataaataaataaataaataaataaataaaatatacctacttttttcccagatagccttccattttccactctgttttcacttcatgttcctcatcctttctagccattcctgtctttctctgatgtccctccactctctagatctattttgagccattaaaatgtgggtagtctgaattgagatctgtaataaatgctaagttacatcacgggtatgataagaacaaaagagtgttactatctcattagtttttatattatttacatattgaagataatattttggctatattggattacataagtattaaaataaacaacatgtgatttttcctttctaaaatacagtttactagcaaatttaaaattatgtatgtagatttaattatatttttattggagaatgctgctctagagtcttttattgatttttttctactaactctcttaagacacctttttgcctaatctcttctgctcaaaaaatattttcatgggggcctgaaattagaagactgacaaatctagccaagcacagtggcccacacctatagccttggctacttgggaggctgaggcaggagcattgcttgagygcaggagttggagtatagcctgggcaacatcgcaagaccctgtctcttaaaaaacaaaagaaaaaaataccaacaaatcttctgaaacttgtctttaaaaatgttagatgtaatatgaaaatgttagatgtaatattattcatcaatgatgcactgataaatgcaatcacaaacattatgctaaaataaacaagtcaaaatagaccttgttctatataattccagttatgtatgaaatgtgtagaacaggtaaatctgcagagatgggaagtggttgcctaggaaagcagggaggaggaagtgaggaatgactgctagtaggcactaggtttcttttaggagagagaaaggtaaaatcagagagtggtgattgttgcacaactctgactacgttaaaagcctctgaattgtacgttttaaaagggtgaattttgtggtatgtgaattatatcttaacagcagttaaaacaaatttaccttatcctttattaaaatcaactttgctagaatttaagtgtgtgtttttgttaacgtcaattgtggccaggtgctttcatcttaaaaaatgaaaaaaaaacaggtcaatgtgtgctggaacttttgtaagcagttaattcctttttaaaattggtgtgtgtgcaaaatttattttaatgcagtttttcccccaaggggacttgttaggcaaatgtatttaagtgtccttttaatgcattttatagcttcagtttattcctttataccacagtgatgttccaacatctgatgaattstggcttttcattaggacatctggatttcacacacacacacacacacacacacacggaataacaaaagataaaacatttttcacaaggtggttatacatatctatactacaaatgtataaatatgttttttcctaacaaatcttgacaatacagaggttgatgtgctgaagagaaacacttcgattaaattggtccattataagaaatgaaaaaagatgaatgtaaaggagtattttaaaaaataatttctttccagcttcatttttttcttttactattcttccttaaagatgactgtaaactggaatatcttaggttaatattatttttatatttacacctctaagtgttcattattttatatctgtccttcattttgacatggctaattttaaccttcaaaataaatatataaataaaccaatgtaaaactaatatcaactttgatcagcttgaccttaactaagcaaatagtggagaaatgaaagtttcttacagaagtttaatgtcttaaaatggrgagaagcattttgctttcatctgctccatcagctacactgggacagcagttgtgtctccattaaattaggtgtgctttgattctccaaaataaagaattttctagacacttgacttgtgtcagtgacttaatagagaaggaacacccccaaattggcaactctgtttatctttaatgattacttcttttggaaggaaaagggcattctttcttttttttttaaagacaggtctcactttgttgcctaggctggagtacagtggtatgattacagctgctcactgcagcctcaacctcctgggctcaagtgatcctcccacctcagcctcttgaatagctgggacttcaggcatgcatcaccatgccctgctaattttttatttttagtagagacgagatctcactgtgttgctaggctggtctccacttcctgagctcaagcaatcctcccaccttgaccttccaaagtgctgggattacaggtgtgagtccccatgcccagctggaaaagggcattcttgatgattttcaaaccacagctgggacatacaatgaatctataatcaataatgtattattactctccactgttgacatggttttgatcggtgtccccacccaaatctcatgttcaaatgtaatccccagtgctggaggtggggcctggtgggcagtgattggatcatgggggagttttctcatgaatggtttagcaccatccccctagtgctgttctcctggtagagttctcatgagatctgattgttaaaattgtgtggtacctccccacttctttctcttggtcctgctcctgccatgtgagatgctgtgctccccctttgccttctgcatgattgaaaactccctgagccctctccagaagcagatactaccatgctgcctgtacaacttgtgggatcctgagccaattaaacctcttttctttataaattacccagtttcaggtatttctttatagcaatgcaagaacagactaatacaacctctttgaatcttttcccattaattatggacaactgttatctccagtgtaatgttattattctgatagataagtaccatgattgtcttgtttattagaaatggcagcccatgaaggtttcttacttggaggaacttaaagaatgatagcaacagactatgagcattttcttgcagtctatagagtacagggccagacttctggcctgtgctgtttcactggttcaaatgactccatttgtakttgctgtggatgtctgtgttttagtagcagctttgggtataaagctgtcaaagccatcacttcagaattcataggtgatccacagagatccaggtggtgggagaatggctttcaaggtgaaacttggtgaggtggaacaaggtttccaggtggttgtgggtttcttgcctgtcttccttttttcttttgtcccattgtaagtagtgggcataaaagctatgggctataatgaactttgccaagttttgatgccatgccctgaccattatagaagcccggtaaattaatttagtgtgatcrtataactataagaagatgtttttgatttattggatattaaaacttgaaggaacatagggataatgaaatttatcctactcattttccaaatgaggagcctgccaaagattcccaacacatttaccattaatctttttcttcctttgcaatagattcctgatacttttaacctgtactgctcatatttaaacattccaattttcaagccatgaggatggctttttaagtgtatatataattttaatgtcaatgcatgtatttccaaaattctgtgagctttaataatagaaggaatatttgaatgaccatgagaaatgtccgtcgtttgtgtgtgtgccttttcattggtgacagagatgagtgtaaggagaagagcataatggatttctttcacatatgtaagcaaacaaatacactgaaaaatgctctgtgattctctcaaatggtatggtttcttttttattcctctagttttattgaattttaattgaccaatacaaattgcatatagtcaagatgtacaacatcatgacttaattcatatatacattgtgtagtgatttctacaatcaaattaatacaccgttcaccacacagttgccattttgtgtgtgtgtgcaagtgtgtgcgtgtgcacatgcgcacataaaaaggacacttaaaatctgcttcaaatggcatggtttcttattataagcaattaaatgtagacatttatttcaagtcatattatacaaatgtgtagtttatactcttcttagagtatattttaaattttttagtgtagagttatcttccatatattctgtatttatgactgcatactcatatctgtaaggagagtgtcatctttttattaacttattttataataaagtgaataaaacagctggcttaatcttaagaataagcaatccctgtcagatgattgactcttcatctgctctctgtatactggccctgtttcctttttttgcccaaaacatttacatatttcctgatttttagtttggatggaggtggggagatcaattttcttattgctattcatcttgacagtttgtgccactaaagtaagagatggagagaaattttctgaatgttcaagtccctatggagaccatagtgttgacccagtagagacagttgagaatacaaattgggagactgattttcttgccttctctactatttgtatatttgacaktataaggtgtttgagggcagtacatgtggaaatgttaaggagttaacattaatagtactgtggttaaacagatggcrtaattagcccgcaatggggaagaacaatgttttcgtgtttggataaaaagggcacactgtaggtggtagaataagaggttccaaatgacagtaccttatgaagatcaggcaagtgacaattttcatgatttaggcacatatctgtgcatatgtgcacctatatataatctctagacctatttttatctaagtaaacaaactcttgtcatttttaggaaaaaattatctgtatgtgaatgcataaatgactattaattcagcttagtctgggagatgtggctaagtattgtggaggatgcagaaaagaatttggtctttgtattcaagtagtcagttttctgggacaaattcataagcacaatggcaaatataggacctggcaaaaatttattgcaagtgattagctatatgattacttagccaagtccagtattcttcacaaggggaatatttttagtaagacagagaaagcagttgatggactaagtctgtctgtctcttcaacttactcaatattgttacctacttctctgtgtggaatgaggtttgcttttgtcaaatctgatttattctgaacttggttatagatgcagcacaaaaagtgatgcaacaagcaagaaaacataatcaagtgaataaaagaatatggtaaaccttcctgtttgtatactttgaaagtattttccatagtaaacttggaagttgaaattggttgtattctgtgctatttagatagatatgactcagatttttataataatgtaaattttgaatattacctcatattttggctaattattagagagatatttgcagattttcccccttgtcagcccatctgctcctatggtacagtcataatgcggaaacattgacatctcaattatttccatggcaacaaattgatgtcaggatcctacatttaacttcactgcaggaccaaataggatttggattacaggggtgggttgggagctgttattgaaacataagtctttaagaaagggaaatagaaacattttgggaaatgtatttttcaaatttagacttacctttaaagaggaaattataaaaccacacatgaagtgaataaatgaatgctcttctctmtttctatctgtaaaaagccaatgaaggacattttctttctctgtgatggttgcaagtaaaactttgaatctcatctaatgtttgcttaaaaaccggaaagacccaggcagttgtccatagtccaagttcagaactatcatacttttagtttagtaatgtatataaataaagtatatggtacttcaaccttaaattatgtaatctctgtgtcttttgtttagaatatggtaattatagttatcttatcttccatacttgagggactgcataacttcagtgtgttttggtactttgccttcctttttttatgtcatttttgtgctgcattaaagagtatctagtattttattagatactcctgatatggttttactcattttttttactcagggtaaacaattacatttgattcctacttacaaattttgttgaatctacaaatatttctgatacttttttgttctgtaacccttggtttgtaacttgtcataaggctggcctcatattcaagtgcatttgggcttctgcctccctggctggaatgtgaaggcaggaattgtgtctttgttatactcatagtacctggcacatagtgggtaatttaagtctgtttgttgaaaaatcttgttatgatctcataacaagagtttgtcagggcagattttcagagtatcgatgatgtcaccccattccactgctggatcttgaattttgcagggttaacattttgatttatctgttttgaggagcccgattcatgataaaacaarctgaaaagagactgacttatcatgaataattggtgataattccctggttctgtctattaacttcttttgatgactgatttcacgctgggagatcacattgtagattatatggctcttagatgaaccagccctggattaggtgttcctaaattaggtgttcaaaagtattgtgtttgctgtataaattgtgtctggacattttttctatccaggtacctgatagccatctctaggaggaaagtattttctaactcttaactgtgctggacaaataccaccagaaattgtgttcttctctcctctaaaatgactgtatatcttcaccctcccattaaatattacataagacattagagtgtgaatattacaaatgtatgacctttggtatccctattaaaacaagagggaaggagaggtagagaaatgggcactaacttgcttcaaatcgcactctgaaataagtggaggagttgggatttgaatctgattctggagtcaggtcacttgcttctgagctcatatatagattgatagatcatttctgaagtaggatatgctgcttatgctttaattttaactgttttcagtattaaaaggggagcgtctttccaaatttgagcatatctcactgtagcccctaagtgggaatgatagttttctacctgcaatatacctgctttcaaggtcaggaaagcagagaattgacatgagactaagaagaaaatgagtgtatttaatgataagaatttataatgagatttcaaatcagcaaatatacccattttggatctatttatttattttttctgtgcaacttaatagcattgcagtaaaaacttgctaatttagatgacttgtgggcaacacctgtttgaattaactgaaagtctgaatcacataataattttgtatacaataagttttattatttttctgatacataattaacatcatttaggagctagaaaaactaagcttctgagttacttagaatagtttgttttatatgctattaattgccttttaaaatatttaatattttctacttagagattgactctttgcaaaaggcttttatatacagccctacatttaatccccagaggaatccttatttttcagattagtcaatttggagtaaaaggagagcattaaaaaaatttcttcaggaccagatgtctggttatataattctatatcaagttaatatagctttcaaaaagtaaagcaaaatagctgagtaaacttatcatgagcagacccacattacaagaaatattcaaggatttccttcagacagaaggtaaatgataccaggtggaagtatggatctacacaaaagaacagtgctgagatgcctatattagtaaatataacattttttattaggtatatctctttaaaggataattagtgactcctgacaggtatggggtttctttttggggtgatgaaaatgttttggagttagacaataatgatggttgtaaatccactaaaatccactgcgttgtacacttgaaaatgatgaattttatggcatgtaaatcatattgcaatacaaataaataacaaatatttttaaataaggtattgataaagcaaaaagatggctggttagcattagcctggcctaaagcctgtgtatttgagatgtttcattattacatcacaaatctttgctatttagataactctttttaaattatcatcaaagtttgcttagcagcatctgaactgtcttggtctgctcaggctgctataacagaataccagaggctgggtagctgatcaacaaaagaaatttatttctcacagttctggaggctgggagatccaaggtcaaggtgccagtagatttggtgtctggcgagggccctttttgtggttcatagaagctgtcttctggctatgtcctcacttggctgaaggggcaagggacggaggtctcttaaaactaaaggttttgcccttcgctgaagaccgttgctgttgctttattccattaagggctgcaaaatggggattttcttattatatatccatatgttattgtgtattstgtcttattctttcttatccatagagtgtctggaattaacttctatagaagaactttgctttacctgccagggctatttggttacctggaaccacagtttttaatggcaaggtggaagaattttcttccttatgtatcagttttcagcatactaagttggtgccctgcatgcatcatagttttcagtttctccatgtgattcttacatgcagcttgggtagagtagcaccaatgtagagcttggatacatcccaaattccaaagttttattacttattataaaagcacatttacagggtggctattttgtttttgccacattatttatcctcttgccaaactttatcagagcatatggatttctttcgaagcatttctataggggagttttgggaggtgcttccttatatttgttcatcttacaaactaaggtaaatgaattgtagaagaaacactccaaaggcaaccaaaaaataatgttaacatttgttcaggatttattttgtgccaggctttgagcttggccctttacaatcgttagcttatttaccctcataacacctcatgaggtaggtaatctaattcctaatgcaacagaagctaaaatttatctacttgtctaaagttatgggtccagcaaagggttgggctggagctaaggggtgcagacgttgggagatccagagcctatgcagtgagtcccaattctctgctcttctcagagtgggatatttcacatgtctaatcccattccccctgtagatttgtctatttccattctgagacaaagaaatggaatgactgtttgtaatattcagattctgccatgggaaaatggaaatatatacagttgtctacagtagtggtattttgattagaccaatatagctagcattttcaaagtggttataaggtgatggtcacaatgttatttacataccttcatgatagcatttaatcgctaaatctgcaggtcagctgttattaactctgaggaaataggcttaaggaaatttagtactcaatgtgacacagtgaagttggaaccaaagttcctctgactatgtagatctttattcttaatcacattatgctgactgggcagaggaagagttaataggaattaagagaggttggagagtagccatctccggaagccaatttaaggttgttttccatccaaaacaggaracctatatagcaataacaacacaagttttatagaatatggcccaattaattacctcaatatgaaaatatggtcatatctctatagtgtgcttgttttcatttttcagttcctccctggtgttggacagtgaaagaataaggtattgactaatcatgatcagttcagaattttgctgtgatttttcaataggtgtttctcattatttggaaatgagcactcagtaaaagaccttgctgtgtcttgcatggtttgcctcattatgcttgtgggatgtgaatttaagaaaagtaagcttggattattttccccagcgattgaagcttaggttgtataggtatataattttaccatatcaaaatatttgataattaaaaccttataaagagaatgtaatgcatccctaaaagcccatttggaagggaagacacagtcaacaaccagcaacttattaactggggaaaaagtaccaaatgcacttgtgtatattttaagtgaaaagaagagaggactcggatgaccatgcttagttaagggggagggtgaccttttatatgcaagttgggaaatacagagaaagtgaaaggggaccaaaatgaaaacacatgaaataagataagcagagatgaaaggtggcactagaactgtaagaagcatttgaacaggcagaacagtgctggagactttaggagagggctcaagctgccatgtggccggtcctcaaatagttctagaatgactagcatatctttttacaaaactataagcaacttgagggcaaaaataaagtatatttatcttgcatcctgaagaataaacatggtgcttggcatttggtaggttttctttatgtgtatatatgaaaagcatattttcattttattagaagattgtggtaaaaattctattgaaaaccatgctataatgtagatagctagacttagttcggtggtttccaaactttttggttcaagtacccatttatgctcctaaaattgttactgacagtctaaaataacttaggtttatgtggattatgtctatcaatatttaccatataagaaattaaaactgagagattagaaaaccaataattaaaaacccattacatgttagcataaaaygtatttttgcaggaaataaaacccctacatttccaaaataaacaacaaacaaaaaaaatttaccgaggctttttttttaacatattttgcaaatcttcagtttctagcttattagaagactaaatttttgtacctcttctgcattcaatctcatattttgttttgtttgaatgtattaaaaaaactcaccccacacaaatatgtggttggaaaaaggaggtgtgttttatagacttttcaaataattgtgtatatccttcttttatactatgccaaaagtctacagattataatttcttaagagtttgaatcagaatctaaaactttatcagtgagcaatttatactctgttttgttaaaatagattggtgttttttgtagtttgggtggatcttttacctatgcatgatttggaaacatcatgtattggtcaattggaaaatatcaagttgctaagttatttagatgttccccacgttggcatatttcattatgtatcaaacaatcagatttttaatatcaaagtattttaagagttggaaagctgtcaagctcaggatggtggattaaattttttagtataccgtttttggcttaagagctcaaattttgtcattggcaacagacattgtcacttatttttcttgaggtgacaggcttactccttttctcattttaaacgttggtcatgaccacttgggaagagtttgtcttcagtgaatcagtcaagtaaaaatggcgtttcatgaaaagagtggctagttcagctcatatctcagtctcataagtgctttccttgagataaacaacccatcttattttgatatgcaacagaaatgctttatgtatactttccttcatcatacagaatattaaaatgacataacgattgtgattttaacaattaattttacatgtttatcaaagatattgtcaagtgaaactgcgttctatttactatgattgcatgtcagtgaaaagtaaaatgactgccagtaaaatttgttgcccctgccttagttcttgctaaaggaatcaacagttttaccaaccaagagtttcattgcaccatcagtggaaaaggtaagtagtgccttaatatgacgtggaaatggttttgacctcaaagaccccaggagggccctgagaaacactcactttgagtatccgtggtttggggcaggggaggttatagtgtacgataaagcaattatacttatatgtgaaaattattttggtatatatttctaagagtagaatttcttccatgcattagaacaagtggttttgtttaattggttcattaacagcttggataaattaaattgctattacagagaagaagataatttgtttttaattttcaaataaattgagtacaataatgcttcacagtgaatttcttaatagtgatcttgctcattgtcataactgtgtgcacatccttagacacaaatatggtttaagcaggtggcatacttttctccactgtcaaagtattaatatcatttctctgcttatatggttctttttcttttcttttccttctttttttttttttgttgagatgcgtcttgctttgtcacccaggctggagtgaaatggcgtgatctcagcttgctgcaacctccgcccccgcccccaacctgggttcaagtgattctggtgtctcagcctccctaatagctgaaataacaggcgtgtgccattatgcctggcaattttttttttttttttttgcatttttagtaaagacggggcttcaccacgttggccaggctggtctcaaactcctggcctcaaataattcttctgcctcgccctcccaaagtgctggaattacaggcatgagccaccgcacccagccagcttatagagttctttgtctgatttttgtactactatagttttatctcacaaagtaagcatatgggcaaaaacagcgtaagtgtgaatgtgttagacttttcagttactgagttaacatagcacctaattcacatgcaaatattatatatttattcctacccttggttaatagtcaatttaaaaaattgcaccttgggaaaaaaaaatcattgtttttacctagagagcagagatgagattattttattagaatttcttctaggattttctactgttgtattttccccttcatttttttatccaggtttccgttttggagaaaaaagcaacattgaagaatgaggtagagccctggaaaaaagtgtccttctaggtgtgttaagaatggttatagagattgatatcagataccatgagtgagcaaaatagtaaattctcataaaataatacatgagtataggtattgagctcttttaaataatatcaagtgatatagatgaaggaagaaaatgttaaaagggttttaaataagtctctttttcaatggtgtaagtatgagatttgtgaagccctttccagatgcatgtgtgtttgcttatgtttaaaaaatcacttgagtgcaaacatttaaacacattttataaaactggcgggccaggcacggtggctcatgcctgtaatcccagcactttgggaggccgaggcgggtggatcacgaggtcaggagtttgagaccagcctgaccaacatggtgaaaccccgtctctactgggggaaaaaaaaaattagccaggcgtggtggtgggtgcctgtagtcccagctactcaggaggctgaggcaggagaatcacttgaacccaggaggcggaggttgcaatgagccgagatcatgccattgtgctccggcctgggtgacaaagcgagactctttctcaaaaaaacaaaaacaaaaacaaacagacaaacaaacaaaactggcatggcattggacagtgacacataagaagctgatgtcatctttgccacttagagaaggcaaaatatcttgttagataamccctcttaaatgctctgcttggctagtactttttgggcttggtcagtgattagagtttaagttgtaaatggtattcataatttcttgtctctgtctcatcccaaacagattagaaaatctttgatttttgttggtaaggagctagcatcttattaatacaaagccttgtgcataaattatttccagtaattatttagtgcctaatgtggcatgctttgtgctgagtgctgaggataaaagaggaataaggtaagatctttatagtttagcagaggaggatgtgagtgggcagaaaaatgttatgagttctataataggaatatgtataggggaacttggttacagctcagcttaattgagaaagggtgtgaaatgaaaagaccaaacattctttgcagaacagctaaacagttggaattatatactcagatgagttaatgattataaatagccatcatttattatctctccagaactccagaaccaaggttataaaaaatgaatagttctttatttagttcagaagcatttgtgaagtatctatagcatctgtaacatggcaggccctaaggacgctggcatgaatagtgggccgtcatctactgggagagtcagtatagcgtgtacrtgcgttagaggtgaaatgcataaaggggcatccaacatggctggtggctggccatgtgaacaagacatttgcatttgccacagcataaagaaggatatttctgagtcatggagtattttattatgtttatttggccccaatatttccaaataaaaagaggcctttgcttttgtgctacaggcgtttcttatctttaggargaatgggccgggcgcggtggctcacacctgtaatcccagcactttgggaggtcaaggcaggcggatcacaaggtcaggagttcgagacaagcctgaccaatatggtgaaaccccatctctactaaaaatacaaaaattagctgggcttggtggcacacgcgtgtagtcccagctactcaggaggcgaggcaggagaattgcttgaacctggtaggtggaggttacagtgagccaagatcgtgccattgcactccagcctgggtgacagagtgagactccatctaaaaaaaaaaaaaaaggcacggttttgaatctgcacactcaaaaatggccacagctttcccgctactttaagcactcataatagattaagcatgggtcagatctcaccactcattagctattgggtctgaccactaattatttagtggatctctagatcagttatgtaacatctctaaatcttactttcttctactgtaaattagagataaaaaaagtagccaactcctagtggttttgtgagcatttaatgaaatgatctatgtaaagtgctcagcatggtgcctgacatatggtggagacttgttatatgttagctattattattttctcttaaagtactttaataaactgcatataatttaatcctcagaataactccaaaattaggatttctcttatttcacaggtcaggtagaaatcttggcattctggcagggcttttcactaccaaccaagataacagcttgcttattcaaaccaggagctgcttttagtgttggtaatgatttcatagagagtgatgctatctttttttcattaaagtgggatgataaacattttcgtaccccctcaccatgtgcaaagcactgtgctaagtattttagaaataggaaacttgaaactgggatcatccttgtccttaagaagcttacactttattatgataaataagataaaaatttaagtaactatgcagtagaatatactgtatmgttttgaaaagaaaaagtattacttgactttgtcttatttaagctttagatattctgaggggtaaaaaacacaagattgcagttgttagaaaagctgttttgagcatttttcccctactgttttccttagttttatttgcaagctggagcaggtattaaagatgaagtgttctggtgggagcggtagcccagagtgcttgaagcattgctaatttcaaaccttataatttagttaaattgaaacataactgcatttagatgaatgggctgctagttttccttcccaaagcaaacatgccaacctctcattacttcttgtctgtgctacggcttctgtgctattcagatctgctcgtttacacataattgacatgtaacagtgtcacagactttttattttgcagaaagaatttttaaaaaattaggaatgctttccatagcatgccgtatcaattattctacattttgaagtgagaatgacagagtgatccagaaacttggtgtttctgtggaaagcggtttgtacagtacttggctcatgcttttacagacctgggagtaagtgacacagtaggtctgattacaaatacagtttatcttcatttggaatccatgacttctattaaatttaattacttcccccgtggcttctattaaatttaattaattccccctgcagctggcatggtagaggtgctgctgctaaatgaaggtgattgctaattgagggagttttctgaaagaggttttaccctttctcttgtttatctggaaatcgcttatccagccagacatctgagaacattagtgagaagtgcaggttgcaaagtcataggtgagttcatcaccgttacttagagaatggtagattttttttttttctttttctcttggatctgattctgcagttaacatgccttttggtgagaggccagtgtaggattctaattgaagaaaactggcccagtcttaacctatacaagatggaacatgttaggtctatatacttggaattttctagcaaccctgtcgaggttaattgttgctcagtttcaaaaacaaaagaaaacaggtgaaagaattcagcatcaggagcagtttgttacccatccaatagccattatttggtggactccaccaatgacagtaagcagtcttattgttaatatggtttacctggtcatacagctataatgataatgtaaatatcactatacattcctaaggcaaaacaagaaaactcaaaacatttaaaaaaatcaaatatataattgccattgctttgcttctaaaagttggtcaaatattaggaagaaaaatgtatactgtaattagaactacatgcatttaatgcatttttattctcatcctttcatgtatatatgtaagtatatatatatacatatactttatatgtaagcatatatatactttatataaattacccagtctcagggaagttctttagagcagtgtgaaaagggactaatacaatagatgatgcctaaagctgaaaagtcacgaagcagctatataagcatattatacaaatatactttatatgtaagtgtatttatactttcatatatataaaagaaaggatgagaataaatgctattttatagtatttatataatatactattatatatagtatttatactattatatataaattatatatagtatttatactattatatataaattatatatatatatatatataaataaaatagtagagttgggggtcttgctattttgctcagctggtctccaactcctgggctcaagctttcctcccaccaaagtgctgggattacaggcatgagctaccgcacctggcccttttattctataatagaaaggagctctcatttttttgagcatcagtgtgtgccagaaattatatatatactctacacacatactttatatgtaagtatatttatggtattgtatataaatgtggaatatatgtacattaattttcctagcagtccaatgaactattttatacatgaagtgttgagactcaaattcttatcttttctctcaataatttcacctgctcatataaatggtgtgtgaaaatcctggctttgaaggaagatctgttgttctttgaatggacaataaatactcttttggcaacaagctccttaggaagctacttcccttttcttcataatttcatttctgttttttcttctacttttctggacattctgcttgkctcaacctcggaagtcattatttcttacttaccatctataaactcattcattactctaaatttgttactccagtcctgacctctctttgagcctgttaaagaaaaccagagctgcacagtagttaaagcgataaaaaacagattttattcaggaactattgcaatagagggaaagagggctcagcatataactgggcttacttctgaatacagcatggacaagtggggatttatagccacagaagcagggttgggagtcagtgaatggaaaattactaagaggaaatctcagaggaaaaaggggattctggttaaacagacctaacagaattcttgctaaaggcaagccagggtggtgagatacatcacctggggatgggaatcgggggaatgaggaatttgatcagatgtataataggttggagggttctcactaaastgataagcaggattttgctaacattgggctattcacgtctggcattcttggggcctagttgagaaatgggcttagaagagcctgaataaattctggtctaggaaggcygggagtgctggctcacacctgtaatcctagcactttgggaagccgaggcaggtggatcacaargtcaggagttcaagaccagcctggccaacatggtgaaaccctgtctctacaaaaagtacaaaaattagccaggtgtggtggcacgtgcctgtagtcccagctactcgtgagtctgaggcaggagaattgcttgaacctgggaggtggaggttgcagtgagccaagagcgtgccagtgcactccagcttgggcaacagtgtgagactccatctcaaaaacaaaagaaaaaaaaatctggtctaggagagtgtctctgtcaagccccggaaactttcactctttccatatctctatttgcttatttcccaggcatagcaaactgaaatcattacattcctgtacaaatatgtattttcttcctccaaccttccctgctggctttgactcagttagtgattaatatcagaaacctgggagtcataattccttctctgtctctgcctcaccttcaagtattaagctgtatttagtttaataacagatctttctactttattgcatttcaccccaacctcaccgttttagtctctgccacttggatgactatacttgctccctaatctagtgttccctcaaatccaggctccagacaacttgtacctttggattataatatgataattttacttttcttttcccactttgttcctcctcctctttcccctttcctctcttctttcctcctctatttttctagtctccgcatcccttattccctcctacttttcttcttctcaattcacttcctcacccctcttccctcatctccttcttacgtctccctcctccaggtacctggcagatagaatcataaagacttgtgtgtttcagtaatctgtgatgtggtgcttattactgatttagactgagcatatttaaagacggtgtactgataaccatgtgaaattccaagaaaattctgtttttcagaatgacctcagtgttcctgtctgctaccattttaaataattaatcttattgtttttggttttttttttgtgaagtgtactatgttatcatgttattttaacttgatttgtcagctttattttaagatggtaaccaattactaaagttctgaactttacagttctgatgaaagtacacatatgtttgcgcttcaccaatgctatacaaattcaaattccttttacaataaatcttagtttttcttctcaattagtcattaagtttcctgattattctttaactgatactgtattaatgtactggctatgttaattagagccatgaagatgcaggggtccatcggtgaatgaattagactttttcccttaaccctttatatgcctctatcctcagttgttctgctcaggatatagtagaggctgcatagtacagattgtactaccatttttgcacaagtttagtttgaagatacttttcgttatgtatgaagatgcacttttattctttggaagctcaccactgtgtgggagaaatgagataggtgtttggtagagtacaagtatacagggccagaaataattaggtatattttatgggcactggtggccagtttcctatataggagggcttatgggtggccatatagttgtaggtgggagggccatggacttgttttgaagctgcatttgataacatgcaaatgtttacctatttgaaaaatagtttacttgaggtgggtatggggtctaggaggaggttagatgttggacttagatccctagtcaatgctgatcccaccaccattgaaggaaaagaaggtggacagagataaaatgatgaaagagggagctgcaaaaggaggtaggcaaygaattgaaaaatgaggtgactgtggccccaaggctagaagaatttaacctgacagcgtgcagggaattcagggaggaaagtctacctgctttactycattccagaactatcttttgcatatttaaactttaaacaaatgtacaactctattcagaattttgtaaagaacattatgaagtattttgaagacatgtctagcagtattcatctttacttgtcttttctgatatttattcaaatatggagttaacacttgagatctgacttttgatgactcctagatcggtctgagtttggaagtcagagatctctggagatttagttttgattgttatttacatgttgggcttatagctactgagtgttggtgtccactgtggtctcttctgaaccatttttctaggctttcttttctgatggcttctctttagaatgatagtacagaccatttgtgctttcataatcttttgttattactgcaatagtgaccaaaaccagctgtctagctctctttcatgtgtaaaccattctgtatatatcgtcttaaattactaatcttttggttgactcttagaagtgaatccatcttgtgaatccttgtttgcggactgtgttatacttttgttagtttcatggaagatagatctgactcccaagcttatgtgtattagcttttttctacactatctagaggagagactagctggtcaagaatgaaaggccttaatgtaaggcctaggggagaggggacttgagggtgggccctggtccttgacatgaaaaccaatgctgtttgccaattgttttaattttctaatctttgttttttttttgattaataaaagagcacttcaaagacctttagacaaggctaaactatctctttgttgcttacttttgcccagtagaatgttctccccacaactgcctaaagtttccatttcacttcatgttttttcaaatagcaccgtttacagactaatttgggtgactgagtctccttagaaaacatggaatgcttttcagaggtttaagtggctacccaaaattcatagtgttggtaagatatgaaccatttacagaaaaggaaatataaacctttaagcagatttttaaaatgaggcttaataatccttataacaaagaaatgcaaattaaaatcataagaattgtcatttttttcacctctaagattgtcaaatattcagaaatttgatgtggctctatattagcatagattttggaaacagcaattcttatatgctgttgtttggtgtgtaagttggaacacacagtgtagggggtaatttagcagcatccatcaaatacagatggctgtatctaacaacaccttccctgggaatttattcaaaatgtctacgtacaagatattcaccgtggtattttttttttaatagcaaaagttgaaaagccactaaacgtccatcagcatggaactacttaaatcaattgtagtccatttatacagttgaatactctccagctgttaaaaaaattaaaataatgaggcagttctttctttatatactgatatggaaaggtcaaggcattttattaaagataaaaaataaaggtgtctgacagcacatatagtgtactaccttctattaaggagagaaatgacatatatttcttcttgattgtatatatacacacacgcatacagatatacatagaaattaaggatggattcacaagatactaatggcagcagttacttgcagaatgggaaaatttcactatattgcatttagtatgttaaaacaagtttttgaaacatacaaatatattttaaaaattagatttaaaaatcatactttagcatgagttaattgcattgtttcctttctaacactcatctgaaatcgggggaaagagttttgattgagaaagaaagaggatctaagcaattgcatagcattgaatccttagctgaggcaagctctcatccataacctaccatgaagacagtttggaacccttgagagataagaaattaagtagcaggagctttgcaagaaaatggaggtgaaaggatgccaaaggctaatttataccacagttgtctctgggtaaatatggggatttgttccagaacccccttgcccataccaaaatccatgtatactcaagtcctacagttggccccatgaaatccacatgtatgaacagttggccctctggatatgcaggttttgagtctcacaaatactgtattttctctctggtttggttgaaaaacaaatctacatatttggacctgtgcagttccagctctgttgttcaaggctcagtggtactttgaatattttctacaggcagctaactcaaagaaaaggaaaagatagggtgggatattcttctttcttgtctactcttctgcttctagtatgagtcagaatgtaaatcacaatcagaatgtgaatgtaaagtagtagcttggaattagcacatggttgaggtccattacagaccaaatatatttaattatttactctgggaaccattcagatgtttagaagtctatctatttgcaactgcattttcactttcagcagatgaattctcaaacttttggaagactaattaggggcagcatataattatcctcagggtcacagattgtcattcattgtaatcggtaggctttactccttggtgtttggactgtttttgtgatactttctctttaccccaaagcataggtttttgaattattaaaccatagcagaaatcatgaataaagcattttgaaggagattctattatctgaaacctactgtaattttttcatgcttgaattagttctatgtactaaggattattgtttcaaattacattagtgggaatagttttccatttttcttaatgaattattttattaaaaaatatattggccagactctgttcytgactgggtactcaayggtgaatcaaagtttctgcactcattgtattatttgtagtctttttggatacaggtgttatctaccgtgctcattcatagccccccaccccaccacttcagtaatttcattgtaaaatatgtgaagcaggaaggggaaggggaaatgcataactgttcaatcaattttgctcctaaatgtttgattcccatctaataaagaacttatgaccatttagtggaatcctgatcttctaagaaatttttccgtttttttaaaaacaattctttgatcactccaaagtactttctaagcaaatctcagtgtttccctggtattattccactgtttaatggaaagaacgttaagtttggagttctaattggaatactgatccatcactgaataattatatggtcattttttttttctctaaacttctgtttcaatgggaaagcaaaacttcttcccagagttgatgcaactattggaagtattttttgtgtaccaggagtactaggagctctctgtaaatgctgcccattatttggtgattaattcagaagcagctgatcagtaagagcttaagtagtggtactgtattcatcagtgtgttcaggtttcagtcttgcagcctgaactcctttgtctttaggcttttctcagcctaacttggcacctggggcagccctagttcactgtttgtatctttttgtaagttgatactccattgcatctgaggtgcacaacagctctttgattcaatccccaaatcaaaagaggtaagatgaaggcagatgaagagagctagaagtagttagttggacagaagtagagagatgaatgctgactggctcttctccatttcctgcctgtggcaagcagccagctgtttccttaattcaaaattctgtgtgccctggcagtgatagagtagattcttcttacagaattccctgctggcgattgccatttcaaagaagaaacttacagtagaattattatggtttagagtgttactgtgtgtataagagtaggtagaatgaagagccaagggttggcatccattcaaaagtggcacgcagaattttcatttattcctttactccttagcagaggtagagatgtcagtggaggtcacctacaggcaagactctctttgagaaacgtctgtgatgttaggtggtttgactgagcgaatcagccccaatgtatgcacagccgacccttgaacaacacgggcttgaactgcgtggggccgtttatatacccggatattttttcatccaaatggtgattgaaattacagtatcccgggatgggaaacccgtatatggggagaagcaacttttcggatgttcaggttcttcagggctgactgtgggactttagtatgcacggatttgggtataagctgggatcttgaaactgatctctcccgcctatgcgagggatgactgtgtcctgttaaccctgcccttctgggaatcgcgacagcttctggccgaaggtgggagctgtttcaattccacatattcacactcctcatagcccatttgctatgctatacctcggtacaccccctcatcagccctgcctatactgctattttgggtctgccttcattatttctctgcctgctactcatttagttttgtctcattctattctttctagcaagaacatctttattctacactctcctcctgccttgggtcagcttaattaccgcctaaataatcgctaaggctttggagtcgacctgtttgtttaaaaatgtatttaattatgtaatttatttttatttattgtggtaatgtcaccggaaaagggttcttgtcccagaccccaagagtgggttcttggatctctcatggaaaggaattcagggcgagtggcagagtatagtatagtgaaggtaacatagtttattagatactacttagttgcagagtagggtgtcctcagaatgcaagaggaggcacaccgccatttcaaatacaatgcttgcttatataaataggttttgatgtactcttttatgatggtttgtgattagcttgtggcaggctattaatattgttactttcttatattacgcttatctttaaagcaaaacctattctcaaactaagaatggtttttgttcttaaagtactagggcatttccataagttctgggtcttatacagttagttaacactattaacttagtccctcaaccatgaatatcttgtgaccaagagtgctgaaccccagggaaagtaacccagcagatttgactttttcccaccttcattcaagatggagtgactctggttaggatgcctctgatggtaggaatacttaaccatcataaattaaaaacacaagatttccctcttaaacaatttctaagtgcacaatacagtatcgctaactataggtgtaacgttgtacagcagatctctgggccttattcatcctgcgtaactgaggctttatatccattgaacagcaattcttgtttccccttctcttcataccctggcagccaccattctattttctgttcctatgagtttgactaatttagataactcaaagcaaaatcttatcagtcacagaaggacaaatactgcctaggttttaatccctttcctatccggtgatcttggcaagttacctggtactctgtgcctttgtttcctataaaatgggaggctaaaataaaaaatgcatgtgaagttctcagcatatcattttataaaaaaaaaaatcactcaacagtgattgttagcacttattatttagcgccactgcacctttttatttaagtcccataaataatctcaattgatgaaattagtgtcagtatatactgaaagcatggaaaagaaaagtcgttttagagaaagcagctttacaccaatttctaaagtaagcgacaatgtcaaaaattgtctttagaaactatatgtgtctctgaatattcctcctccgcaaaactttcaaatctgattttctttaagctccattaggtgaaatatattgtaaaagtttccttcagttggattattttacttgttagtatagttttaattgctattatggttaatttattattttccaatcttaatacaaatatttaaaactgtaatttaaaatgaaatttaaactatctaccagtcttttggggactatcttgagattttaaaacagtgctttggaaaaatgttggtcgagacccaaagagcaacaaattatctttttggattgaaaaaagggattgatttttttcatatcttttgttgctttacctgggactctcacaaagtgttaagaggtaaaattgttgctatatatatatatatatattttttttttcctctttctcattttggccagttgactgaataatttggtcaattagttgacttatttaattaaactacatcctgttataatgccaaaatgtttatttctagtatggtttatttgagaactcattttttattagaacacttttgatgactagaaagcacacaacaacttactttcattgtaatttttgagttggggcttttctgaaattttttgtctagcttcacccagggccaagctgttacagtcatgccttgctctcctgccctttattcatcatctctttgtgattcgtcccttaagagaagtctctaacagttctttgggttagcatttctctttcaagtaacagataacgaactgctttaagaccatacaccagaaagatagaaaactatcatttccttctcctttcatcagctgacccacattgttctgtgcgactcttggtctttgcccagcctcttcctcggtgctgtagtaaattcaaatttaaaccactggctagttatgttgagatgaattccatatcaagaaaaaagttttttttttaaattaaaaaagtaattccacattatttatgtcatcctcaaaagaccaactagtttaggggaagctgtttaattacacattcatttgacttacaattttagaccctgtcaggatgtccattgcaaactaagattttgaaaattataaagtttgaaattgttttaaaaaattgtagaacctatttgggagcatatccaacatagcattttcttgatttttgttayaaagagagcacactggggaggctcacatgtgaggaatatctaagccagcctgcctgcctgcctgcctgcctgcctgcctgcctgcctgccttcctgcctgccttcctgccttccttccttccttccttccttccttccttccttccttccttccttccttccttccttcctgccttcctgccttcctgtcttacttccttcttgccttcctttctatgcctgcctgcctgcctgcctgcctgcctgcctgcctgcaaccttgacctcctaggctcaagtgatcctcctacctcagcctcctgagtggtggggactacacgtgtgtaccaccatgctcaacttttttttttcttatttttttgtagagacagattcttgctattttgccaaggctggtgttgaactcctggcctcaagtgatcctcccaccttggcctttcaaagtgctggcataagccactgtacccagctaaattcctttcctgaagtgaaatagctctatttattcaagtttattctggaatggaccagcataaaaaagattccagtactttaattttgatgcttagttttttttaactaattatatttattgagttctttgagtgccggacacactccacatttgtgctctcatttaacacttcagcagtaatatatgaggtgaattctatgactgagtaagtaaactgaaatttcaggagggtaagcagtttgttccaagtcatatggctatttagtgttgggatctgctctgccattgttcacagctatattcaattgccccgggtgttgtgtatctttccaaaaacgttgaaagggaggttcagaagtattcagttatttgtattattagtcgttttgaaactgagtagaaagactcatttaggaaagttccatatgccttcttgtctgtctatggctggtttgctcaggagaaaagtccacaattatacaattgtactcagagatcatgttatttgtatatctacctgcctcatcggagaggttgtgaatcgtcccagagacaagataatctttttgtttgcattcacctgggctattttggaggctagtttgtcatcttcctgcaggagtaattttatccatgtagttcctagactgttgtctaaatggaatcaagatgggtttgtcagccaccgttgcctaatggtgattttaggataaattatcttatctcgtattagcctaagaaatctctgacttgggatttggggtgatttaatacaaaatcattcaaagatttctttctgtcttttctttatggcttttggactgtgtacttatgactttctctgctgtgctcaagtatcttcttagtatctgtaagtaaaagttacttataaatgtctgtaaaaaaaaaaaaaaaacagtgttagaggctgggcatggtagctcacccctgtaatcccagcaccttgggaggccgaggcaggaggattgtttgagctcagggattcaagaccagcctgggcaacatggcgaaaccctgtctctatcaaaaatacaaaaaattaacctggtgtgatggtgtgcacctgtgatcccagctacttgggtggctgaggtgggagtatcacttgagcctgggaggcagaggttgcaatgagctgaaatctgagattgagccactgcagtatagccttggagacagagcaaaaccctgcctcaaaaacaaacaaacaaacaaacaaaatacaaaaaaaaaactattagaaatgccctggaataaaaagaatgaaatccggtcatttgcaacagcagggatggacgtggagttcactatggtaagtgaaatatgccaggcacagaaagacaatatcacatgttctcattcacatgtgggagtttcaaaagttgatctcatggaagtagagagtagaatgataattaccagaggctgggaagggtgtgtgtgggttgcggggtggaaagcggggatgaagaggggttggttgatggatacaaacatacagttagatagaaggaatacgttctcgtgtttgatagcacagtagggtgactatagttaacaatatrttgtatatttcaaaataggtagaagaattgaaatcttcgtagcacaaataaatgataaatatttgagtaaatatcctaaatactttgatttgatcaatacatattgtatacatgaatctaaatatcacatgtaccacataactatgtacaaaccttatgtattgatacaaatagttaaagggaattgaataataaagaataaaggataaaatatttaaactaatattaaaatcagggtaaaataaactatagctgcaaaatcataagacagttaagtgaatatacctggattaaggaaataaaatttaaaataatgaaaatacygaataaaaattaataataaaaatgtaaaaataaaattgaataaactacattgagttagggtgtgtgtgtgtgtgtgtgtgtgtgtgtttgtgaacacaacatacctrtatggtaggggtaacattggtttagattcactttgtacttcatacctgtgttcaaaagactcagctgagccctttgtgaggatattttgactttgaaaatctggaattgatgactcacttaaaatagttttatcttgggactgaaacagggacataggcatatttttgtatgattcacatcagagctgataatcttaatggtttgtaaagggcctaaatgattctacagttttatataaagcatgttaaactatcaaggctcattattacataactataaatggacagagttttataataagaaaaatgtacatttgtttagccattgtctcctaggaacttctctctattattacactattgcatttgcaaaggcaccaaaggtgcagtttggtttatatactgcagtagtaattcctaaaagatttaattgtatcaggttttttaacttaaaaatggaatcctatttaaagtatatccaaatattcgtacaataagaagttatcacagtctacctattttgtaaatgaggtgcagtgtttagttttcattggggtttttgattttctgttttgagcatttaaaacaaaatcctttgaaaatagtagttggtgatcacaatggtttatgacaattttaacaaattgtattagaagactctaaggagctgtattttcaaccgwgctttttctcttccttccttcctttctcttccctcactttttttcttcctcttccttccttccttccttcctttttgcattggggtaagaacataaataatattacatctttccactatgtctaaaaaagttggaggtggagaacagtatattttccatgaaaatgtcagcctgccacatagctctgcttagtaggcaaaccgttattcatttggattctctcttggctttacatttggaaacagttttagtgttaggtacttatgattgaaaaggagatctcatgttgagcttttattgcgttggatgcgcttaaaggaggttttgtaaaagaccattgcttcattaagaaaggaagaaagaaaaacaaacaattacatccagggaaatgctaggatttttgatagtttaacatgaccatgtcttgagcattttcagttcataatgaggcttgccctaactaaaatggcatttcatttcggttgatgtactcttgacattattggtgacatctgctaaattctaaaccatatttttttttaaattgatttcattcctacatcatcagctatgaccaccagttgagctggagagattggaatctggtgttttatttattaaaaaagacattttcagactgcttagctcacaaagatattttgtattctttttcaaaatatattttatttatcatggatgcttgtgttttaaggctgcatatttatttaaaatttatgaagaaccctggaaaacattcccaacacaatacaaagtccacacatttgcacaataattaagaatatttggccgagcacgatggctcatgcttgtaattccagcactttaggaagccgaggtgggcggatcacttgaggtctggagttagagaccagactggccaacatggtgaaacccgtctctactaaaaatacaaaaattagccgggcatggtggtgggtgcctgtaatcccagctactcggaaggctgaggcaggacaactgcctgaacttgagaggtagaggttgcagtgagccgagatcacaccattgcactccagcctgggtgacgcagcaagactccatctcaaaaaaaaaaaaaaaagaaaaaaattaaaaatcacacgttgactaataaagatttctttaaatgtttgtgtgtgggatgtgcttgttctttttggaagacactaggtatgttcacgtctccaggtttctccccgggggtgtgtggtgccagttcagaatctagcacacagtagacttcctaatccaaattttcctgaattaatgtctaatttttcctaatgtggcttgttttttgctatgaccaattcctgcttatatttcaacgtcaaaccttaaagtcacccttttgtgacttttcttgtttattattttttaaagcagaattaaatttttgtatgtgtgttttatacactctcatgcaagtgcataagctgcttcaytagttatcatgtcctctctgtcttttctgctattattaaaggtaggtaatatattttagtctcattgcatcattagtacttagtatactctctgatatagaatgaacacttgataaattcttgttcaatcaagtaaagtcaaagacttcaaaagatgacttgggaggacaactagcatatatcgattttgtaaaatatgttaatatcttcattagttactttagaattcaatgcccatataatcttttaaataatcttgggagaaaggagacattatttctatttacagtcgaggaaactacggagttaaaagtacagaattaaactttctccctatctgtctcctgtcaaagctgtattaagctgcttcctgagagtttgaatttccatggttttagagccgtttctttcttaactcattgctaagtgacttggtggagtacaattttcaagactaagtttcttcccttaaattcctcatattgtataaacatactcattcaatactcatccatcaaggtgattctattattcccacagggaaccttttcatcatcacaattccatgtaaaatctcttacaaactactgaaattttcattctgatcttttataaataaaatttyatacctaataagtgaattcaaaaatgataaaatgcctatagtttaaaattaactttatattgcattgatgattatacaaatatatctcattatggttgatgttctctgtctatttgatcttttttgtaagtctctcaaggtagaaattatctaattaataatgcacacctcactgaattgagtaagtttacattctgagtcactaaggcaaacttctagaagagcctctaggattttcttttttaaacagaaatgcccctttaaaacatttctctgctctcatgtcttgccactggaatgcaatggaatgcattgtaaaaagatatatattttatagattagatgttggtgaagtttttagttgtcagattttactttgctataactttggaattggaactattacctttgttttattgcagtctaattagtaggacgggatgaggaagtatgaatctttatttttatcaaaaagccaagaaggtttttgtattggccattagctcagttgcttggaataatgtattagtcacctggaggtcataggcttatcacctggtggatgatagctttagtcctttctggagcacatctttgacatagcccctgtcagctctgtcaccagggaggcagggcaaggctataatggtggaagtacacattaattatctactttgaaaaagcaacttgaagtttagacttcgtgaccatagaattctaagaatttcgagttggaaggtaccttacggtcatgtgttcctgtccctccttttaaggatgatgaaattgacacacacataagctaagtgacttcccctagtttactagtagcatcacttggatttaaggccttacattttcttaacaaatgtgcagatacttcttgatttatgaagggattacatcccgataaacctatcataaatgaaaaaatattctaagtagaaatacttttaatacacctaacctaatgaaaattacaacctagcttattccaccttaaatatgttcagaacatttacattagcctacagttgggcaaagtcatctgacacaaggcctatttataataaagtgttgaatatctcatgcaatgtattgaatactgtattgaaagtgaaaaacaggatggctgtatgggtactctaaggacagttaatactgaatgtatatgacctttgcaccattgttaagtagaaaaattgcaagtcaatccatcataggttggggaccccatcggtactttagtcaggataggtcattgaaattcattctgagtattcatttgtttgtaggttagttaacttgttgatgtaatttgtacttgctgttagtttgtctggaatgactatttaccacagatcttcacattgacatatttcttccagtcatcctagttcctcctcagggaggtatcccctctagcactctgtatgacgttcctagatctaactgccattgcttgtggaacgtagactccatgaacatctcgttgtctttactgatctcagtatgcttagaacagtgtctacatttaatatatatttactgaacagttgaaagaatagataacgataggctttagaccttagtagtctactaatgatgtgcatctttagattgctataattgctttctcctaagctggagtacgatgcttagcgatggaagtcctactataattctgagcagctaattcttcagttgaagaatggactcggtcttatcgctgagtgagtaactccattgaattcttaggaagcagatttgtcatttcacagtgtccacagattctcatatgatttctcatttcactgtacatggaaaggatgatgccaaactttttttttcttttttttcgagacggagtctctctctgtcaccaggctggagtgcagtggcgtgatctcggctcactgcaatctccgcctcccgggttcaagtgattcccctgcctcagcctcccaagtagctgggaccacaggcacccaccaccatgcccggctaattttttgtgttttttagtagagacgaggttttaccctgttggccaggatgctctcgatctcctgacctcatgatctgcccgcctcagcctcccatagtgctgggattgcaggcgtgagccaccgcacctggcccaaacattttgttttatattgtcttgctagctgatggtcgtggttgatcctggctgtgtggaggctatgtggagggagggcttcaggagaagggactacttctggtgtggcagtcatccaggaattgaagacgatatctagctttactttggggaatacagaagtaatagattcattaaatgtatttaatgaatggattaattgaatcataaaaaagtaaaaatcatgttcatatgttacattgtctttctccaggaggacatacttcatttgtctgggaaggagcacagacattattgctttctgatattgtggcatatcttctgattgtcagcaatggcacaaagaagtgtgcttattgatagggttgataggagtggctcttcagccatgaatgtaactgcacagtagttcctgtgtacctaaatagaaggcaggcaagggagtggtgtggcttagagtttgggctctggagtcagactgcctggattgaaatcttggaactgtcattactggctgtgtgaacttggctaaattacataacacctcttaaagtattcttatttgtggagtcaataatagtgctttctttaaagaattgtgagggttaagagagagaatgcacacaaagcacataagcactctctggcgcatagagtggcactgagtgttagctattactattattaatgaatcaatgctagctccacacctttaacatgtgcctgttcagtactaatggcacgttagaacacatgatggggaactacattaaaggaagatcataatctttaaacttattcatgtgttatgttttgaaaagagaacttatgcctcaccagttgcagtgttggctgtgtggaagattccattatcaaaagactgaaattgaggagtaccaggaaaagtcaaggccctgaaatcttaagtcttaccagtttatttaacaagtgttccttggtagtttttacttgcagtaggaacattatatatttaatttcaggcaaatcaagaaaaaaaactttgtaagtcgaccttatgtagagacaaatgtttttgtttcacttttcccgccaaaacatgggttatagaaaagccattttaattacaaatgacaagataagtgaccagatgttcagtaaaatgttagaactacaaagtttttctttgaaaatgttacatcttgttcctacatgattttaaagattttaaatatttcattcattgttttcaaagcaaagagcatttgaaggagcttggtctgtgaaggggtcctgagagagttagaagaagttataaggattaagctatatttgaatttttctgttgggtgctgagaagaatacaatgataaggtccagatgatgcttccaaagggattataaggattgaataaaatactgtaaaaatagctttcatagaaaagtagaaagtgttagataatgaaagaaaaatagaaacagtgttctctgggagatattacttgcagctagagacctcaaggggagctttaaaaatgaactgatatttgaactaggcctagaaaaaaagtgaagttgataaatactaatacgcattggaggcacataagggaaaggcatcctcaacaaagtgacttgaatgtgcaaggactagaaatcagaggaataattatgggaagaaatcagaagaataaatatgggaagcagaaagtcatagtttatttcaccaagaatactagtcccaagagataacatgcacacagaggtttctatggtgaaattagttttggaaacattgggtactatatctgcctcctggaaatttttcaaacattacatattaaagattctgagcagtcttgtagtaaaaaaagtatttaatgttatttatgctagtttatttaattatgaaaccctctttttaagcaaaatacatagaaatgctatgaaacaattttttgccgatgcttattgggaaatgtaagcctgtaaaagtagatggagtcaaggtggtagagtgcctgaacgtcagagtgaagagtcagtgggtggatccatggaagctttctcatgaaagcttcccagataagtggatgagccatgatctggagactgtatgtgagatgggatggatcagagacctggaggagatttgtagggatgcatccaatagtaagtcttttttagcagactaagcctgaggtaatgttggtctaacctgggatagttgtggtagttgtagaagaaaagttatgaaaggaaaggagtagatggaattggggactattattctaagtgaagtaactcaggaatggaaaacaaaacatcatatgttctgattcatatgtgggagctaagctattaggatgcaaaggcataagaatgatacattagcctttggggactcggggaaaagggtgaggggttgtgagggataaaagactacacattggggccaggcacaccggctcacccctgtaatcccagcactttgggaggctgaggcaggcggatcaccaggtcaggagatcgagaccatcctggctaacatggtgaaaccccaactctactaaaaatacaaataattagctgggcatggtgacacatgcctatagtcccagctactcaggaggcagagacaggagaatcacttgaacccgggaggcggaggttgcagtgagccgagatcacgccactgcactccagcctggtaacagagcgagactccgtctcaaaaaaaaaaaaaaaaagactacacattgggtacagtgtacactgcttaggtgatggctgcaccaaaatctcaaaaatcaccgctaaagaacttattcatgtaatcaaacaccacctattccccaaaaacctattgaaataaaaaaaaaagaaaaaaaggaaaggaaaggaatatagctggcagttctttgatgttagttgtatgtggctgatacatggtttttagattcttaaatgtatttttttcacattttaacatatctaaaatcaggaagattttagcattagtgacagcatccttcattcttaacggtgcatgaagtcagatttactgaaatactgttgttaaggatgtttttgaggtaaagcaatacagtagcctgagagtgacttggggcttagcagtttctaacagtaagctcttcccttttctggaagagaagtgacactagaagagtatcctccagcctttgggccgaaggagatgctgatttggatcagagaaaaagggtgaatgaacatcagagccagaattccctcatgacttctgctgttcttcataggctttttgacctgtcagtaaaggagaaggaatccttctgaacttccacatcgcacttatttacttactagtctgattttatacgactgagaatagtgtaatttcaagcaaaatcttacttccttgagagatgtgggcttcagccttcatcttccagatattaacttgaccagatgagcaagcctgaacttcctgtctcaaaatgacttttccgcagccactattctttctctgcactatatctttatctgtagctgtaaaaattaacctttaaaacttttatttatttattaatgttttaagagacagggtctcactctatcacccagtctggagcgtagtgttgtgattataactcactgcagccttgaactccagggctcaagtgatcctcccacctcagcctcccaagtaactgggactacaggcacctgccagcatgcctggctaattttttttttttttttttactttttgtagggactaggtgtctctctgtgctgaccaggctgatcttgactcctggcctcaagcaatcctcctgcctttgtctcccaaagtgctgggattacaggtgtaagccaccacacccagccataataaacctttttttgcaccacatattatttgctatagttctcttaagagtcaattaatccatgttattttttattttttatgtactgtattttatttatttcttttctgagacagactcttgctctgtcacccaggctggagtgcagtggcgtgatcttggctcactgcagcctctgcctcctatgttcaagtgattctcctgcctcagcctcccgtgtagctgggattacaggcatgtaccacccctcctggctaagtattgtatttttagtagagatggggtttcactatcttggtcaggttggtcttgaactcctgacctcatgatccacccgcctctgcctcccaaagtgtgggactacaggtgtgagccactgcacctggccaatctatgttacttttgaaaaaagttcaaataaattgaaataagtctttactattatacattatgttcttatggtctaaagaactcaagaaatagttttaaaatcgagaacacacaaacacactcacactcacacatagaacctaaaacaaaactccccaaaacaaatatagattcaacaaaatactataaaaagccataaagcatattcagtatataatttttaaattgttctgacatatatgttgtttgtatacccgcacaaatgttactgtcattaaactaatgatcctattttcttcttctcaaaaaaagtcctagaaatctgtttgtgatggcttgatgaagtttagtcactttataaaaggttaagcttttaaaaacttttccttttttatttttagattgctaatgtggctaggtcatgagaagactctgaaaatagttttccttcattgctaatcgcagctgttgcattactaaccaatggtcagatcctgcattaagaacaagagactaaaattacaaatagtttcttctttttaaatcagagatgctggacttcccaaatttttgtcaggcagatatattcatgtgattttaggtgcttagaaaaagtttattcatggaaagagtttataattgctagagatagctgaacctattttaagatgactgtatgcccattttgagtttgaaccacatagactagggaatgaagaggagtcattttgaaaattttagcgttagctcagtatgtaccagtaactgaccaggttattatattagacatttcaacctcttcttcttttttttaatatttctaaacatcagaaatgctcaggttttttttttttttttttttttttttttgcgtccgtgaaatgttaaaaactattttgagttctttgggaaaaaagtgttctcccatgctgtaacaaatggaaccaataatgtgaaccttttgattacaaacaaagatcagactatttggaagggaaaaaaagaatatattggaaagtacatgggaatctaatgaagtccaaagatgaagtgaataataaacaagaagccatggagagctcaggaatgcagtctgacctctggaacaactagaaatgtgacacagaccccaatgatatcttcatctcacttacctatttctctttgtgtgttggctttttttcttctttttctccatgcagtagtatgaccattgagtttcctagtgattcagctttcacagtagttatatttgttgggagaaggtgggggagagtgagtttttactaattaaagataatgaaatcaatttacatatacccatgcatgtgcacacatgcagaaactaaaatattaaattcattccggaaataacaacaaaaataacatgctaaaaatgtgtgcatgaggaaaaataatgcatcatgaaaaattaaacataacctttcaacaacacactttgaaaatgcacaacacaaaaatacagttgtaggcagagggatctccctgaagaaatacaaagcagctctgttggctcctggttgctggccaggcctcttaggtggatgagcctttgtatgttgtttagcaatgtgtgtttcttatttgaatgggcctagcctcatgaatcatgaattgttagttcataagagtaaggtgttcttataagccaaaccaaaacattaacgaaacccaaatgctttttacaccagaaggattttaagaacacaattttagcttcttttagattgattgcggagcttgaagaaatattatttcatgataattccatcatttataatcaactcctctctgctgtttgtatgctgatccttgtaattctgggtaaaagagaacagcagtacattttgggtatattgtgtaaggtgggaagtggagaggtgttctcttgtgtagttactgagtccttccttcctgaaatgaatcgtaattctggaaaagtgaatacttgtgaagagtcgtcttgaatgatttgtaaaaaatcctgttcttatattcaacgagtttcgaatctttgtcagaggagtattaccattagattgaaaaaaaggaaaataaataataaacacttttaaaaaaactccccattctcttattctcacttttaggaaaagagactgactaatatcttctgccacaaataccgatgttcttaaaaatatttatgggactgcttttggcaaccagccctattttgttttcatatccctttttgctcccatctttccaaactcataaactcccaaattatattttccagttttattccacaaggtaagatttattttcccctaaaactttattgctttataattttaagataaaatattctaatacatttctttaccagttgatgtactaaaaatacagtgaatttttacttgtttataaatgacattaggaaaaatatatctgtcagatttgatcaatgttgattttaaacaacaatatggaaaagaatgattgtgttttttataagcaactagaagctaatgtaggaaagatgatattgatatttaagacatgctggcaaacaataacatataaatatcaagtaggctattttacctgggcacagaaggtctcttccaaataccaaaattgaatttcgtcattttatccagagttgaaattgattatactgagaataaccacttaatttctatctttatctgccactgttttttggttcaaatctaagctacatgttacactgttctccagatacactgtgtggctttttgtctatactgtccccaccactagaatgtccttcttcagctttagtttacaaaatctttcgtgatttattcttaatgctgtcattttcgtaagttcttcctgactgtaaatggcaaatgtaaaattcctgctgctctctaaatgctcacatcactttgcttgtactttctgttgtattaataattaccaccagttgcttgggttgtcattatttgtttctatgcccgggcttctccagggagctctaagcattctgagggcaatggcaaagtctcattcatcaaagcatgttccatatacctaaagtaaggtctaggatttagtgggtagtaattaaacatttattgattaaaaaccaacagttgattcacagattaaagaaggaaaaatagatattttagttttctgcttacaagaatttcaggcaaaattgtgcaaataattcagtttaccgccttgtgtttattttattgattaatttccctatgcatagaaaaaaggatcattccaagaattttaacctcattgagacaatttatattttttctttcaatttgattcagttatttgggatgactatttttctcgacacactatcgacaaagacaatgttccattcctttttggggaagaacaggtagctacattttaagcaaagtgcaaggtaggctgaatacactcgaaaaaagtttggaaatgtagtgatataaactcacaatatagtagatcttatacacattcagtgttacgcatgattattcgtttgctaggtgctaattgggctttagtactagacagctattatgaaggatttcctacctaactaaaccaacaccatgatcttccccaagaagaaagagttgatcttgggaagtttggaagcacagcttttggatcctttgttaccttcctttttggagggaagactttagaggaacagatactcttctcgctattattgcttaacagtttttttgttgggaacataaagagcatatgatcctcttcaaccccagaatcggtcttgccctggctccacaacactggcaatgagaggttcccagaacagcaagattattggaaatttaagttttaaacaggttctcagattggtttcctattgaatttccattctctgtcttttctttttttctttttctttttttttttttgagacggagtctcgctctgtcgcccaggctggagtggtgcagtggcgcaatctctgctcactgcaagctccgcctcccgggttaacgccattctcctgcctcagcctcagctgggactacaggtgcccgccaccatgcccggctaatttttttttgtatttttagtagagacggggtttcaccgtgttagccaggacggtctcgatctcctgacgtcgtgatccgcccgccttggtgtcccaaagtgctgggattacaggcgtgagccaccgcgcccggccgcattctctgtcttttcactttctaatatttaaaagaggcagctcaaggccacacttacccccttttagtgtccattttaatctttccktggtctgtagtgcacagatttagtagactccaatatttcaaataatggccccatgccccaagtgttttccttacagctctgtagacatcatgtggtaaaacaaaaacattaaaagcattcagaaaccaaacaaaacagaatagctttggtgttaccatttatacttcatttgaattactggatactagttctttgtagacatttggaggtttctccgtaaagtcctgataagaattttcagaaaaggaaggcatagctcttaggtgactgagtatattggggagtagtgtggattggtgacacaatagagtgctttacagagctagaggggatcattacagtgaagtatttctgagcaaggataggcatcaaaaatagggatggaaaaaaagaatgatatagacaagaaggtggttgagataatgtcagagacaccctaagcaacacttaaaatttggcagaggtgtgattttttcctcagtttcccccttgctgcttttagtagtgttctggtgctgaggaggaggctcaggatctggatacggtggacatatgcttatggtagatgctttaggacagtggttcacaacctttctggcaccaggaactggtttcatggaagacaatttttccccagatgagggtgagggattggggggctggtatggggaggacaccgttccacctcaggtcatcaggcattagttagattctcataaggagcttgcaacctagatccctcacatgtgcacttcataatagggttcacacttctatcagaatctaatgcctcagctgatctgacacacgaggcagagctcaggcagtatgctcattcagccagtgctcacctcctgctgtgcagccgggttcctaacaagccacagacatgtaccagtccatgacctgggggttagggacccctgctttaggacatgcagaacaagtttgtaatgaggactgcgacctctaggtcaagccacatttttcctaaaggtaacattttatttggagtatttggaattttgaggagtgcgagggtggggatggtttgaaggaactgtgattatgttaaaaattaacacctaatggattttagatggttagacctttgtaataaatggaattcataaagcctagcattggcaaaaatacatatcaattttttttgacgagatacagtgtctaatagaatgttagcgtccatctttgcatctaaaataatttaaaaacaaataaattcacttgcacctaggcatttttactttctctttcatctctctgtatatgggtgggaagtaatgtgatacattgcccagaatgtgaagagtgtgagaggaacacacacaaagtggttgccaagaatgtgtctgggaattagacacgaaaaggaccacgttcctttttcttctcataccacgtaagattccctgtggaattctgcttgttcctcagggaggaaaagcaaaccatgagttcctggcaatattattggctatgagaaagttaaggaagagatactgagtgacaaaaataccatgatgatcgaacaaattttcttgttattaagcaaatcaaaatggaaggcccacctttattggctaattattatatgttagtgaagtcagaatgatttataatagtgatagacccagaaagaacctttaatgatatgcaaacacattagttttcttgtattaaagtgatctgtacctgttgacattattaaatgactcccatgctttccattctaacatgattgcttttgaatttgcattattaaccattatagtttttctatgtacaaatggtgtataaacttctctttggaggtgctgatatttaatggcctattcttgggaaaggttgcagggagaatattatgatccatagggcaattttgaaattacaattagtactctgttgtcttcctaggcatgactttcatagtggcttatcttgtcctggtattttaacttcttggctctcttattcctcacacataccgtgtatctttaatacttgaccacttgttaaaactaatgagattgttttgaaaacgtaaatgttagctcaagaaaaaaaaggaattactttccaaggcacgtcagagtactatataaaaaaaggggaaaatacagactttagataaaatgtcctactttacagtatatatatatacacataaaattatatagataattatctgagataactataattatatagtgatattacctatataattataattttataattattatatctatataattttattatatataattattatatccataaaattatgtgtatagcacaacaccaacagtagatctggttttaaacctgagttagtttagctcttcaccgactcttacccagactattgctatcacatcttcaaattttgtttttgtctctgtggatggccttctgcaatctatcctgtatactattgttaatgtgttaaaacacagatctcactgatgtacctcattacaaggcaatacaggatactcagcatggaataaaagccagttgttattgagtgttgtttgcctctccagttcttttttttttttttttttaagatggagtctggctctttcacccaagctggactgcagtggcgtgatctcggctcactgcaagctctgactcccgggttcacgccattctcctgcctcagccctcccgagtagctgggactacaggcgccagccaccacacccggctaattttttttttttgtatttttagtagagactgggtttcaccgtgttagccaggatggtctcgatctcctgacctcgtgatccgcctgcctccgcctcccaaagtgctgggattacaggtgtgagccaccgtgcccggccacctctccagttcttatcttagtattccaccttcaacttgatcctgcccatcaacaaagttaatgctgcattaatcgttaatcatgctgcttttgtactttttttgtgtgtgtggtggtcgtcattcttgttgcaaaaattagttaatatgtcagatcttctgtgaagtcttttttgaccatccacccaagtataagtacttattaaccatgtatcctattgctgcctgtacacatggcatatatttctcatactgtaattatgtacttatatttctgtagtcctgtttaggacaggcacttttcatctctgtattccccagattgagtgtagtactgatacttcactacatgtttattgaattaaattctttactgttaactaggtttagtgagctctgatgtcacctacaaatatattatcagccccaaacatttaatctcaaccatcaaaaatttagcacaaccaccatttttatcgtatatataggaatggaatttttttttaaattttcagttattttgaatagtaatttatttaagccttcctatgtgtcatggaccctgctggtttcaaacagattactgtgattgagtgaataaacatcaagaatcttttatagagggatttaatattattgtaatcataacgctggttggattagggtttgtttatcatgccattatcttcaacaaggctcatctgctgcctcttggattcagatgctgctcagtggctccagcctgttctctctgaagagaggagaacttaacaaatggacattatcctcaagagtcatctctgccagagggctttgtggaagtgatttgtgagaataattttttttttttttttctcactgcatatctcaaatggcatgtttttcaccactgaaaataggaagacagttcttttgtgtttattaaaaataatagctaacttattcattaaaagaaaaagcattcttaattgtggcaatggttttgtggctttggacattaagaacaagttaaatttttatatgattcctcatccagatttttctcaagattaaaaactaagattcctagagaaaaacatttttttctttcaattttcacatagaattcttgccgttggagaattctgagatcgttgggaggaactttgtacagtgatctgtagacaatagctcttgactgtctgtgttttctgccaggttgtgtgtgattttgtaatacttccctagtctaggccgtatgcttctgaagagtccctgccatttcttcattccgcgatgtcattaagacccctgttgcttttatttgaaaagtatacaagctttggaatcggataacatgtttcagttcaccaattaatagctgtctgaccttggccaaatcaatgaactgttctttaaagcagttttctgaggtgtaaaatgagaactttttcattgaccttgtttgtaaatattaaatgaaattgaatgtttatagtaaataaaatgttaacattttatatcaagtgaaaaaatggaaattaatattcataaatattaaataatataaaacttaaacacttgtaaatattaagtgaaagtaccacctacagtctgaacacataatatgtgacttaataaaaccgtttaggttactttatgaagcaagcatttggtttcacatattctgtgtaccacacttagtaaagcttagcaatggcatcgttacattagatcaactggacagaacaataaaagaacaaatctcctccagaagataaggttttacaaataagtagtggcaaggcaatccaacttctcacctatttgattcattttttaaaaatttaggtgaatgatatacaatagctgctctctttaaatttttttcactctgargttatttcagttgtgcatactaccaaaaaatatttaaaaaatcaaatcggctgacagaggcaacttgaataattaaacattgcagggtggtgtgcaacagggaaagaactgccgcactaggaagaaggggtcccgcgatggagacgctcatcatttactatgagtctgagaaactcagttaaccttagagaatctggggtgtgaaaggaggctatgatacctttcctacctggagatagggagctgattcaggtaaaatcttgacattccttcaggttctgaaactctaatactaggagttggagaaaatgtggactttttctgtgagtatctatttactattataagtatatttaggatgaataggattgtgccttagagtttggggagtatcacagggaatttgttgctctactcagtccttcttaagggctgaatgaatctacttttatttttctcccagttgtgacccatgagctatcagaatcccagtactatagtttctcttttcttttagtgatttattaactactgttagtctttttttaatagggttattaaggtcaattaaatagtaaggaaagagaaaacttaagtagacattggtttgagtaagaaaaaggcaacagaaataaaaccatgttttgaaaagttgggtcagtataggaaggtaatccttataaagtgatcattctaggtaggcatcacatttatacacccgtggacttcttactaaactgacctagattgtggtgacctgtgcttaaatgattcttaaagtcattctcaattccgatttccagtggttatgttacattcaatagggtgtagcctttggaaagatctaatttctcaaatgtgccgtgccattccatctgaatagtccagtgatttcaaagacaccacggaggaataccattgatatcacagaagtcctgtcctttcttaagatgaagagtatgaaaaatatccaagcagatgcagagaggccatctgtcttgagactctagaggacattcctatactgggtggagaattgtactaagtgggcttgggagtctttcgcaactcctcacatttgatttttttttttcattttaaataaatgatcatttagaataagtagagctctgcgttttccttgaaaagtaggatggaattcatgaaagggaccagcgaatgttctcttatgccctggtctgtgcagtactctatgcagacagacacttgacagatacccttgatatttcctttctcttcctttgtgggattgctttgaactctgtaggagacagtttagaatataattgccttgtcctgctttagggatatgtaggcgggcttaaatacagatattctcaaatagctggttctagtaaactaaatgcccttcctgaggaaatatatgggttgtagatgctgaaataaactaggttaaaaatatttattacacaaaagagatgctaactgaaagaggcacacatccttgttctcccaacagtttctcacttgtaaatggcatctctaaagggttgtccaaattcctagtgtgggcatgtagagtagacagctgagtcacagctgctgaaatgagaccatgcctccctcccgctcgtgaagggaagaaatagggagaaaggagtgcaagagaattagtgccaacagcttacttaaaattcactggcttgagaagtctatgagattcctgggccaaccggaagccattactctaccacgtggagtgtctgaagcatgaaatctgcctttccttagagaactcttatcattggccatagtttgtacaaaaatgtatcttctttctgcagagatctttcctgtattgcaggaatgctagtgttctctggcctatcatatgaggctgctggcctaccattctagtttgcattttcgacttggtgatacctggccagcwtgttggctttctcctgaagtttgatgtttctcttccccttgcagtacatatttgaaaagaagtttggaactgccagctttgcttggatttgaactatggcttggtgccttactagcaatgagaccttgaacaaattactcaagctctctctaccttagtttcctcatcaataaaatgggaatgataataatgcccaactttttaggttgttgtggggattaaataaattgtttcatattaatgtaccccccaccaaggtgtggggattaaatgaattgttcagattgcttagaacattgcctggcttgtcgccactctgccatcaatggctgctgaatatcctgtattggaagtagcattgaagatgattggaaagagatattaatttaccagcaaattaacactccatctcatagaaagagcactaataaattaagatctgctccatatcaccattactaatattgttttagaattttttatggatttaaataattttacacacatacagaggaaaacaaacagtattatttagacattatgaatttatacttagaaggcccagtagcatcaattgtaaaattactagatttagatcattagcaaaatatttgagactgcaaattttcaaaaagaggtgacttttccaaatatcatcaataaattataagaaagtataatgtgggaaaggctagaaataaatataaaccaaaatattagcacttactacttctggtttttgggaatatatgtgatcttttaaataaatttaaaaagccctattgtttacgtagtatttactgtgtgctgtgaactgtgttaagtaatttttgtattttaaaaatarctattggctttacacttcatttgtgttctgaccaaatattttcattagtcccctttgagatccataaagcctttctgagttttgtgaatgtaatgcagctaaagattataattgtaaaactgcattccaaatggcacgtattgtaatttgctgctacttatatctgcttgaagctgtcaatatgtagagaatagatttgatcattgaactgaagtaaaactgctctcaatttaggagtgaaaaattttaaggccccacctactttctctctgggaaaagatgtttctgttttctgtgtgtgtttatattttctctatttaatgtagatagtaatgttgactagtttacatctgacttttcttccaggtaacattgagatttagaaaaagtacaatatggctggcaccctgagtttttggagagcttaactttgtgtccgaaatgcttaagaagaggagtgtgttcatttgctgtggttgtgattatgattataaacttaaggctggtaggccgggtgtggtggttcatgcctgtaatcccagtactttgagaggctgaggtgagtgaatcgcatgagctcagaagttcgagactagcctgggcagcatggcagcaccctgtctctacaaaaaaatacaaaaattagccaggcgtcgtggcatgcacctatagtcccaggtactcaggagtctgaggcaggaggatcacttgagctccagaggttgaggctgcagtgagccaagatcgtgccactgcacttcagtctgggcgacagaacaaagaccccatctcaaaaagaaaataaacaaacaaacgtaaggctggtaaggaagttttgccactgaaggcccagcctcagccaagttagtgattgggcaggaagtcagctctcaccctcacttaccctgcagttcccctcccctgtgacttctacaccagtattttatagtactataaagttttctttgactcacacagttctcacttcacccttggagatgcagttaatgccgttgagtcagattcagtagactttcactcattatgctgttagggtctttaaagaaatcacagatactccaatttaggactgcctgttgtggaggttaccacagcccgatgcaaggccacatgacaaatcattcatagtgatttttaatgttttggtagaaataatatttcttgaaaacatgactatgttattgccaatatctgcccagcaaaaagtagtttttgtctcttttacaatatgctcagaatatatgaaaaacaaatcttcatatgaaacatagtcaatcctttttatagattgttaaaggggactgagggtgaactgcagaatcctataaattggatgattctcgttttgtgggtatatttacttgttgagctgatcgcagcagggagagggtgcacatatttccttctagatacagcagtccttcactggttggaggttaaaagctgttgaaaaataacccgaatgcatttcatgaaagaatcttagacaaatacaattacttggaatatcagctaattgcttgctctataccatgattttcatgtcttacttcctccagcctgacttcctccatgtaccttcttggtctgagtaaaatctatggtaataaccaaatcgtagactaaaattaatcataatggtgagggctaaaaggaggggttaggaaaggacttgaccctggatggtattttcttatttttcttagtacatttaacatgtgtattagtccattttcacgctgctgataaagacatacctgaaactgggcaatttacaaaagaaagaggtttaatggacttacagttccacatggctggggaggcctcataatcatggcataaggcaaggaggagcaagtcacatcttatgtggaatggcagcgggcaaaaagagcttgtgcaggaaaacgcccccttttaataacaactacaacagcatgggaaaatcctgcctccatgattcaattacctcccatcggccccctcccacaacacctgggaattcaaaatgagatttggttggggacacagccaaaccatatcaacatgtaactttacaagttgattgtattgtagaccactaattgaaaatgctatttctaggaacagactttattttactaatgccaggctatgagtaaaaatgttgaattaaataatgttatgagtaatagtagctaggtagtcacagtcatagttcaagcatttcataatgaaaatatacatatttacatcttctggcaaagttataaacccatcccttccagataaagcagcatcagaaatacttatgatgtgtctacctctattatacctaatctattttgcattctgattttatcttcagaaaaggcctgcagttactgaaatgacaagtgaaaaggaggtaagttatgtaattagatgtcaggagaataataggaagttatagccatgttttagataagtttattgttggctgacttaaaatgctattggtgtaatcaatcttttcttggatagcttatcataaaatgttgcttcccataagtagtttccctgtgtttattttcttaatccactaaattgctagctgaaacagttcgtggctaggaagggacacttttatgtcacatatctcctatgacactgtcttctttccatttttgtaattgattcaacatctctttacctctgtaacatatttggatctttttattctgtcagcatttggccaaataattgctagatcctatgttgtttcttaaaatatgctttgtcttaatcaattgttgagtatttagattctccacatgaattgactatcatgatatcttactattattcattagtccaaagtttgagggtatatttgcaagccattttgctctcagtgcccttcaagtctgttctttcaattttttcctatagccattgggttcatctaaaaagacccatagacattttgcttttgcttctagcagtattggtagccttagcttgtatttgtaggactcaggactaaacatatgccaacaatttatgtagggtagaagtgaaaatgctggattatagggcaagtatattaacaactttggtaaatgaaaccaagttgccctcaaagtaccagttgtcctgttgttatctcctctatgatcaatactacatattgtcaatcctttgcttttttgcaaatgatatagacaaactcttcatttttgttgcaatttgcccttactcgaatagtgaagctgagagatttttcctgtttattggaacattaattaggggtagtttttktttgtttgtttgtttgagagagtcttgctctgtcgctcaggctggagtgcaatggcacgatctcggctcactgtaacctccgcctcctgggttcaagctattctcctgcctcagcctcctgagtagctgggattacaggcgccygccaccacgcccaactatttcttgtatttttagtagagatggggtttcaccatgttggccaggctggtctcgaactcctgacctcaggtgatccgtctgccttggcctctcaaagtgctgggattacaggcgtgagccactgtgcccagccaggatagttttatttttaataattacttgccaggatgtccgtgtcagaaacacattgtaataatttattttatctatttttagtgacttgaatatttcaaaatataaggtatggcttgagatgagaagtgagtcatgaaagctataatactacagagaagataccagacttcaaatgctatcttcatactgctagtgctttaatctattatgcaaatcatatttgccagctttcttcccccatacttgaaatttaaaaacttcttggtttttatattttattctgaagaactgtgttcacctttttaataaaccttacaatttgatagattaaaacttggtcattatgttttagagcaagggctggagggaaaattgaaagaatgttgaataaatgagttttataatactttagtgaatcattttttctttcttcttcttcttcttcttcttttttttttttttttttttttgatagggtcttgctctgtccatcaggctggagtacagttgcacaatagctcactgcagtctcaaattcctgggctcaagatatcttcccgcctcagcctcccaagtagctgggactacaggtgtatgccactcctcctggctaatttttagaaatttttgtagacatggggatctcgctttgttgcccaggctggtcttgaactcttaggctcaagaaatctaacccctctgtcttcccaaagtgctgggattactggtatgagccactgtgccaggccccaatcatctaactctgatgagatcagaatatttcaagtttggagatcttctcatatgtactgttcttaggaaccacgaacttctgatatactagagtttgaagcaaaagaaggttcacttcttatctccattaaattattgcctgtgggttggacaagcttgatctagatgttttcctaactaaaatactaactaatgatgacttaaatgtacacagcacttagcttctaatatcataggatattgtggagaaattttcaaattaattgacacacgtttctaagtagtagttggaagcagaaattggagggagtccaaatagtttctttgttggtatagaaatgaacacacacacacaaacctgaatcttggtgagatccaatgtaaaatttcattcactattcccccctttaacactgtctttgttaggttagaatggccattgacttacatgtcacttaaatgtctgtgcaaagcagtgctttttgctgcttgggaaatctttatgtggtgattccactaaatggtaaccatatgcactcaactgagggaggaaatttgaggagaaagttactgtgattcaggtttcagcattgatttggttagaagttgacacctttaawgattatcttaaaagtttcactaaaacttcccttaaaacccagagtgctgtctttatgagaaagggagcaaaggtccccgacatccagggttctgatgtcagtcaacattaacaaaatgatttgcttgtgtttgtgtgagtggcttgtttgctctggaccagacagaaggctaaactgtcattaaattatgcttagaatgagaagaactggttaatgtatccaatagcaatagttaatatactggttgtaatgaggatgatatccaattatctattctaaccaaagaaaatgacagaaaaaaaccatcattctttagtcttaagaattgtgttttaagaagtttgaaaaacccaaacattggcccatatgccttctatgttaacctagtctagaaacattttgatatgcaagggggttaatattaatgaaaaatataggaagataaagttttatatatataattattattattatttttgagatggggtctcactctgccacccaggctggagtgcagtggtatgatcatggcttactgcagccttgacctcccaggctcaagtaatcagcctctcgggtagctgagactatagtcacgttccaccatgcttggctaatttttttttatttattttttgtagaggtgggttctccctatgttgcccagggtagtctccaactctgggctcaagtgatcctccttaaaaaagtgttctttttttttgttttttgatttcaagatgcattttaattatttacataaattaattggttatctattttcttgaagtgtatttcaaagtcctacaaaacttaattgttgacctccttaaaatgtagttgagtatacttaaatttcctttgccaatctgaagtaaaactttaaattcaaaccctcaaagcaggtctttgcccttcctctaggaggttgggtcacggaattctgttttacgtcccttcataaaaaaaaagaaaaatgatctctctcccatcatgcttgagctaagtcaggagcaactgctgaaataagccagtgtgtgtctcatatgggtgaagtggagcccaccagtaatcagtaatctctccaggagaaacaaaacaaaacaaaacaaagatatgtttaaatgtgagcttgggtggtttccagttttaccaaaatgtaaatatggcttcagttgagaattttatttttcagtacatttactctctgttgctttgttcgatgaatttctctagattgtgtatctaacactaagtgaaaaagaccttttactggaatagttaaaagtataaaaaataggaaaagaaacttgggtaaatatactcactaatgatctttgggaaaacacctggtttattatcctacagtttgtgcaagggctactgcaaaaatagtccraacaaaattgcttttaatgttttcaaagatagaaaattcactggtttatacatgctttagggggaggtgaggtgaaaagggaaggttgccaagcaagagtgatagtatagtgttaatgatcatataaattttcagccttaagtcaccctatttaaataaaattatttgtagaaattttagttaattagctaggcttttatagctttttctattaaagaccctttcctgtcagtgatatcagggatgcctgagagacgttgatatattatatggttcaaagtttaccacatgtctattctcataggatgcagcatcatcatgctaccaaatggatggaatggggaataccttctcttgaggttgtgcccattggaggcagctgtactggataattctgaaaatggctaatcctgcctcacttttaggagacacttaatgtagtgtttaagagtaaagaacccatagtgcctaggttcagcccctggctctggtactttcttgctctgtgactcttggcaagtttcattttttcttctttggggtacttttcactaacatgttccttttacattttcaaaacctcttttcatctgtgaaatcatttctatgggtatttggcatgtaattaattacccattagctccaataatgaggttggatgaagtcacatacttattggcagagctgcccaggtctcagaggcttatttttgaattccaacttgtacctgagagctaaaaattaggtaagatttggattgatcacacttcgggatcccytgctacaatggatatgcggttacctgtatttaaaacaaagaactgatgacctttttccttttaatagctgattccttgatttacctaactattcttcattttatttcatttatggaaagagcactgaactagtgaagcatagtaggagataacttgcacgcatgtatgcatgtatatgctagggcatgaggtatttcccactgtggtcttacaagcttgaagcatttggacggaaggcccttgaaagtgtctctagttctcaccttttctagtctcactttattactcatactgcttgccagccaaacaactgatttggtttcagatgtagcactatcattctccatttctggttcagttgcttggctgtggctcaccgctactcctcttaatatgtgagaaagaaaatatggaggtgatgcagaagttaaaggttcttggttgtaagcttttaaccagactatgttctgcctatggtttaagatcagagtgatctaaaccaagggctggtgaactttgggccaaattcagactgtggcctgttttgtgaatagaattttattcaagtacagccatagctatgcccatttgttaggtattctttgtggcttcttgatactatgacaagagttttgtagttatgacaaaaatggcatggcccacaaaactggaaacatttactaacttgctttttgtacatgaagtttgctgactcctacgctaaaggaaggtatttcctgactgtttgaaagtatatatgatgagtgttcaggtaaaactggttttggcaatatggtaatattgccttcgtataaactatttttagtctttctgtgtatattagatggaaaccatatttctctttttgttaagggcttagctgttaaatatgtgcatctgtatagcatatagagaataaactgggaagaataaaacatgaaaaaataaggatgcttttttaaccaaaaaaaaaactgtgttgggtgttaggagcttgacatgcattatgactaatcctaacaccactgtgctataactgttattattttgatcgtactggggaggaaattgaagctaaaagaggtaaaatatgaaagctatttatgtatttagccattactccaggctgtgtctagatatattgtctctcttctattacctgcgtggatgatgtatggcccatacttaaaattcttaagccttattcatagatgtataagggattttaatgttgtttctctgtaaagatgaagggggtggaactgaacttgttattccattctggataattcagtcttattgaagattgtttatttagttggagtggagcatctgcttcgaataatatacagtttgaatagaagtcttactagctaaataatcttggattatatgaacatgtattcttggctagagatggaactcaagggatgaacaattagataagtaacaattgtgtttgaagtgagttcttctgtcatcattaagagttatttctacctatcaataaataatgggtttggatttcctgaaatgtgtctctagttgtttttccttaatgaaggagttagacctaaataatattttcacaccctaattaactacaagcagggcaaaggatactttcaggatctcaagtgattattatttaaagaactcctattcataaattttctgttttcttctagtagatcctctttggtaatgaaccagagcaatatattatgaccagtgactcataaatatgcccttaaaaccatttgttacttgtatctacttggaatttttcctattttaatttcagtacttaaattggaaaacaaaagtgttgcttatcattagagcaggtataaagtacctaaatatttatcacggtatgccagtttttattttgtaccttcagtattcccagaagtgtagcgttaaaaggaaaaaaaatgattcgcatatcccagtatatttcagaggaaataggaactttatttaaaagcattaatttctggctgggcgcagtggctcacgcctgtaatcccagcacactgggaggccaagacgggtggatcacgaggtcaagagattgagaccatcctggccccacatggtgaaaccccgtctctactaaaaatacaaaaattagatgggcatggtggcacgagtcccagctactcaggggaggctgaggcaggaggatcgcttaaacctggaaggcagaggttgctgtgagccgagatcgcgccactgcactctagcctgggcgacagagtgagactccatctctaaacaaaaacaaaaacaaaaacaaacaaacaaataaaaccattaatttctatacttctgtaaggtgtttttctgggaataaactgtattactcagattatcaatagaactgcatttaagatatttagtaattttcattctttttacaatttttgtgaaatatattggcttttttgtaatgaattttgtagatcatatcaacaaatttatatcatggtttctgattagcatagatagatgacaaagttagcttaactcagtattgcatgtgtcctaatgtgacatgtattaatctttctctgtgtcctgaatggaagaaagatcattccaagttgataatcacttacatgagcaaagttatgtatcacagcttaattcacaattggagaaggttaatttgtccatttttgaggatcatcaagcagctttactaaggatattgtattttccaacttattttgtcttggactttctttttacttgaaaaaactatatatattccaaaaatttaagaaaatgcttcatatcttcagctaaataaagcttgttctttacaaacagtaaagaaccatgaaagataattctatttgtttcttgctactgtactcagtcagaaaattaagaatctagaggtgccatggaggggagagtgtggaagatcytaggacaataatcttttaaaagaatgtccttcatggctctccagtgatctacgacttttcatttttcttcagttcaactttgtttaaattaacgtgaccccaggttttattgaaaagtttgacttcagaaaggacttaaatttagtattcattttttcctgattctacagaaaatgtctctggttccgtgttctctcatagagcttttaccctctgtttaaataagcactcaagaatctaaatgctagatgtttaggcaatatagttttggggtcaggggtacttacttttctttcctttttatgtttaatctttttggtgtctaatactacttagtaccacatttttcaccgagcagtttcggagtaaaaagatattctggcaagttcatatcagcttgatttttattttcagatgaacaggttgccaaccccttaagtggcttgctatcatagaaacagaccatttcggtgatagatctgtcccttagttgattgattggcgtagaggaattagcagtctgtgaaatgctcttcagaagtaattttcctccaaaggtcaaggaactgtggtcaccatttctctggcatgatttgcagctactcattgtagccttattaccagtagcaaatgaaacagctgaaatggaatgtttccttgctcatttttctttccctctgcctaactaaatttcttgaacaccagtttggtattacctctttctgttctgccatctgccatccagctcagtgaaactttaaattcataaggtatgttttaatttatgaattaggagcttgctatgacatttctctttttaaatagatttatgtaatactatacataaagatgtcttgaactcaagaacatgtattgaggaccacgtatgatagaggacttggtgtttaggcctttctagtgagtcctaaatggtcaataggaactgtatatgatggaattagttcaggatatattatgcgctctctgttacaaggttgaaacaaattattttcctctgtttccctctattcctcttttaactcaacatgggttattaccatttttttaatgtggcttgaattgcctcatactcttggataaaatcttttaaagattttaatacagctgtagaacaaactctaaactcctttttctgacatctaaaacttttcgtatttactttcatttcttcctagtttcctatgtattctggatgctcattatacagagttatttgaaatttcacaacatatgatgttcctttagagttatatgcctttgatcttgcttttcctctagttttattcccatttccattctggctttgctctgtttggtatatccttcctcatattcactatgagtaactcattgaaaccttccctaaccaaccctggtgtgggtagccaattctttaatgttctgtggaattttcatcatattattatcccgcataacacattgtatttattttaatatatatgtctcccatagtttgtctcatttatcagtccagttatttttgcatttcctatcatctactccagtatactgtatttgcccttaaccttgaaatacaaaattctttacaaaaaaatttgtaaaagttttattagtatgctatattttatgcctcttggattagaccttgttgtaaattagaaattaaaaattatttaaaaagctttcttattactcaagtcaagtagaccagtaatgattttcaagactcctttgacaaatttcagatagggaagggatgtgcaacaaatagcaagcattgacccacttattttgtacagctactcctagttgttrttgctaatcagaatcctgtagtctaaaattaacagtggctatgaaggagagcaattaaggccatttgtctytcaaatgagtcaatgtgggtcccactggtagtttaaatttatatacagagggcactcacactattataaagggtaatgggggccctgaaggcctgtgttacaaagcagtaaattattttagagtttgatagcaaattatattttgagaaaaactttcctcttgctatgtgaagatacatttcctagcaacctattttcattggttaattttaaattaaaaagtacatcttttttaatgagagcatttataaaaggtctattttaagcatatttaaaagacaatattaaggttttgagttctcgagtttggttgttttataggattgctgtagtcataagagtgattcaagaatacactcaacatattctccttttggaaaagatttcagagcttgtagtgccaccatgacatctctgatgtctcctgctttgcctgtgacactgacccctccctgtcattggtgagcagtgtaactttcacttatactcagattgccaaacttttgatgaggaaagtaaattccttttttttacagagaagaatttacagcactggagtttactactccttagtctgttgcttggtcagagaattcactgagtttctgcacagagatccctatggaaactgaacaaatacactatttgaaaggagacaggttattggtttttctcattaaacccactgctggattttcgttagttctaatgcattttctttcaagatgagacatataggccagttcttattttcatgatttgaataaactaaatatgttgagtcgtgtgtgcctgtacacatcgcctaagaagcaaaaataatccttctacttttgcaatacaattacccctgaaaattacgccagaaaaaccatgactgatgcaaatggggaatgctacccccgtttaaaaagaccaagttattaaataaagtgggaacggtgaaagtgattataggctaatctgattggttttatgcttgagtcacccccaaccttttaaatcataattgtgtatgaaagtaatctaaataaagcatgaaagatatcacagacctcaaacactttagaccctaaaaagctttatgtttcattggctattatgagatttcaaagagttcttttaaagcaaagatgttagtaaaacttaaattatttcaccttcttgaacttgcattgtagaggaagacaactttcactcttattcttcctctacttctcaccactaaagttactaaaaacgatttagactccaggtggtttgtgaggcaggagaatagggtccggaggcagggaacctaaggctgattcacctgacgtcctagaactaaatagaaaggaaaaccccaactttccaggccttagtaacagaaggaccacagcgtactccctttgcaaacttccttgttttctgagtggtgatggaaaattgaaagtacctctgattggttgcagaaagtactgtaaaatgttgattgcgggccaccacttcatttacatgaggtgaacaccaagtggccaatcggaaacctctagggaggtatttggacctgagaagattccgtactgttcccttgagctgctgctcgcgcactcccacagtgtggagtgtactttcattttcagtaaatctctgctttcgttacttcattctttcctcgctttggtgtggattttgtccaattctttgttcaagacgccaagaacctggacaacttgcagtcaagatcctctaccactaacactttgtatatttcaagaaagcctgacttatgcatgtatctattatttttaataattcaaaatctgtgcctcagtcttccttctgggtctcaaatgggcttctttttcaaacagaaagtactgatagacatttatttttctgtgaaaatttaaagagaatagtgataaacaggagtaccatttattattaagattgtgagtaacattatatatatcaatataacatttccttctccagaactttcgttatgtttggaaaatctgtttagaatgtaacagtagtcttcttttctcctaggtggctgtacttttgatgatggtccaggggcctgtgattaccaccaggatctgtatgatgactttgaatgggtgcatgttagtgctcaagagcctcattatctaccacccgagatgccccaaggtgagagtcactctgtttagtcagtgttgggggaatagttttgcagtatctatgattttcttatttaaagtgtaacaacaataatttaatggttataataagctaaattattgtgctactggatcacttctaagagccttattctttgcctttcccttaataactttctgtaattctgtattccttgttgtctttgaaaaaaaaaagataagtattagtgtttttttctatttaataaaaacccaagtgacaaaccaaaaatcaaaaaataaaagaaaaaacagaataaacaaaaaaaaatcctttycaaaaaattctcaaatgtgggatcagctcttttcgtagttattcaattaaattgtatatgttggatcsaatcagactgaagggaaagaattttattacattgtaaggagagaggttgtgtctttctcccagtggtcatgagcatgccagtgactctgaggggaggcagtgtggagacaaaagtatcaaatggagatcttttatgtgggaattatagagaaatagggccagatctgttcttttgttgttgttgttgttttttgatatggagtctcactctgtcacccaggctggaatgcagtggcctgatctctgctcactgcgatctctgcctcccaggttcaagtgattcccctgccttagcctcctgagtagctgggactacaggcgtgcactgccacgcccagctaatttttgtatttttagtggaggyggggtttcactgtgttggtcaggctggtctcgaactcctgacctcgtgatccgcccgcctcggcctcccaaactgctgggattacaagcgtgagccaccgcgcccagcatcttttcgttttttaccttactttgttatatcctttgattttgggttttgggagataatataatttataattgtttaaaacagtgtgcattatgtttcatcttaggaaaaacacattaacataggatgtcaatatttacataccatttcatacaatattggactaatagttgtgctttcaattctgcatattaatctggagcaaattccaagttctgtgcgtatatgcttagcaataacattaaattgtgacattaamatgtaaacaggaatttaaaaatacaacatgaaagagaacaaactcttttccttccaatatttagaaagaaacaaaaatagtacataattatatattatatatagttatgtatatataatatattatcattatgctattataatatataatataattaatgtgctgattgcttagtactaataatttaggtttcaaagtatatttagtatttttattatgattaaaaatggtttagaattaatttttctacaaaaagagtaagtccttcttgagtgtgaattttagatatgacaattttagacatagccattagaaatgaaaatgttaattctgcttattgaagagagaaaattctatcagcagcatccctgaacttgctgatcaatgtgatttaaaaaaaaaagtgaaaacatcaacaataaacaatttatcacaagcacacaaagtaaataaaacctaaaagttacatttctaaatgtaatttttagtttgtaaatgaatatggtaaatatttccttgaaaaattttgtgttggttcccccgtgatgtgtacttttrtaatagaatgaattaaatttgctttttactctgaattgtcactctccgtgattgagtaggaaatggttatttttgaggctgaactgagccataatttcctttgcagagggaaaactggaactgtgtggttgacactctttgtttcttatatttgacccctactttgtcagcagactcatttaattttgtgcgtagatttgtattttttctttcaaaggtatgtaaccttattttcctggtgcattttaattaaactactgtaatttttcacctgaattttctctgtggtatatttagactaaacttttcatataaaattaaaggatgtgggtgggctgggatgcacacattttgaatgtttatcatcatagaataataagaaagatgttgatttatggaaatgttaccattgctaattaccattgatggtgggtaatgaatagttgaagaattactgctcagatgaccttgttggctcacctttgatgaacagcttaatcggtggttacagtacaggatgatatgcacagaaaatgaaagcatttgaaattcagccatatcttccaattaataggacattaagtaattaatcatgcagaggagggaaaaaggtcacggccactttgccgaatgaaacagtgtttagtcttcagagaggtgagagaaagcactcatgtatgttattcttttagtcatctctttttataatagatactatttttttcattttccttctgatattcctttaaagtgctgactgaatattccttgctcataaattggtgtaaaggagacatttagatttttcatgctaaaatgttatgatctttttattgtcacataaattagcaagcatgcttattttctttatgtactttaaaaacacaaacaaaaacaaaacaaacaaaaaaccccaaatgtttgggaactctataaaagctggctctccaaacctaacttgttattgaactgtgtgatacttggtgctattaactggcttctgtttattaactttttggactgaaagccaagagtgagagaaaaaaggatgaataaatagattagaatgaaagaagactgaagatagatagtagagaataataaaaaaaattgtttctattcatgaggagatacagtaccatcaatcattgcttaaaatgttctgtagcagttcctacttactacttactacacagttccacatactagtttggtcagattacaatgatgatgactgaaaggtctgccaaatagaataaaaaatagcatgcagaagaatgagtacttcataagacagttctagtgtccccaaatcatatgaaattatgaacacctacttaactcagtcatcaaagaaatgcatatttaaaacacagtgagaaactactgtacaatcagtggaaaaatgaaaattttaattccaagtgttggtaagaatgtagaataagtaaaaccctctaatactactgttggagcataaatctgtacaaccttgtgaccagcaaatccattcttgggtataagcccagcaggactgagtatgcatgttcaccaaaagacatgtgcaagaatgttgatagcatcagcattcataatagttccaagctaaaaacaacccaaatgtctgtcagcagtgcaatgtataaataaatggtggcatattcataaagtgaaatattgtactgcaaataaatgaaagaaccattgctttatacaataacatgaatgaatttcgcaaacacaatcttaagggagagaaaccagatgcaagagagtatgtattatatacatttatataaattatgtaagtttcagaaacaggcaaaactaatcaatgatattagaaatcagcatattatttacttgaaggagggtttgggtaatgatggttagtgcttgtcaggtggcatgaaggagtcttccagatgctggtgatgatattctatttcttaatctggatggcgttttacagtttgaggtgtgctgaaatctgtaaaaagtcattgagctgtgtgcaatgatgagttgtgtacttttctttatgtatctgatatgtcaatgtaaattgaaaaaaataaaaaccaatgcacacaaggctgggaaactaaaataataaataaaatgtcatggattagaacaaaagatataaaatagatatcctcaaatgggtccaaacttctagttttcttaccatactggattctctcctccctactaaataaatactgtgttcgctgatatctttgtgtgggccttgtattgttcttttccctctgctgaaatatttctttgtctgcttatccattcgttaatctcttacccatttttactgtgtcttctcacgttctacctgctttgagaagattttcctgactggcttgaaactctgtttcttctatcctcatatcagaagatgcggcccactgtactatgtactacttaaattgtagctatttttatagtatatttcttatatgtccttctgtccattagactataaggtccttatgaacagccgggcgtggtggctcacgcctgtaatcccagcactttggaagaccgaggcgggcggatcacgaggttaggagttygagaccagcctgagcaacatggtgaaaccccgtctctactaaaaatagaaaaattagtcaggcatggtggcagctgcctgtaatcccagctactcaggaggctgaggaaggagaattgcttgaactgggaggcggaggttgcagtgagccgagatcaggccactgcactgcagcctgggtaacagagtgagactctgtcttaaaaaaaaaaaaaaaaaaaagtccttatgaacatagaccatatttttttgtgttttatttctcaaaaaaaattatttttcttagacaaaaatgtcaacttctgtaatgtaagttttaaaatatttttgtcaagaattaaacaagatgtttttcctcttgttagaaaattaattgaattcaaaaataccccatttaccaaacattatattgagttgagatttttatgtaattagacccttacataattattaagatttgaccttagtctttataaatattacctatctatattggatacacttaaatgttgttaattctatcaaaaaagtgttctcttttcatatttctttctttttgtttttgacttttgcttgtcaaattccgatcttctgtccctcaaaagtctattgtatatatattttcagaacccacagagaataagagctgttgcatagaactagaaatcattctttgatctcaaagacatgtgtgttcttgacattgtttgtcaatttttttatgcttatgacctcatgaaataaatttatttgaccattttactatatgttctctcctagatctgagagtagggattgtgactgacatctcaatacatttatctttgactgtaattataactgctttttatttttaacaggtttttgcaaaatagctaattgaattttagtttagagtctctagagaacttatttgatagtatttaaaattatgactgaattgtatcccaccttcagtctagtgttttcactgataataatgaaaataactgtacagagttctttatttaaaatgcacacactgtatatatagtaaaaaatgaaagccctttgttgttaaattactctgaagattgaagtaaggaaccattcctcctcccttataaaacttagtgaggtctgattcagtagtttaaggccatatgtctctaagtgtttttctgaggagccaccttgatggagccaggtggtatacagaaaggggtaggggtgagaatgtaggggattataaaacagataattccaggaccatttttcaattatttatttggagagatttggtgtgtttttttattcagtggggagcatgcatgggtcacatgattttgtacctggctttcttctgatactgtgatgaagtgaaaattaaataagacatgggtgtccataatttgatgcatacaataaaagttataggtaacatgatttcagctaagtttcctaagtaatgatatgagtctcttagttttataagagaagatttagtaataatttatttaatttagtaataatttattaaaataatattatatatgccatggaacacattttaatacatctgagaaaaaatttcaaggaagttatgttgacttaggctttctttctctctgggaacagtgatcagttactaaaagtagtggatcactttgactaatattttcatccccctattatagatgattaataaaaaagcatagttttttacaaagccataactgtcaaaaatctcacacagctgaattaacagaattatttgacagtgtatcttccagagacaaaacatggcagagattggtagaataaagttctgtgcatgtagtattggcaatgaatattagcttgcaatattatcgctagttttgtattacgagattgagaaaatcaggccaaaatgttggtttactttctttttgtcatctacttagcattgtctgttaacacaaccaaagagagtgtgtgtgaacatgtgcagttgtcctaaggggaactgagagatttggtggtartggggagaggaagggcttaacatgaggccattaacgkagatgggaaaacctcaaaaagtactggatataggtgttagattctaaggagcgtgaaaacttcagatgtttaaagctggaaggttatgcgtcattcaatgattttcagatttttttttaagtaatagaattcttttttaaaaaataatattttctatcactttaatatttaaaatcaatgacaaggaatgaatggtcctggaacttatctgttttataatcccctacattctcaccatctacccctttctctataccaccctggctccatcaagatggcttctctgaaaaacacgtagagacatatggctccaaagggtagtttgaaaacaatgatgttgcagactcaagcacttttagaaaagcatctctgagatgaaagtacttactactattagctaccacttactggtcacttactgagttttactataccagggacatgacatgtatcttctaatcttcacaagagccttataaaattggtgatatttcggagataagtggagtgaatatcttaacagcatatctaccagagacaaaacatggcagagagtgatagaataattgtcacccagggacagaattggaacttaaatctgtctgtctaatataaaagttactcttgttccagtaccaccgtgcttcatcactgcagttgagttgacaaatttccttgacttgggcatgggcatttatttaaatccactatataatgagctatataatttatttgatttaatccagaatgatcttctactacttcatttaaaatacttctttccacaatttgaaagctttaaatgactgtttcttaccctttgtgggaaatggaatctgagactcactgttgtttggaattgctgccaagcttcaggattttctctatgatattctcatcccttggggagacgctttgcccttcctttgatttatgtgtatgttatttttagttatttgataaacacttgctgcgtgtctgtttaagcaaacctttagaaacacatatrttatctgctgtctcattagagcatgtatggtaaaagaaaaaatcatggacgaaaggaatcagactaaagtctagggtttgaaaataattttaagtctttgtttgcagtgaggtattttaggatgagaattatgggcttatttcaatgtgctcttccaaaccatgttatcatctgtctattgatgcttttgccctctgcacagagaagatagtttgccacatttgagttgcttattaaaaacagtgggagttggaagcagtgcaaggtgagagagtgaaaggctgtaatggactacttgaagggtaagccacttaatgaaggctggtttttaatgtaaggactattaccctcgcagacataaatgcaacatgaaaaatgtctaaattacagtggacagaaatggcatgctgagactggaattttttcctgatatttcaggtacataatgcatctaagttagatatgtcctaatatatttcaggggaaaagaatagcctagtattaaaaaaaaggaaataaaaatgaatataggtgtcagtgctagagaacttccaacctcctagatgaattaagataggaacacacagcaatttcaaagactatatagtcacctttaacatataccttaaaatcaatacatagtccaaagactcaaaatttcttttccctggtaggagtgtgaccgaaaatacagttatgaccttatacttctcctctccaaaaataaacttgactcaagataggtaggtactatctcagtttaaaagcttattatctttcaaacacaagaagaatgccagggaaatacatacacacacacacacacacaaaacaaaaaaaaacaaaaaaaaacaaaaaaaaaccgagcaaacaagaaaaggtaggtaactaggaattattaaaaatatatatgatattaattatctcttataattaatgtgaaaaatatggagttatgattatatattagattatcattacatataaaagatgctttaaaatcttggaagaatgttagttttccaacctagtttctgccaagagtggtatgttgtaaagacctctactccctcaccaaagaggaaattattggctgagatgtatttttcaatgaaaagtgaacattttctaaatttagagcatatgacaacttagaaatgctcacagcatcatgaagtctccacctagccatgctgattaaaaagacgctggcttgctttttctaggtttatgagaataaaattaaataggacagttttacaaacttcatcaagctggttatgtatttctgtatgttcctcccacctcagttatttaagagttggagattaaataggaaagtagggtggcaattttgactattcaaaagttatgttttgagtgtgtaatttttatccatgttaggtcagacttactggatacttaaaaaataattctctgactccttctgtctgatcccaagcatttaaaatatgtcatttcacttaattctcccaaaatgcctttggaatatgtatttacatcattctgtaggtgaaggaactgaagtcaggtgaacctaagtaaattatcaaaggttttatgtcttgggaaaggcaaggctaggaatccaggtatatagagatataggataaggatttaacctttgaactttataaaacaagtatatgtagagatctttctttagagactgcagcaaaaagcttcagggctgacttggaggtgtggcagaagttgtatctcttatgcyttttccagtgcaagtaatgggaagcacaactacaaatgtgtttaaaccataaggaaggctactttcrcataacaaaaggtccagagttggctcattcagtggctcagtgatttcatcaataattcagattttttcttatgtctttgcctctccattcrgtaggtcatctttttacctcaggctatctctctttaaaggtctaaaatctatggctattccaggtacaaaattcagacacaacagtatcctgaagaaaaagaggttcttagttgtctcctccttatgtcttataagtatcaataaataaacacaaaaaactttcctgggatactctttgatatagatatgttagcatagatctgtaagtagartttcaaagctgtgggatttagaagaatgcacaaataaagcatttattaaaacagcattgtattctctaatgcaagcttgtctaacctgtgggccacatgctgcccaggatagctttgcatatggcccaacacaaatttgtaaactttcttcaaagattatgagattttttgcttttttttttttgtaagctcatcagctgtcgttagtgttagtgtattcttcttcttccagggtggcccaggcaagccaaaagattggatgcccctgctctaatgcgttattcagcctagcatcaggtttcccttaatttcatgcatttactgcatatgttacatatgcagtatcttcctacccctagtaagcttaccttatctttctaacctgccattgttactcactagaatttttcattstctcttgttttccttatgatttttatgatgtggaataaataagggaacatactttatttaaaaaaacctccaaaacgaagaaagagtcaagtgttatacactgtgtatgtgagtgtatgctaaagatagattaatttattattaggggaaccagcaggatagtaagactggttcaaaagattataggaataagggaaacatttataatcagtgaaagaaagaatggtggaataagattcctaaattttatactaaatgtccaataagacaatcaaagtgaaaccatgaggctatctttactaacagacaaatcattttcctctgtactagacaaaatttgtttgcattatcataatatgagtatcatttgtgttgctataaatgttctacaagttaagtcttttctcacagagttgtaaaatatcttaatcagtggtaattagtgactcagatgaagcgacatacttttaaataattagcgaatcctttggtgaaggatatacagtcattcttgtgctgggtcccaagttttgaacattttttcttaaaacttcccccttaggatcgtaaatattatccaaggatgattcttgtttaaaacaacaaaaaagtggtatccttttgtttttgtctgatttatttatttatttatttagacagagtctcgctgtgtcacccaggctggagtgcagtggtgcgatctcggctcactgcaaccttcgcctcctgggttcaaccgattctcctgcctcagccacctgagtagctgggattacaggcatgcaccaccatgcccagctaatttttgtatttttagtagagatggagtttcaccatgttggccaggctggtctcaaactcctgatcttatgtgatctgcctgccttggcctcccaaagtgctgggattacaggcatgagccactgcacccagcccgtttcctttagataggtgcagcaagaagtgtttattgacatgagccttgtagtaggagtgaaatatccagtgtcacgcaatattaaacaattagtaagagtggaaaattaacatctatttgaagatttcattagaaatctagaattgtgttttcagtagcctttattacttcagagtattttaaaaaacaaaacttggtttcttcttcttttcagaagcttaggaaccaactcaaaataaccatctccattaggagtatttcacttgaagttcttataaatgtgggtgaattccttcctcttttatgtcacccaaatgagctgagcttccttgcttgccagggattaactatttcctctcaggccgggaccctataaactcagactaggtaacagaccctgttactgggagggctctataggtatcgattgtttccacatatgaaatacacagcctttgtctctttggtgagcttatcatatgtgttttagtaaaaaagttcttcttaatcaaacaatttgtacacttgatttgtcaaactatattctggttaaagaaaaggccgattcttagttatttatccagttatctgccattgaaagtaaagaaaagtagaaaaaaaatctattactgaatatcttagatgtcagaagcacatatcaattaaagaacctttattaagtcaaggattaaaattaaatcaagataaataaaaagctttattattatatataccaatcaaaaaaacagaacattaaaagtatactgaaaatctcccaaacaaataatgccaaattgattcactgcatgagttcctttaagttatatttaactaattatttatctcttgaatttggggattatagtttatttcatgaagtcatcaatcctagaaactctggcttagtaacctggtatagtctggctgatgtctaggtgatatcagctctgaagcttgtacccttgaggctggtccttgaagacataacagttagatgtacctgatctttgactttctattgaggccagtatttgaagacttaatctgtggagcctatagttaatagcagagccttcaggcaagcatgggaggaatgcagaaaccacctgctgaatgactgaatgcttgtgattaatttattatagtaatcaaccgyatcacactagaaaagagaaaaattctccatcagggtataagacttactatttaataagtatttgttaacagctcctctgaaagtaagaatatatggacatgactgtattaacagcttgccatgttcttcccataaattgaattattttggacacattttatattacctgaaaaaaattaatgcacagaaagttgaactaatctgatttgaagctctttttcatgcaagccttataatggtgttgagctaattaaaaaatatggaacataccaaacaaatttaattatttttattgttcctaatcttacaaggcaaggaagtgaatccctgcggttgtccaaagacctataggaaatcacaaaggcagattagaagaaaagacctcttgaaatttttattttttctgaatttgttgttttatcatgcaaggaagaatcagaagtgttatcacaggagattggtcacttgattaagacaggtgcctaaaaataaggaataataccagtattttaaaattattaatattaatatttataatattaattatattaatatagtaattttgatatttaaaaataaaatagaagrtaacacaatgataaggaaactcagctcttccaagaaataaagttgtatttgtttttaatcatcaaaaccataataaaataaacttaatatgtataatactatcctggagagatacccaatcattcctcagattaaacagaaattaggaataatttttgtaacctctttttaagaggagactgaaaatactaagatcaatttgttattttaacagagataaaacctaattccagtctggcattaatataatatttgacagcaaaagctttaaaaaaaaaataaaaattttttctggtcaccaaataatttatttcacgattgccttgtattcaatgtatttctttaaattcattatgttctgcacacattccatttgtagttactctaaacttttcaaaatatctgtactattctgatgttttactaactgttgtatttgaatgtaactcacaacaaactctttccactggtggttttatttacatcaagcttgtccaacccatggcccaccagccacatgtggcctaggatagctttgaatgtggcctaacaccagtatggcctagggaagccaaaagattggacacccctgatttacatattatattgagtttttgagtcataagtaaaaatactttctcaggaaaaaaaaaatagaaatattgtccaaaaatctttgtattgcgagatatctctattaagttatatgttgagaaatatctccattaaatttggtttttaaaccaagaaaagttttctattgataaaaatatggacaaggccaacattttgtggactatcgtgcgtgtggaacatatctatgagaagtcccccttcaaccagttgtcaaagtgagtcttgaatgagaaggaatatttattaggaagggaaaagttaatttgaaattgtatttttgatgtaattgttggtaatgagcaagcctaaaaggataggaatttatttcctaaagtagcagctaaagtaacaaaaaaattatccttctctgaaaagtttaagaaataaattcaataatagctgtataaagcatttgggtatttaatttttctcatgtttctagtatattgctttactttatatgggactaagaaataatttaacttaatgttttatagaaaataaaaatgtgtttaaactgtcaaaatattttttctgaatgtaatctactaatgattttgacttattacttttgtggctataatgatagttaaaacaatgttaaagatatgctattgttcataaaaccacactgttcttgacaatagaattaagaaattgatacttaagaataaggtgaaacaataccaccgttcagtgttgtgcagtttagcactgtgtttggcacatagacctatgataaataactgttttatgaatagctcaaaagcttaaaaatagaaacatgattttctcaactttcttctggaacacataagtatgttggaactcaaattatttttgaatgaatacataaatggaatgataaatttacacaaaggaaaaaggggaatattttagaaaatgatttgaatttaactgttgttaatgcactatactattgcaaaatggccttttgaagctttttaacgtagatgaatgaataggatggatctggtcaagaggattgtctgagtgggtttaattccagccccgtataacactataataatattctactgatggtgtttatgtttttttttctgcatgttacatgaaatctttggaagtttagatctttgccccagtattggaagattatatttttcatgttacgtcttatagttaaactttgctattaaggatgctattgtgacaagaacatgttgctttatgtaataagcactgatttcgattttttaaactggattattcaggtattttcattgccactggaaccaagaaacagactcttcttagcttagcagtggtgactatttcttctgttctctttgactcaaaattgaagtcaatgaagaaaagccagtgggaagagctgattgttgccatatgtcacattccttatgataaagtctaagtttctccctagtaataaaatttatataagccctttaaaaaataggatgacatttatgttagtttcttattttygcaggctgagcagttcttttactgaaccagtagcagtggtacaaaagttgttttgaaatttcaaatgctctacatctatgtttaggaagtggacacctataggtcccaagaaatcattagagtggaagaaataaagagaaatggatggtcaataaaaacaatttataatttttggctgggtgtggtggctaacacctgtaattccagcactttgggaggctgaggctggaggatcacttgaggctaggagttcgagaccagcctggccaacatagtaaaaccccgtctctactaaaaatacaaacaaaaccaaaaacaacaaacaaacaaacaaaaaattagccaggcatggtggtgcgtgcctgtaatcccagctacttgggaggctgaggcaggagtatctcttgaacccgggaggcagagattgcagttagccgagatcacaccactgcactccagcctgggtgacagagtgagactctattaaaaaaaaaaaaaaaaagaattttcatataggttttctttatgctgcttttaaatatttattgtccatttttaaatggacacatgattacatatagttgaaaagatagtattctataatagaagtcatagttctttgtgctcaattttcctagtatttttacacacagaatctccaaactcagcatatcatataaaccattttggtactagcaccattataatactttcaacattattgaaattgatttttttccttttttttttttttttttttgagatagggtattgctctgttgcccaggcttgagtgcagtgtcacagtcatggcagtcctcccacctcagccttcctagcaagtgggactacaggtgtgtgccaccacacctggctaattcttgtatttttttgtagagatggggttttgccatgttgcccaagctggtctcaaactcctgggctcaagtgatccacctcagccttccaaagttctgggattacaggcatgagccaccatgcctggcctgaaattaatttctgttaaatctgaaagagactctatagattatctctagtctaaacttccgttttacaaataaagaatagtgtagaaataggcaaactgacacaggaacctgagtaacctgaatttaaatctaggttttattgcttgagatttggtcatgacatacaacctttcttagcttccattttcccatcagtaaattaggaataataacatttctctctctctctgtaaatgttgttgtaccagtgaaatgaaatacagagtgcagtatctggtagtatctgggatgtagctgatggtgaatgaataatatttgcctccttccctctggcccaaggtgacacggccggttagtaatctcattaatctataagaaattggtttgaatttctttcacttactttttttttaaaagcaaggaataaattgcactttctcatcacaatatttcagtagctcattaggaattattttatatccaattctgaaaatcacctttgttatataattgctcactgagtacagttgctttgcactctgacgcataatgatatcyagaaatgatttttataacaaagatagaataatgaggtatggaaatagtttgggaaaaggtttattatttctcaagtcttaagactgtttttatgtagttattccatgtgggttattgaattgctttgtggtcattctaattaaaaaattttctaatgaaatacacccttttactttgaattttacttaatgttgacagcagctgcagtctataatgtcataaggccaaggaagaagttatgcaacaacatttaaagctgagacactggaaaaattgttaaaagtatctcacactgcaaaaacacaagcaagcaccagcaaatatctagatttgaaaaaaaatgggtttaaaactgtctgatagagtttattgtcatatatttaaaaatctggatattctgttgcacaaacagattttggttttatggcttacagtagaacttgtaagatacttacttggattctacatatttgagtaattttttaacctgttttcagatgtttgggctgtgcccagattgttagctacgaattcttgttctaaaatgagaaatctgataggttggctgtcttacctgtgccttggttacgtctgttgaagaatgagagaaggataaattctctctgctctttgtaggtcccttttacatactatgataattaatgtattttcagttactttgtatgtcaaatgcagattcctttaaacctgcagctccatggatgtgtttacggggtttataaaccctttaaaagtgtaatattgcatacacacacacacacacacacacgtgtgtgtgtgtgtgtatgtctgtgtgtaggaaggtgtgtgattttccaagaatgtattagacacagaatatcagaataatcacgcagaatagtagcagaattctatagagtacaacattgaacaggtctctaaggcacagcccttggggaaggttgcgtttataaggggaaacaaaactcccactttgctcatctccaagtctggtatcttgtgctgatgcaatcaaagttgatacttttttctacagagtctcctttgcacccttttaattttattttcatcctttcaaggagagttagctatatccagaatttaaaggatgtaaaattctttattctcaaagaattattgtgtgaatttttttctctcctgaggctaatatctgtaggttttttctgttattgatgaacacatcttttttatgtcccttttgctatactattgagatgaaagcccgtttgctagggtttacatccaggctgagcagggtttggaaaatccccttcatcctttttcttccatatacttaacctattgtccatgggaatgcttagataaattactttgagcattgtgtttttcatttcttgcaacttaatgttgattattacaattaaagacataagtaaaaacaaaccaacaagcacacaaatattattaaacaacaaaatattagatagcaaatattatgaaataacaaaataaacagacagtttgccatccattcctaaagtgaatgccctggaaggtcaaggctttttccctctgtctagccaactagtgttagaaaggaacatgtgacttaccaaatgtttcataagagtctgagaatatctacagctgtaaaggatttgctgtttttggaaatataaaaaattgttccttttcttcaataccttatgaagtaaaagaaagcaactgaggcatttctgccaaagaacttcttatcttggaagactgaggctctggactctagcacttacaccacatgacatggacagattgtcctctctttcttaaaggtaaaatcaagactttcctatttgtccttcttttcccagaaagtagttgtaagaaccaaaataatacatgattgtgaacatactttgaaaacagttgaagtatgtttttataatctcacgaagtaacaagtgtattgtgttggtaatgtaaatggattgatacttggatctttaattattccatgtcattttactagtcaatatctcaaagaatgagactcaatcacatggttcatggcagtgcatcatatagcatttattcgattcatggtattttatcccatgactctaggtagtaatggcagagtacagagatagagagagtagaaaggaagaaccagtaaactggagtatgttcaaataaagtagctgaacttggagtcaccagtttccaaaaagaacagggagtagaacatttagtcagaaactagacagactagtagaaagatatcaggaagatgaggcaagtggcaaataatcaggtactatattatattctttctttcttaatagtgccttgaatagtactttactgtgatagacattcaataattaaaatagcttcttaaagtttaatctctaaggtcattttaacaatagcaagtaactcattactttcctctgttattttcaatcttacttgaactttgcatagggtaagaattatattggagtggagataaaactagaagatatttatgcataggtgaaaacagcatttataagaagaaaatagatgaaagcaggaagtgacaaaattctgctctgtaaaatttctccaaaagtgagatacgtatatattttcagttatatggcatatttcacatagtattctttggacttctttgaacgatkatgcatatacattagcagtaattattttagaatctaatttttatagtcagattcctgaaaggtatttttctcaagacttttctttatttgtattttcagtggaaatttttttcatgcttattttcttattttaacatttgtacatgtatatgaatgaaacaaaaatggttagaaaacatggaaattatacataagtctcataaccaagagaaaatcaccatcaatcttttgatgtcattttttgttacctctaagtctatgtttgtgtgcattgttgtttgtatgtacatctctgtgtgtgtctgtgtatatttacttaygaaatcatgaccagatagcatgtacattttttgttttgctttcaaaattaatgctgcatcaaacatccgaaaattctgttatttataattgttatctttgggaagattggttcaataggaactactcagttttgtccagaagcaaggcctaacttatgttttacttaattatatttgttttctagttcataaatgtaataatttcttaattacatatagagatgaaagtaacttatggtttatatttattgaaatataactttcaccttaatatttgtggttaaattcaatctatttttgtgaagatttgtgaaacacagtctaaaaagcaaaccatgatcacagattacttctgaaatataattcttgactatattggagttaagcagagcaaagaaacatgtgctctttttcaacagtaagaaagaaagaattctaatgtgtttaaaattcagcctaatttatatgcttgtaacagtttggaagttgattaaagtctgtagagtaagtgaaaattacatgtagttctcattttagttgaccttccatgttaattaggacattttttttttccatttattttgtagttaagaacattttctttatctagtaaactttgattctgggttttttttcttttttttttgttggttgcttcttgctttaatgaagttgatcactttcatatcccttttaacttttctcaagatgctgaatatgattttgaaatacaaatcaaagtactatgatgaagaaaatttaggcagttccagttgtctattacttacaagtcagtcatatattcatttaacaaatatatatttaatggtacatgatatggtttggctctgtgtccccaccaaaatctcatcttgtagctcccataattttcatgtgttgtgggaggggcctggtgggagatgactgaatcaagggagtaggtctttcccatgctattctcgtgttagtgaatgggtcttacgagatctgatggttttaaaaaagagagagtttccctgcataagttctctttgcctgctgccatccatgtaagatgtgatttgctcctccttgccttccaccatgattgtgaggcctccccagctacatggaactgtaagtccattaaaccctttttcctgcataaattacccaacgtcaggtacgttacatctttatcagcagtgtgaaaatggactaatacagtaaattggtaccaggagtgaggtgctgtgaaaagatacccaaaaatatggaaatgatttggaactgggtaacaggcagaggttagaacagtttagagggatcagaagaagacaggaaaatatgggaaagtgtggaactccctagagacctgttgacttgggctttgacatttggctttgaccaaaatgctgataatgatatcgacaatgaaatccagactgaagtggtctcagatggagatgaggaacttgttgggaaccggagcaaaggtgactcttgttacgtattagcaaaagattggtggcattatgcccctgccctagagatttgtggaagtttgaacttgagagaggtgatttaggttatctggtgaaagaaatttctgagcagcaaagcattcaagagtgacttgggtgctgttaaaggtgttcagttttaaaagggaaacatagcataaaagtctggaaaatttgcagcctgacaatgtgatagaaaagaaaatctcattttctgagtagaaattcaagcctgctgcagaaatttgcataagtaatgaggagccgaatgttaatcaccaagacaatggggaaaatgtctcaggatatgttagatgtcttcacaacagcccctcccatcacaggctcagagggctaggagaaaaagatggttttgtgagtcggacccaaggcttccctgctctgtgcagcctagggacctggtaccctgtgtttcagtcatgccagccatggctgaaaggtagctctggctgttgccttacagggtggaaaccccaaaccttggcatcttccacatggtgttgagcctgcaggtacatgaaagtcaagagttaaagtttgggaacctccagttagatttcagaggctgtatggaaatgcctggatatccaggaagaagtttgctgaaggggtggggccctcatggagaacttctgctagggaagtgtggaagggaaatgtggggttgatgcccccacaatgagtaccttactggggcaccacctagtggagcagtgagaagagggccactgtccttcagacaccagaatagtagatccactgacagcttgcattgtgtgcctggaaaagccacagacactcaatgccaacccatgaaagcagacaggagaggggctatagcatgtaaagccacagaggtggaactgcccaagaccatgggaacccatctcttgcatcaacatgaactggatgtgagacatggattcaaaggagctcattttggaatttaagatttgactgccctgctggattttggactttcatgggtcctgtagtccctttgttttggccaatttctcctatttggaagggctgtatttacccaatgcctgtactcccattgtatctggaaagtaactaacttgcttttgattttacaggctcacagatggaaggaactttccttgtctcagatgagactttggactgtggacttttgagttaatgctgaaatgagctgagactttgggggactatttgggaagcatggttggcttggaatatgaagttatgagatttcggaggggccggggatggaatgttatgatctggctgtgtccccaccaaaatctcatcttgtagctcccataattcccatgtgttgtgggagggacccagtgggagatgattgaatcatagggcaggtctttcccatgctattctcgtgataatgaatgggtctcatgagatctgatgtttttttttttaaaaaggttgtttccctgcacaagctctctttgcctgctgccatccatgtaagacataacttgctcctccttgccttctgccattattatgaggcctccctagccacgtggaactgtatgtccattgaaccccttttcctgcataatttacccagcctcaggtatgtctttatcagcagcatgaaaacaaacttatacagtttgtgtgccaggtattcttccaggcacttgggctaaatccgtgaacaaaatagacaaaattctttgccccagagaagcttataccttgatggggaaaaggataataataataataataataataataataataataataataataatgcagtgtttctaagtaccatggagaaaattaaagacctaaaagatgtggaggagtatccatgcagttatctaggggaaaagcattccaggcatagggatcagcaagtggaaagtccttgaactaggagcatgcctggcatttgaggaagaataagatgaccaatttggtttaaagaaaagagtggaaggcattgttataggagataaagtcagagtagtaataggggactgattgtatatggctattatcagtacttcacaaagttctaaatggagtgacatgattttatcttgacagggtcatactgagtgcgggatgtggagagtagacattgggatgggacaagggtggaatcagggaaactagctattaggcagttgtgataatccaagtcagagaagattataacttggggccaggatataatcagagatggttattaaatattagggtaaattgaatttgctgacggattggatttctggtgtgagagaaagataggagtcatggatgagtgaatattgttttagcctgagcactgggaaggacacaatagtcatgagctgagatggggatgaatgtgagaggggcagatgtttgggaagaatgggagttaggttttagagatgttaagtttgaaatacttaatcgatatgcatgtctgattatcaggggagaggactatgctggggatacacactttggagtctttattgtatagatggtctttgaaaccatgagactggatgaaatcacaatggtataggtacgaatagagagcagaagagttgcaaggaccgacacatgcattactccagtgtttagagttcaaagatttagagaaatgtacaaaggaaactaagcagtagtggactgtgccatcagaggaatatgcactatattgagaaatatatcaataaattctgagaatgattcaggtgaacttagggtagaatgattaaacgtctgtttacctttctgtctttatccatgaaagaaggaaaataaataacaaacaaggtgtgagattaatattaaaatgtgtactggaaaggtactggaaaatcagaggatgggggctacatctgtatttctgaagcctttttaccctttcttgttttatgtagtaagaaatggaatacaattaattgtaacataagataaaatataatcaaatattaatagaaacaattttgttgctcaagagaatgataactactgctagtactgagactaaagggtattcatgggcaggcaaagatttgtgtcataaacagaaatttggagtgatcactaccacaatggtgaatgaaagatggagaagcctgcattctagaccactgtgcataggtgcatattgatcgcatagttacctttagcactttgtaatgttatctgttagtattagcataatgaaaaatcagaatactaggcctagaagaaaagataatttcaagcaacatcgaggcaatgttgtaagacagttatgaaacactggttctcgaagctggctgcattttagaaaaaccagacattctttataaaggattaatgccacacccccagaaacttctgtatatttggtttgagttaggactagtatttaaagtcccataggtgattttaatatacaactaatgataaacatcaatgtaatggaagccaaggcattgtgtgtgaggatgtgcgtgttttgtgtctaccatttgtagcactttgtgttgcaataggttatcctgattttgtttgtagattattgcatatgcatctgtgcctaattgatatctgtgtgctgcacatcaaaatgtgaactaacgcagctttgcaaagagtcaagtccaaggactaagccttgcaactttatttaaatagtatatagaaaaattctaaaaagaatatgtgaccactaggaataattctaattggttggttagcagttttagcacaatgtctttgataggcccttacatttgccacatagactttgtgcttttactgggaaatgctaactaaaaaaatacattggaatgtttccagtcctaggtcaccatttttttttttttttaaaattacctccctcattagttcccagcattacagtgtatggtacattcacatatacacacacatactcatgtatatcagagtactcagttctgttcatttcctcattccatttttcttttcaaaatttggcaggctatagtgaaaaaactcaggacactgacttaccagaaatgtgtttgtgatgtgctgaaaagttagacacttttctgagagccaggtaggggtcttctccatgtactatggagtagccatttataccagtcattcatgcctgtcagagtatcatgtgtgggcacttaaaatacaacataatgaaaatcaactctccttattatcattatctgtcctcagtaacctaaaatcaagtattaataggaaagaccaactacaggtatagaccttatttacccttaggtttctggcctgcttttcaactctttggaaattctctttgaggattaaatgaacaatgtatacaatgtgcctaatgtacctctgtcactttatctttggttttcctgatacattgaatgttggaataaactgaatcctgatttttgacttgattcttttgttcctgagtgttcttgtggtgaacatgattttaattaccacacccaaagcgttaaaaaaatcatttcctttctacagattctccctgaattctactttttcacttctaatttatttttatcaccatttcctggtattcttttgccatgcttttgaagtccattcctttgttatgctataggcaactgctagcagacctatttctgaaaaactctatttgacaatttaaaataaaagtcttatagtcagaacttggaaacagaacgagaagttggggctagagctaggggaatcactaagttgatgtgagagaaaaagcactaactggaaaggaccaaaataatggacacatataggtcaactaggcaaatgtcatttcatgcagttgtgtgcctcggaggtcctaatctctaaccagtttttcttgtactaaaatgccattgaatttatagcttaagcagagtaattaaaaagctgagaaattggtgatgaagaatgaaatctggaatggcttctctctctctctccttttttttttttttgagacaaggtcttactctgtcaccagggctggggtgcagtggcacgatctcggatcactgcagcctcgacctcccaggtttaagcaatcttcctgcctccccttcccccagtagctggaactacaggtgtgcatcatggtgcctggctgcatttggccttgctttcttgagattattgcatttatttgtttttcagaaaagataaagatggtgattggttgggtgagttagtagttagggttctttcagtatcttagagttgactccacaaccacagttggaaggaaggaggctctttaaccaaagtatgaactactgttgaaatatgctgatgaagtgtgagaatgacagcagcagattgtaatggattttgaagtgttccaggttttaatagtaactaatagtagaactatagttcaaatctgtaatgacaacattgaaactgtagtcaaaatactaaatctagattgcattaaacctttttatgagaatacgtaaaattatcatatgctaacaagctatcaatctgagttagaaatgcttggcaataaaagtgttgtttcatttgattgatattgaagtagccgtttgttttatactaacttcacattatggtacagatagagtccaaactgatgaaacagatgtaactaataaaatgaatcgacagtataataattgtaaagggaaataatcgaagacaaagaaagtgttttttgagtttttttgctgattgggtggtgagagtggaagagcgtgggaaagcgtggtataattcatagacaaatcctagtatttctctgtattcagtttcatttcactgagttgtctgattgtaattgagttgttcatattgttctcttgaaatgttttgaggcaaatgaaatcttctaagaattcaagtatagtgaaacaatagccacaagacatggtaaacttattgctgatgttaacaaaggacaaaaagggaaaacatgatttgtatttagtagtgttggtgctattgcttggaaccaaatatttaaaattatttgcaaggcaaatagatttgactttaatgatgaattttggtaataaatcatgaagggaatcttttaatctttgaagtaataagctaagcgtgcttttttgtgagatgaattgactttaaaaatagtaataacaaaagtctaaaacatatttacaaatgatgatttttgataggacttttatataaaaatttgaactatcatgtgataatcctgaatttaaaacctaacagttttactggtagaaattttttatgagaaaagtaatgctcatttaagtagattttaaagtaaaaaaagctaagatgatatgatgaattatcttgatgttaaaaaggcactgcttcatgaataatattactatgaaaaaatatttgagaccctaaaggcctataaaggagaaatattttatttaggaaatgaaaaaatgtatatcaggggcaatagcttaggggaccctgagttctattccctattttactgtttattctgtagctgtgagcaactaatttaaccttccaaaatcttttcctcatttgagtaaggaatgactaatactttccagctacatcaataacagggatgccctggtggatgatgatgtttgtaatttagtacattaagctctgtgggtggaagacaagtactacaatatgcacaagctattatcgtcgaaccactttttgktttaatacttattttaaaaatatttattttgattctgttatgtgcaagggaacaaatgatatgtcctttctgtaaactctaagcctctgaaatgcagctttcatttcttgctcattattgtatcctgtccattcaagctttgcttttaatcttctacatggtaaaaaattaacaaatgtttatttagaccataaatattttgaatggtttcaagttttgaatggtttcaaagtttgaatgtttttttttctcttacaagactgtctgctttagaagaaaggaacttctgtttgctactatcctcttacctcccatcattggaacaaagtgctcagttctggaatagatttcctcactagcatagctataaaatattcttcagaaacatggcatccacgtctttgtggcatatgccataagagcatttactaaaatatgagagaaaggttaaaaattaaatgaatttctaaagctttttaaaaaattgctaaactttcataatctattcagcttctcaatacatgtgagtttggaagacagtaatttctataaatttattaacatttaacctactaaatataattctttgaacatggaatacagctaaatttctttaaatattcttttgtatgtcaagaatttaagaataaagaatagtcagttttcacatgcagtattttgtttaccaggtagaagcctaacttaaactcctatttatcagaccaggatctgatatattttgaatgtcttataaaatatctatattgttcttgtaaaatgtctatctatattgttcttatatctgaggttttacctggggttccctgcctttaaacgttatttacatatggaatattttcatttttctcttcaaagttaaactgtactttggaaaagagctcactctctataatcattactgcacttctcaaaactgccaccttttcttcaggaatatagaagtgggaaatgattctgtaaaatttcaaggaaagagtggtgggacagtaatggggaaatatcagtgtataaatgtactttcaggataacctctttcccttggtaaaatgtgtaatatatcttttaaaggcaggaaacttgacttgtgaagtgatggtagaatttaaactgcatgcaaagccaaggctctttaaaagaacgtgaattaagtcaactatgtagtttagctcttgggtgatttttttgttgttattgctgtgtgtgtgtttttttgtttgtttgtttgttttttgttttgttttgtttttttaaatagagtgaagagttttattcttctatagcctctgaataatggaaagacttcctggtgcctgaattttaaagaccattattgtagtctataattgtattgtactttggaactagagagtactgtagaaacctagtccaaatgccttactttacagacatggaaacttagttgcagagaagtagcagtacttgcttggtgaagagcacgtagctacttggagttaaggtgacaattgtcatggctcacccctcactctaggttttgtggtcctaaagagttaaaggaaaataatttctgactcagatactcctcattccagttagtagcaatcttgagttagtagcatttattttgtgttaaaaataaattggaagtgagttgacaggaatgataaagtttcattgggggaaaattaggattattcaaaggaagctccaactagtcagaggaagcaaccagtaaaagcaggatcttggtcattggcctcgtcacagatttgtctgcactttgacgttttttttttttcttttttaacagaacagtttattgttaatacatctctccttttattggaattcctcttacatgaatggattttgttttgtttgtttaaatagagtaagtgttgatcatggctctatccctttcttttcatcttagttcctccttcagtttatattctctgctctctgtcaccctaaatttattcattaaatttagtctctgctttctgttgtccctgtgtgtgagcctttgcttttcatgtctatatttcagtgaaattgggacctgttaattttctgacacctgtagatttaaatccagtgacttacaaaacaaactcagcaattttggaatgagaggacatctgtgcattttgcattattttttattgtgaacatgggaaggttatgtatgcacattagagagtcaaatttcaaaaattaagtactggatttgcttcatttaattgctttataaaattgaactaacattgtaaatcattaaagtgagaatattttttcccgaaggctctctcaaactctcaagtaggacattactttgtaatttttatagtagttaatggtttccatttcagtattgctattatgtgctaagaaacctgtgtttgatgtagggacctagtattaatgaggcccaagttagtggtttgatttatatatgaaataatttagaaggagaaatgctctctatcaccatacttaatattatcttttattgtagtattggccttgtgccaacacttgattcggagattagtcaaaggtcagaggtgatcatacttgacggtttagattcttttggaagctaagaaagcaaactgtgccaggcccgccctgagaccacttaaatttaagtgagggccagggtattggtgtttttaaaagtgctgcaagttatgtcaggttggataatattggatacattaggttaagtcactgaatttgtcgatagttggctttgagccttctactactttgggcccaagtgggtattctaatggctggttttacatactccttggattctagaatcctgtgatattggaaatctctctttaagtaaatgctgacaaactggttagaattaaatggggagggtttgggatggagtcctggataattcagcgtcgccaattgtcagtgttggaaaaccagcatgcagaatatagtagaactgcatttaaattaaccatacatcaacagatatttattaagggcctaccatataccaggcatggggttagaaaagtcaacagagtagtagattattcttcgcttatggagtttacatccttaaagaaggtggcacatagagaccaaggtactataatatagtaggtccaacccagctagcttccctgcagtgctggggctgctgagcatcaaacgagaagtttgcttggtgttgggagcctgtttctatgaagatatctatcttctaacgctggagtcatcctctgaatccaaagaagctaatactgtgagaggtaggagggaagtaacatgatgaagggaatagcagatctgtgtttgcaatctgacttgcatgctcattaagtctaaaagcaggcaaactgtcaccatgattttaattcactctcttttatgtttcatgaacccacacagttggttttatatatgttcaatgcacacttgacatgcctccacatcctcattgtgtgttattaatactgtaaatatgtaaggcattgttgtcacagtctctgggatcatagacttgattgatttctcaactctgtatcccgaggtggataagttaccttaaacttaagagtttatttactcagccataaaaatggatactgtgatatccactttgtagtagtcttttgcatgtctgagatgtgtaacccctttagtccagtacttggtacaaatagatgcttagtaaatggagatgtttttgttagtataagaagagccacaatttttatttaatacttaaaattgagaaataggraaattattaaaactttaacatacaacaacagaagagatgtgaaacatatttatgtacattctttcatttagagtttaaaggttttaattacatctgttgtattagttgaaactttcttgaataactacagtgtttttccgtaagtgatccaagttttctattttgctcttttccaaaagtatcatctaacacctgcattttagtacctaaggagctagttagagtggcatagtactcccaaaagtgtctaaggctcgcttcatttttgtgcttaccttgagcttctttgtgtgaccctttactgacaagttttcctaatggtaagggctagttcatcaggaatattctatggaaaggcttatctgtcttctactaaaatagttcattccctgtgactgatctgaacttagaggaaatctggctcagttgtcacctaatgtttgcagaaagattcagagattaataaaacatgagtctgtgttgcttgagactgtgtcacaagtattagatccatagcacttctgggagcatttaataagaatagtcaagaataccttagcatttggatatcaaacctgattaggttttaaaccagtcttatcaggttttccttgttactgatttaacttaaacattgcataagatcattggcttggaagccattcaactctccagccaggagaggtacctgttctctgtgttctaaaagtacaaagacaaggctgatattgataacaaattacgtaacaaactcataaatacagctcaaaatgctatcattagctgaagctatgcacaccatggctggtgggcatttacgattgaggaacttatagcatgttagtatgaatggtcacttgactagaaaaagtaataccacctccacttcatatcaattataaaagacttcagaaggcattttataatctaagtttttattctctggaagtatttttattttaccacttcatttcttttcagttaaatattacctcagcctttctttctcttatctctattcaaatgatatcaaatctcaaatgacatttcaggcacttaaactttaaactcagaaatgacttttaaactgaccaaatgactttgattgtttgtgtctataaagatatgcataagattgctaggaaaattgaatatacagacagtacccctaacaaaagcctgaatttggcctatgatgtttacaagtttacaagtgtttattcacatctactttgtgttgtatattgtgctagattctgtaggacactacagacttccaagaaatcagaagaggttgaatcacagtgctcattagacattctttgccattttcaaaatatatctattcagatatatgcagatacagtctacgttacaaacctattcttaaatttaccatgaataatacagaaacatagcttatcaaactcataccataactgggaaaagatgaagtcatcgactctattacagcactgtttatagcagcactgtttaataagctcagatttagatagacaagatgacaggaaaaggaaagttttaaaaacttggttcacaatattaaagacttcatgggcgtttgggttaccctaataggaaaaccagtgtgcaggagaaaggttgtgactattcattactatatttttcttaaaaatgtacaagtttaggctgtgtttatatatgtgaaatcataggtgagattaataattatccatatactttaaaatacccaataattgctgcttaggaggaggttatttatttatttatctgtctgtttaatttgtttggaagatgtcaatcatcattactgttaatgaagcttacttaacaatgccttattaaggcctctgctttcctttgtaaatgttaccaaaagcttagcaagacttgggagatattcatgacaataaactgaaatgtttgcattcaggtttcaaatcaattatatgtttctaagtatgtttttatatgtaaaaagtattcagtaaatgtaatgcaaacttctgtaactaactggcaagtttaggtagggataatatgtcccccataatacgacaagataaaaaaaattgtttgaatgccgtttgcttttaagaaatatattaagatttgaaacttaaagttgagaatgtataagaaaaattatgccttgaagaaactcatcatgactcagaatcacaattttgttagaattttgttatatatcacagggataaaaaaaagttttcatgttgggtaattttataaaaattgaatgataaaatttgagtatggtctattttttttgataaatggctatgtaatatagagttttaataataacacccaaaagttcaggttcaggttttggctctgctaattactaactcttatagttttggttctctcatctataaaaaaatgagacagttaaatatctattccttctacttttgaagtgtagcatcgactgatatggtaactaactaactgtgaatgtacgtatagaaatgccatttggaagggcgtcttctgtcaaaagcaacaagtaaaaagagagtgctataaatctaaagtctgggcctggaagtaaagacagaaaattctccaaatagatttacaaaggaagaccttcctttttgatgggtttaaaaaactatttgagttgttttgagaatatttttacttagctatgatttggttagtcattaggggtaaacctagtagatagaaatgagtgttcagcaaactgattcccagatgaaagagaaatgatgtttatgtctgtttccagtgagactgcagtttatgagccaagacatgggggtgtgaaggaggtttccagacatgcaataggaatggaggcaggtactgttttatcaagtagtttagaacagaccattgatatgaccaactctttgattttgaaaggtattcaagtcaacttagattgtattgtagttcctaattagccatggcattcagggacaatggcaatttatttattatttatgttatgtgcatagcaagtcattggggggatttgtactgtgtagtcacccacaaactcatgctgactgaggctctacattttgtggttgcaccatttgggacacagaactttatcttagtggcaagaaaagacagtgactggagaaccttcatgggtgttccgaagccttatttaggaagtaacacatgtcacagctcattagtcacaagtgacattataccatctaacggcaagcaggatgagaaatgtgggcagcagacaagtgcttgatgtgcatcttcatgtgtaacacaaaataaatgttgcagaagagggtttcctacctcattctaccattttaagtttatagagttaaggtaattaaagcaaatatgacttacattactgaattcccagtgattctttttcttcctaccgtggcttctctgttttggcagaacttcagttcatgaggacctatttcataatagtcaaaaatacatcaaattctaatttatactgtgtcattggcacatagacatctctcttttggggaaagtatttgtaccgggctttctttgttgagaaaatttacacatatttatatttatattctgtaattttttctctttggaattttgttattaaaggtgatctatgcctccattcaccaatgctattttattttatatgagcccttttcaaattttaatctaacaattaaatttcatttcagcaaactggaaattcaggggtccccatctgtctttttaaaggtgaaaactaggatttcttttgtgcttgagcaaaaagctggacagccaataattctcttatttgttggtgaatgaggaatcaaaggttacatttataaatcactttaagagcataatttagatccttgttttgaaatcctctatagaatagtatatatgtaaaatgatcttattatgtctgtgtgcccatcataggtttaaagacaagttgagtacacaaattgatgtaatttggatatatatccctgccaaacctcatgttgaattgcaatcccagtcttggtgatgggggccaggtgggaggtgattgttcatggagacagatctctcatgaagggtttaatacaattcccttggtgctgtcctcacaattgtaagagagtttaaaaatatgtagcactttcctccttcctcccttgctcccactttcaccgtgtaaaatgcccgcttcccctttattttctgccatgagtaaaagctctctgaggcctcaccagaagcccagcagacatgctcagcaccatgcttccggtaatgcttgcagaactgtgaaccagttaaaccccttttctttaaaaattacccagattcaggtatttctttatagtaattgcaagaatggcctaacatataaagtgtccccttttgtgctctaagatacgaaagataaatttatattagcgcaaatctggtttgtatcatactctgttaacttgttgaggtagtatatgattgggtgagaataagctggaaactatggaatgtgctatttgcacaacatttgattgacaaaaatgcctttatttagatgaactaaagaactttttattatttaaatgtagtcatttgccacataatgatgttttggtcaatgatagactgcgtatatacaatctgataagattatactactatatttttatagtaccttttctatttttagatatatttagatataaaaataccattgtgatgcagctgcctacagtattcagtacagcaccatgctgtacaggtttatattgtaggagcaatagactatatcatatgtaatagactatatctattgtataggtttgtgtgagtaacactcaatgatgcttatgtaattaacaccctatgatgtttgcacaactacagtgacattcttagaagctatcctcatcattaggcaactcatgacatatatgcatttatttgtattaactgaaatttatacattttataatttaaaggatcatccagtgtgctcgcatagaatcacacctgtgctatgaaaaattataaacaaaataacaaaaagtaactgaatactgtttgttttttaaatatagaaagggaagtttagttacactgaagaaaacaggtaactattcatgggcacaaactgaaaatgaggggaacagattctctcataggtgaatatttttctttcctgagatagtagttttatatgtatggttttgcccagggactacccaagtatagagtttgtaaattgaatggttgcagtaatttctggaatccctataaactatgctaaatatgaaacattctaaatggttggaaagctagtccttataaatttagatactcaatacttagacatatttatttcaagtagttaattattcttaatttgctctgaattcttaagtgtaagaaagctataatgggacagagggagacctatatcccattttcagtatttcaaaaaattcagtatttctgaattatgacacaggttatttcatgttactcaggagctctgttgggtagtatttacataagtaaaactaaaaggaattttaatgctagcggtgcaatgttgaaaacaaactaaggctagttttggttgtatagggtgtagaataacattgccaccctacactttttagtttcctagctattaatttcaccaatgtttatttaaaagcatataaaagtttaattgatgctcatatcaacatgaagggagtcacacattaggtcctggattatgaacattttgcagaattagtctaggaattctgctatggaaagtagaagacatagaagaatgggtttggaggtgaattactggcttcatattcaccatacttattaggttaatactctttatatgtttctcaaatgctaattagtgatttaccttgacgttatataatagcagctgtcatcacatctcaatgttttgtgactactttttggctctagttgatgaaatttcaaagagatggagttgagtaggaaaagtgttggaaatctgtgccccttactggcccatgattttaagaacattagtgtctcatctgaaatacagagattaaatgaggattaagtgaaatgataatgtgtcaaggttttagtactctggcctgttacttgtttttctcacttaaagcgaccaggtcccgggaaataggaggagttaaaatttcttaaactttgataaatttttgttagaatgttgtgattttatgaaatgatctcttaagcgctgtcattctcagaagatcatgggttgtcttaaagtgcttttttctgttataaaatcttggtaaaattcaactctgagcaacaacaaatacaaaattgcctataaagataactagtttttattttgaaatagatatttattgatgaagaagaccttctaacttgtaccactcaagaagcagtgaattgaactaatacagtggaaaatgcttgtgaaaaagaccagcattcctttgactctagactaaaggataatgccacctgagcaagctactgaattattgccatgcactctatggctaattcttcacttattaattgagatagtaggcaaacgctctttcacagatgtgttatggattattttttattttattttattttattattttttttttatttttgagaccgagtttcgctcttgttgcccaagctggagtgcagtggcgtgatctcagctcactgcaacctctgcctcctaggttcaagcgattcttctgtctcagcctcccaagtagctgggattacaggcgcttgccaccacacctggctactttttgtatttttagtagaggtggggtttcatcatataggttaggctggccccgggctcctgacctcaggtgatccacccgcctcagcctcccaaagtgctgggattacaggcgtgagccactgcgtctgtccctggacctttttattgaactacaaaaacaaacagataactttcatttttggattactattaaatgttgtcaaactttattctttagggaaaatggaagtataccactatacagagaataactttgttatactcaaagatagaaaatactgccttggctagatgtggtggctcacgcctgtaatcccagatggggtttttccatgttggccaggcttgtcttgaactcctgacctcaggtgatccacccacctcggcatcccaaagtgctgggattacaggcgtgagccaccgtacctggtggaaattatcctttataacagtcaaccactgggttgtatggttgccctccagtgagatcctatgctacatttgagtgccagtatcctggaggagtctgtatcttagtgaaagcaagggcaattagggtattgtctacagtatgcatcctatttaactggctgtcatgatagaaaccgggagcaataagtatcacataagtaaaagctgttatctccatgtatatcattctccccacttttctccttctgccttcaaatctgagcagtctattataattttaggagctgctcttcctaactgaaatatattgctgctttccagctgctgcctgcagatacttaaaaattgaagcaagcctttcatttcatattatctttctaccaatccatgtgctgaggtaatgcactggatatttttgtcattcagccgagcaagggttctatttgcatgatttatcaagttaattatttgctttgaaacagcagacttagaaagacatctcacttctaggtattctgctactgaagatggcactgcattattgagttattgtactgtactgtccagtgaaaatttctggtagacaaaacctcccagtatttggaaaatacccagagctctgctcaagattcttcttttcaygtttttcttcttattgtaccatgtctgaaactttgggatgcatgacctcatctattaaaatttccctgtggttggagcagtgttttcattcagctgcacactgttgggttactctgaatatgtagcaggtattgaactcttcaactgccacaaaccccatgacccatggtgaactgaaagcaagggtctgtatgtagaagggagtgcaggagcactgccacccctcaccaccgatggtgtctgaatgggattgtagagtctggcctgaatatgccctctccttcagggccaaggaccattatagtaaattgtggttattataagtcaaatggaattgggtctctggtttatcataattgttttgaatttcatttggctgttctgaccactctaacttatgaaggaggtagccaattttgatgtattttagtattaaagttataaaactatattgaatttaactttgggataagctcacagatctgaagtaaaattgtcattcatacggcttcactgagtgggcctatcctgggtagatgctaatgtttttcatggaaatttgctgtgtgagtagagatggcaaaacgggtgactgaatgatgtaatgtctgtataacatcactaccacttactgttaaaatacagcagcacattatctatttacaaaggttgcactgatgaaagtaatggttacagttaatttggacagagattttataaataaatagttacaatatcagcataatcagcaataaggtaattgtaaggtgccaggaatggaaacactgtagctttcatatttctatcattttgaaaaacaaagacagttgctcttgactatgaatatttataattatttgggtggtgttgatgtcttctggctacaaagagccaactagtctataaatataaatagactgaggctgggaacagcgtgtacagtgacagtgtccagaaatgctgaatccttaagacttacagtggagctagatgtctgggatctggggtccccacctagacctgaaatgtaggtctcctccccatatctctctcctgctcctgcctttcttgccctctcagggaagtgactatttcctacatgatgttatacaactggtaaaaggcagttggtaatcagaggtctgtgatctctgtctttgtttctttcctgtgcttaatattgtgatatcatataaaactattaaaatctgaactctgatccatagctgattaaacagttactgagatatacctaccgagtgagctgacttgaaaccttgatttaatataagcataatagtagctaaatttcattgtttcattaggtaattgaaaatacaggcaaaagaaaatgtgaaggagaaaaattttatctgtttcttggttcaggaaggatggatccctgtgctctgtctcatcttaatggacttccagcctccatcctcattcttaaattgtgtctagaaattctcttttctacctctcttaggcttccccagtattcaaaccccagctccaccatggagttctgcctttgtgtaaagttttggaatttatatttcttctgctacttctctgaaacagcattgatacaattgtagaactagagaagctatatgctatgttagaaaaagcacaggactaaaattggacgcaggggtatggcttacaatttcaactctgatcctggttgtctgagtgacatagaatgaataaaatagttccagacccctattgttcatactaatttggaaagtgatctgaagtagaaatgtaaatttatgcatcatcagaatgaattgatggtgaagccatggggtgtgaaaaattatccatgaaacattgcaatttatgatatgagaaagaaaagaaacctaaatgaaagccattacttgaaggatggacagagaaagagacattaataagaaaattgaagagggtcatcagagaagtagcaggaaaaagaacaatagttgtttcgtgaagggcatgggggagggtttcaagaaggcagaagaattgccaatagttctcattgctttggaaagatacagtaggatgagaaatgaaaaatgcctaatagattcattaattaagggctcattagtgactggctaaactagtttcagctgtcagaagggtcaagaataaagttgcaatgaagtgagctcgccatgcaaatgaggaagtccgttgattataccttcaataagctcgattaaagaaaggagaaagagtagatctggacttgaattgttgttgttgctgttgttgttaaaatggaggagattctatgcaggggccagattagtcaagggggtagactaaagaaacaggagaagaggggtttaattgatgtttgatgtggggagagggactggaagaagataaaaggaaatgagaccttgcaaatagagagaagggttagccttaaacaggacaagtaacacctgggacctaggcatttctctatttgactaagttaaatatattgtgtatagactgattttccatttacttacttttcccaaagctatttgccttttaattgtctcactgatttttaacaatttcagaaaaggatgggttgaaaatgactaaaggaaaactgcactcagcagcattcttaaattgtgaaattctagtagaaaatatgtttatgtgtagaaaaattgggaactttggtaaagaatttctttttgtttatttttatttttatttactttttttattgtactttaagttttagggtacatgtgcacaacgtgcaggtttgttacatatgtatacatgtgccatgttggtgtgctgcacccattaactcgtcatttaacattaggtatatctcctaaagctatccctccgccgtcctcccaccccacaacaggccccggtgtgtgtaaagaatatttttttaaaaatttacttgaatcttcttcttcgttccccagtttttagaatttttacaatgtctatgatacatgcacctatacccacatgcatgtgtgtgtatattattaatattcggtaaagagaggctattttacacacaataggccctctacaaatatgtattgaatgtgtgttaaaggcacaaaaaatatttttttctctggataaggaaggtaagggaaattaaaagactgacttaatgtcaaatcttaagtatttttattctactattttaaatttcaaataatttagatagcatggatagaaatttattttttggtaatttgataaaatggtttgctaggcagctttaccctttattctcacttttggacgttgcataattactgaactcagttgttctgcatgtaagtgtaagaaaactttcatcttcacatcagaatatttggattgtaaacaacatttaaagaatgtttaggtgttgtaaaacaatgaagtcaatatactcttaagaattttagagttagctgttaccataagggaaaccagcttttttgtttctgtgaatataattgtaactctccagtaaagtgttaacattcattaaaacttttactagttgagttctggtttctgtaaaatatttgttgatgaaataatttcctttaagaacatgctataatttgcatgtaattacttcagcctgaccttgaacagataagggctgaccattggaggctgaaagcatgtgtgattaaaagttagtctagatgaaagtggcctaggcttgaatgtgagcttcatcatgtattagctgtgtaatcttaagcaagttagtttaaattcctacacttcatagtccatgtaaaacaggaataatactagtgccctcatactgtcataagaattggatgagttaatacttataaaatgcttaacacattgccttactctttctaatcatgttaaccattcttattgccagttatatagatgcttacgtggtaaaaaagacatgaataaaaatacaacaaatttagaatgtgtgagatatatcgtaacattaaacatgtaaaggaggctgggcgtggtggctcacgcctgtaatcccagcactttgggaggccgaggcgggcagatcatgaggtcaggagattgagaccatcctggctaacacggtgaaaccccgtctctactaaaaatacaagaaattagccgggcggtggtggatgcctgtagtcccagctacttaggaggctgaggcaggagaatggtgtgaacccaggaggcagagcttgcagtgagccgagatggtgccactacactccagcctgggcgacagagtgagactcagtctcaaaaaaaaaaaaaaaaaaaaaaaaaaaaaaacataaacaaaaaaccaaaatacatgtaaaggattaaatgctagaggcttatcccaacttagtaaggaatatgataattttctgaggcataaaatatatgctagcttccttacggtatatttaaccaagaaaacaagggtagcattattcaaactactcttaatttttaaattcaacttttatttctgagataattataaattcacatgcagttataagaaagaatacagggagtttttgtgtccctttatccattttccctcaaatgtattattttacattttgcattaactgtagtacattatcacaacttggaaaccgatattgatagaacctgatcttattcagaatttaccagttttatacgcagtcatatgtgtatgtgtgttatttccagttttatcatgtgtagagtcatagtaactaccacgataatcaagatatataacagaattttttttgtcacctgaaggatcccttgggctaccttttcgtagacacagccccctccccttgttccttcagaaccactcatcattactcctctgtaacgtcacaatttaagatttttgtataaatggaatatgtgtgtatatgtatgtatgtatgtatatggtatgtatgtactatgtaccttttgggttcagttttttcaatctagatattcccttaggatccatgcaagttgtgcatattaatagttcctttattctgctgaatagtattccactgtatgccattatttatttaactgttttctcattgagggacatttttgtttttttctttttggctattacaaataaagctatgaacactcatctaaatgtttttgtgtgaacataaatttttatttctttgcaataaatgcacaagagtacaattgctatctagcatggtaaatacatgtttagtttcataaaatactgtcaagctgtttttcatagtggctgtaccattttacattcccatcagcaatgtatgagtaatccatcttcaccagcatttgatgctagcactgtgttttattttagctgttccaatagttgtttagtgatctcattgaaattttagtttgcgtttctctaatggctgataatatcaaatatgttttcatgtgcttgctaaacaactgtgaaatgtctttaatgaattgtctgcatttgctaaataaatagttttttttaagtgctgagtgttcttttattgatggttttcaagatttttaatgttctgtatttagtatggtaaataactgtgagtttgactacctcatttctgtatacatttgtaaaaaatgacagtttttttagtgttttgacaaaaattttcaaaggacattgaacaaactattttattacttattacaaagatttatttgcacagtttcaactagcatatcattttcatattcctacactactgagcaaagtgaagactatttgcagtcattataagatgttatatgtgctttgttaggggatactgctgtggaaactcatagcctttgagaatttgatgtctcagttgggatctgtctatgaataagagttctccaggcagagacagaggggagagtggtcctccatgcagagggaactccacatgcaaagacctggaggaatgagagtacgtggcactttagaggaaataaaaaaagttcagtatggctgcagcatagaccaagaagggcagtagataagctttgaagataggaggggcaggtcataaagacataatctatgttaaatactttatctttatactagggccaaggaagaggcaatcaaatctggactgtacagtgatccctctagttgcagaatgaaaaataaattataggatagtgcaactaaagcacttaatattgtatagtagtgttttacatttaaagttgttttagtgtttatgtttgttttagggtttctgtgatttttactaatggaatatttcttttttttttttttttttttgagatgaagtctccctctgtcacccaggctggagggcagtggtgcgatctctgctcactgcaatcttcacctcctgggttcaagcaattctcctgccccagcctccttagtagctgggattacaggtgtgcgccaccatgcccggctaatttttgtatttttgrtagagacaggtttcaccatgttggccaggctggtctcgaactcctgacctcgtgatccacctgccttagcctcccaaagtgctgggattacagaattgagccaccacgccaggcctactaatggaatatttcaaatgattatatactaatcagaaggcccaatagaaaaatgtaaaactgactgaagttgagctacattgaagaaaattgagatggatgatctggaccccagaaatctgattccctctttcaacatccaaccagaccttgaccccatctctctaagcccctactacagtgttcctggcaggctggagtggactgcaaggagaccctttgtcattttgactatgatatttagcttttatttgtttcatgtaagtttcattgcacgatttcatttttgaaaagattctccatgaacaaaatgtttgaaagtttttgcccttagggttttgggagttcagactggtaaattctaattttaagaaggggaattttaaactctggggtacattttaaggaagaactaggtgagaaaatgagctaccaggaacattcatttaatcaatttacttgtgaaaattacatgagaaactgatgatctgtattttatgatattttttctttatttttgaggctgaagttctttaacaaacttttcagttatctatcaaatgttccttcagatatttaaggaattatagtgatgattttctctctctcctttttgtctgaacatgtcctgtttaaattcgcgttcattttctaccacatagtacacactaacctctctgcctctataaaataagaatactgttgatgtggatttacagatgtctttttcccgtgtttatatcaccaccgcttattttggcacagtaatgccaccttttatttacttaaagtgctaagattaggtttaaaaatctcatttatcaggcccttgctcttcaaagagtagaagatggtagaagttataactccaagactgaatgagtcatgtttcatctgtagactcagggctgtctcttttagattcctggctaatttcaggctttgcctcacttttatgattcatcagcacctagcgaagtatcagacatacttgtttgtagaggtgcttagaaattgaagaagagttgaagtaaacttgtcactctttttttttgcttagcttcttttaggttagagggctaagagtatgacattaaactggagataaaagactcaatttagtggctctaaaggagttaatatggtttgcacattgaaagctctactagctaacaggtaatataagcttgcttggtgataacttttcattttaagagtaaatattaaattgtgttcaaatcccacatattttggcctcatggacgtataggcccagtgtttgcattactttaagttattctagagtaactagaaataccaattgttacgttgaatttttctttaaaaacattggcttaaatatttacaaagcactgtgcatgtcaaacaaaacatttctggagacagattgcacctttcatccatctgtttggaagccttgatctagcatactcattactggattctatcagtggtcgttggattgatgaatacctttctgtgcactgcctctaccttctgttttcttttcctttttcctttaagggcatttgatgctgttgataagtctcctgttcttgaattttaacaaaattaccttcctctacttctacttttgcactccaacatatataatacctgctgattgcttcttacaaaacactgaaggctttaaaattaagaacacttttatatctgaccctgattgctacctttaatactttctaccttgctgtgagctagcccatgggtgccctgtaaaaatctagtgtctttgatcctccaactcctttttctggcctgttatttctggctcccatcctgctatttggagtttttatttctccccttctgccatccccatcaagtgaatgcatgtatcagtccatagacatggacttagtacatagttttcttagtacatgattgcctctcagtgctgctccacattctaaaactagtgggtggattgcccatatgtgctattcttcccgggacagtaatggttcatacctgtagcctgggaatatttattaatagtgccctgtttctctgtgcaaaactctgtgttttgctttggaggaagacttatgtggtcacctgacccataagtctcctataatcattaaagagtttccacagttggcaaccttacccaaatcccaatgcttaaatagattttaaatgcttaaaatttccttattacccaagtaaaacagaacaaatagactataacgcctataccctttcaacagcacttcttttcatcaaaatttttcatgtattttacaaataaagcctatgacacaatgatttttttattcttttttttttgaacggtgtgaatatgtttctgtctttctctcccttataacagaatcagcttctgaggatatgctggcttgttttttaactaaggtggtaaaacagcagcagctctttacctaaaatattgcagtgggcacctctcacctcacatttcatttgttcaattatttatatttggtacaataaaagagaagataaggcagagatcatgaaagcattaaactacaatgaatttctgtattttcctgttgatataatctctcattcatctgcaattgtacattcaattataaaccactatccagggagatttagttcttgaaaaaaatctactagggaatatttatgggcaaatatatttcagtgttttatttcctgcttacacttgattaaatgaatatgcagaagaggtgtgaggaatggtaacactccatgattttaggtttgctatagtttattttccattgctctaggttgacagtgaagtgttgttcatgtttctggacatcagatttgagttctttaggtttctcttgggaattttgtcttatgccttattcatacttcttttcatgattttaccttcatttctttcttttctggtaattgccttcttatgtggaataagggagggcaagtatagtatggaaatctctgtttgcaaaagcccttagcaattactaacattcttagataggtggatttttattcgctttcttatttaataaggacacagtcatttctatgctgtggtgcctacatatttttattcatcagtagccaaattagtgattatttttcttatcagtgttcaacaggaagtttgatttactccacctccaatttagaagttaaacaaattgttatagagctttcaggttttcatacatatcttattaaagaaatagctaaaaatacttaataagtaactgaaaagtaattctcttcaattcgaccattatattggattatatttccagtaaaacttctcaaagaatggaaatagggaaaaataaaaatcgatcatacatttgttaacaaactaaaatatttcagtttacaaaaggaaacggattgtcattcttacagaaaattttgtaaacttatggctttaatattcaccatgaataaaatacaataaacatagtttttaagtacaaatatattttaaagatttggggaagggtttttgttatgttaatataatgaaaagaaattattttaatatatctaacaaccattttatttgcaagtgaaagacacttttttattggactagagatggtggatactgagttcaaaacttcatctagtagtctccatctggatttgactaaaatagcttctttttggcagaattttacattttgggtctttgcttaatcagatttgtttcttaatattgcgttctttcatatactgaattgattaattggaaaatttatttgtgttttatataaataagtatgtacttggaaataatgtagcctcatttcatgtttctgtaataataatgctataatgactcttgaatatttttattctccacagctttttataaaagtatatgtgttgtgtcaaagctacaatagatgatctgtacttgaaagccatatcttaactttttttgtcatatccttggggtaactgacatagtctaattcccataggtattgtatttctgataaagcaagatttcaagaacttagaataaactttatgaacaaaaataaaatcgacgtattaatgttgctattttatggaatattatgatggttgcacttttaaattttaattacaacgtagagatcggagtgttataaataaataaaatgtgggaaatttttagatttcttaaaaagtttatttcctgataatgtaacttagtagctcagtttgtagtgggttggatattaatgtatttctctcttttaaaaccatgttttacacgaggaaaaacagtaagtgagcttaaaaaagatctgacagatgagattgctttaccgtgtatttatctactgtccccttcccctcatacacatactcacatggggacttttacagtttaaatgaaaaccataaaggtccctggtataggtttgactttcctgcttcttaaaaacatataaacaaacaaatgaaaaaaaatcaacatatcacattgacccttcttcacggtaaattcatctccagtttctgcaagtttagaggaccctaaggtcctgcaattaatttagtcagttctttcagttgcctgaattagcaggatttttgtgatgccgtatgataagagagaaggtataaatagtcctatgataatatcattctcacggtcataaagggatagaagttccctgagtcagcatgtttacaaggcccctcttctcacttgtcttccccttgttccctctgatcccatcaagcttgctggtgaatcacacagatttcttttgcagtcagagatcaaggttaaaatagaaatttgtattattgtttccagtgagataacattatattattcatttattaggagctttatttactggtgcaggatctcaatccaaagcattttatatactatatgaaatagaatggttttccttttcttttgctgtcaatacaatgcagattccatgtctctcagtaaacaggcaaatcttagtgtttttagcattttaatcagttaaagtattgtcacttaagatcagacttttgttgcatgtaaattaatgttttcattcctttcctatttttatagggatagcaagcatgagattgtcatttgttgtagacttcctatgtgtcaagccttatgtttagtgctttgctgatgttttccaatatattcctcacggtaatcctatgaggcaggctgtattatctctgtttgacagatgaaggggctttcttccagaaaggggaaacaatttgttcaagagtgcacatttgacaaggaaggttccagtaattaaactggtttggtcttactccatttgtattgaagggaacatttacaggctgtataaatgttttatctttctttaagatctgtctgtttactgagagaaatagaattttcactggattaatttgttaggcaactaaaaaataaagcaattctatttcatgtaatatataaaatattttagattgggactttatatcagactattagtaaagttttatcatactatagaaaattggctatatattatactatagaaaaattttatcataccatagaaaacttcaacttttaaaaatgacaggattacttaagatcacacaaaaaagactgcttctctattttcatctttatctgtttccttctttaaatttaccttctttgaatattaatattttttctacatgtcacttaaattctatgattttcagatttttaatctataaaatatatggcacaatcaaatgatctcccaggtccctaaaaatcatagaattctatgagattgtggccactcagagcatggcagggaagacatcagtaatataatatccttgtatccttcttttctttcctgcttctgattgttattcattggaaattttttcagaaagcaactctataccaaggtgaaaggagtttctttcttgcaagataaataagacatttacagcctgaaatatataccttttacaatataacttaaaaaatggatacaagaggtattaagaaaaaacacctaccactttcctttgtagttaacgaagattgagtgcttctattttgaggattagacatatttaattttaatggaaataaggcttatacatttagattcattatctcacagcctttggtataacaggtaaggtttcattaaacaccttaatgggaaaccagatgtatcagtgagaagggatacaaatgcatgtagtatatattctccttgtatggtgattagcacatatattatctctccagcctgagttatgtactgaagaggaattctggactgcattggaggagaaataaattgaaaaacattcttgcttctcctgaagctaagcttcgcatcataacctaattatttgtttctcagatgttgggcttttctcaaatgtcagtgattcaattagccgatacttattgatccctgaccccgtctttagtacaatgctagatgctgtggtttgaagtagtacagggtattgccatcagcaagatgacttgtcttcttgaggagatcgtgaacatactcagaataattaaacagatgacaggatgagagcagctactgtttatttgatacttacattatgccactctcagagattttgtttaatatatgtagtgggaacaaaagtgcatctttttgcctgtatctaaatgtgtaattctctttggtgtcaaaccaaaaaaaasatatatattccatattaaaaagtgcttaaaatagcattcactgaagactccctcagatgtatgtgtatgaatacatgtatctatgaatttatgtttgaatgtatgtatgatatataagtggaaaaacttgcttagaaagaactctctctgacttcttaaagtcctacatcacatagtagttactctgatttttgtgcatctccaccaaaaaaaaaaaaaaatcacctggcttatactgagacctactttccccccccattctcctacattcaggataattttcttctgttccccaggtaactttttaccctttatcatataatcaaattgttttctctagattaattaaaaaatttcccaccattttttcttctgtctacagaggtaccaacaaaagctgagcagtgcagacaaaagtcctctttagaagtgaggggtgggccaggcacagtggctcatgcctgtagtctcagcactttgggaggctgaggcaggcagatgactttagcctaggagttccaaaccagcctgggcaaatgacaaaaccccatcttttccaaaaatacaaaaaaatttgtcagtttgatggtgtgtgcctatagtcccagctacttgggagactgagttgggaggatcacctgaacctgggaggtcagggctgcagtgagccatgatcgccatgatctgccaggacaacagagggagacctttaaaaaaaaaatcacgaggagtgattggagggggtggataaaagactgaataatcatagtctaattttgttgaatcaggctgcatacagcctgattgtacgttatagggtatcatcttatgttttacattattttgataaacacagatctccaattgttagcgaattcagcataagaatcctgatgtaacttgagttgacctttaaaagatgagtgtgatttcatttactaaatggtgatgggagggtttctgagagtgggagcagtattaagtggatggtgagaggatggcataagaaacatattcaccttggtgctgttgatcaggatatagtcatttacccatttagaatagagaatccatgtgaggaagtttagcttcgttttgggtgagaagaccaaggcagtattgctgagatactagaagccaaagcacgttctatcaaatgcttggaacacttgatagaataaacatgttctatgtatggccccaacattcctataaggcagatagtattatctctcttttacaaataaagagcccaagtctataaagagggaagtgttacgaaaatcacttaacttataagttctgatgccaggatttgaaccaaggttgatctgaccccagagttcactctcttagctataggcttagaaaaacatacaaaattgcagatgtttcttagcttaagatctgtcgtgtttatttcagctggacttgggagatataaggactttggctttgtatattttgtcaagcagctaaaaatgcaaacaactctgtttcacgtaatttatgaaatgtttttggataaagcatttaacagctgactttctatttaaattcctcatttgaatggagtttgttaatagaactttaactgtgctatagagttaacctttaagaattttttttatttaaatgcattcatattctagttctttattttattttttgtctttaaatgctagaaagccttgtgatactcttattaatgatgaaaatattgattcttttttcttttctttttttttttttttgagatggagtttcactcttgttgcccaggctggagtgcaatggtgcgatcttggctcactgcaacctccgccttccaggttcaagcgattctcctgcctcagcctccagagtagctgggattataggcacccactgccacgcccagctaatttttgtatttttagtagaaacagggtctcaccatgttggccaggctggtctcgaactcctgacctcaggtgatccacctgcctcagcctcccaaagtgctgggacaggcgtgagccactgcgcccggctgattcttttttattttcatatagacatatatatatcatctgtcttactgcgttacgatatccagaacaacattaaataaaaagatagtagacatcttttgtacattcttgattctaaaagaaatgtttgtgaattttcaccactgaaagtgttgactaatacagtttttggtagctgtactttttcacaataagaaagatttaattcaggcagtctctacccaccccacccaaaaaagtttcttctttgaaaattttctgtaataaacctgttctttaattttttaattgtttttttttagaaatgaggccttgctatgttgcccaggctggattcaaactcctgggctcaagtgatcctcctacctcaggctcttaagtagctgagactacaggtgtgtgctactatgcatggcttaaatctgttctttagaaaaaaaaatttgtagatatttcttttgaatttataatactttttcccttggctctaccattttaattttgttcacaatttagattttattttgttttaaaactgagaatcaatttacaatacacttctatataatttatgaaaatgtattagagatccagcacactgctattcagggtggtgatgggacagaggtataactacataatgagcctttttttttttgtcataactgtgtttagtttaaatacttcaatactgagataaataaccagtacctggctttaatcctccttggatctggcttagtaggcaattacaattgaccatctccattcataattttttgtagaattggcttttggggctttggtgaggtagagtaggcacttatagaaaccttggtctttgtaacaagtagaagctgccttcatgttactaattattatttaatttctataacttaaaaatttttttgtgtgtgtgctgaaacctaggatctattttctcttctcttctcttctctttttttgtttgagatggagtctcactctgtcacccaggcttgagtgcagtggtgagatctcggctcactgcaacctccgcctcccgggctcagacgattcttctgccccagcctcctgagtagctgggattaccagcatgtgccaccacacccagctaatttttgtatttttagtaaaaacggggtttcatcatgttgtccaggctggtctcgaactcctgacctcaggtgatccgccagccttggcctcctaaagtgctgggattacaggcgtgagccactgcgactggccgtatataccttcttatgccttccattgttatgtaaataatttgaagttacttatcactaagataattggccacatagcaaagagaaataaggaaaaatgactcttgagctgtaggaatgcaaatataatttaaaaatcaagtccatgacaaataaacctgtattctccaggcagtaaggcctacgttgctgttctagttgaaacttaaatgagatactaagctttctggtaatcaacttgaaaaggaatcatacaattagttatttaattttcactttacttttttaatggcaggaaagcctttcctagcatcaagttctaaacctgcaggcaaagacaaaggcatagaaaataaagtgatggttctttacatgtttcaagggggtaaatatcttgaagcatctttttgaaaaaatgtttttcttcagaaaaattaaaattatggattttctttcacaaaaattaatttaggcctgtgtacacataattttattccaatgtaccttttggacttagtcttttcttaatctacagttattggtattgtgtgtgacaaattctgtttgagtctgagtttattactaagtgagtgaaggaaatgcttttcaaactacaatgtgaatgcagaattatctgagttacatgaggctttttgaaaaaattacatatttttaactttctgagtctaaaattaatatacatatacttaagataattatttattaatcattgagaaataattcagaggcattatttgcatttgtgtttatgttacatctgctaagtgaaagggtgaactgtatcacattttagagtacatatagaaaaaaaatcaaatgtggcaaataacacataccataagcatgcaaaatttataataagctgtgagatactagctgacatcatattgatgtttttaaagcacagatattgtgcagttcctgattttgtacatattaacttggaaaagtttactaacaataaatatagtaaaacagagaactgtttttattaaagcagatttaaacttttcctgttattttggaatgtactattaaatctattagtctatcaaaagcgtggatcagtggctaaaagttaatattaaagaaaaataacaaaaattatgatgacattaactcaaatgatgtttcattatgatcaaaaccaaaagaatcaaacctaaaagtgaaatgtaaaatataaaacaaagaagtacctatttgccactcttaaatctatttgcatttttggttccacaaagcatcattttatattaaataacaaaggatgttaatttaaactgtattgattttatacatgtgttgtatgagtaaacttatggtatgttaatactcagatatttatctgtgcagagttcaacttaacactgaggtctgtgagaaagttttctttttcaaagcttgggattttactcatgtttgagaaacattgaattaggagtttacccttaaactctaaactctttcatgcccatagtgaattaacagagcatgctttcttgtacatttagaggttgttaaagcttacccagttgctgggtctgctagaatggggggattccataaggaaatcagtttactgagactggtgtctgaaagaaatgttcatcaacagagaaagtcttgaagccctgtctggttgccatgtttatgctgtgggccatatggttatattctgagagtttgaaccagtgaactcttagctatttttaaaaatttgatagagatccaagaaatggtttacacttagacaaagtgacttattttaggaggctgttttagccactggagaactccaatgcttcttgaagttctcaataaatctttttagtttgtctaagaatcagatccttagatttctgcgtcttctttttgcttagctccttaacagcttgaccctctttcaccaccactctcttttactggttttattttggatgggggtggggtgatggtagcaattctgacctttggattttagtccaaatattgattctgggcaactagaacagtggccaaaactacctctcttactcaccctaagaaacttggttgtgggactacagctacctataaaagaagaatcagatgtcctgtggtattattgatgtcccttgtgggaccttttctaagtctaaataagtccttagggtcaagctgtttctggaagcctggcagaaagtttatctgcagcaatttgtcaccatgagcttacttgttagactctcatttatttacttatgttcattttcttaggtacagaaggatatttttttttctgtgttccaggaagcaatttttgccaaagctaccgtggggaggaaaattatgattgtgtttcaatcacaattagttgcaattttgcctctccagatacatatgtgtgttgtagcagcttgtcagttttttcttaccccaaacacattgtcttttgaattgaatgctgatcaggataaatatataacacactcaaaggggaattttggtcttatatttgggaaaaatacattagtagatggctactcagattcaagatgtgtttagtgagggtcaagaggtgaatatgcttcagatacctgaattagttacatgggcttgttagtgcaagattaaatggctttaatttaactgccgatagagtctgttgtgggttcctggaagtcacccaaattgttaatcactattgaaataacatattggtaaaaaataagaaaatttattaattttaaaagttagctgtgtaagttagaagcttagaatgaattttatttcccttgtcctctgtagtattttactgaaaaaaggtttgtaatcagattgctacattccatgctccataataaaatacagagcagcattattttgataaagtaaattgactcttatattttatttataaaatatttaagatttttttgaaaacttttcaaaagcaaaaaacataatagcattatgggatttatatgtgtaaatgcatatgtagatgatttacaaatatgtttgtagcatctttgctgggatgtctcaacaaaattaatgcctccccttctttagatagtatttgttgtttttgtttacggcagtttttcctatatttggtgaatctcttgccttatgagtttttatagccccagaaagaagtaaaacactcaccttttcagccatccttaactaggacatcaacaggtgaccaaatcacaattcagaatacctataagaacattgattaggaagctattgagtaagaggaggcagcataaagatttccttctgcagagaggggaagcatagacttccaggggcagcaaagcacaggacctagcctgagtgttgggagaatgttgtctgcacccagcagtaggtctccactggtggatatacttgagttattatttgggcttcctaatgttctttaatacttttttctggttgtttttgctgaaagtgatacagtggattctgctgtttacattgaagaacttgaactcatctttttcccagccttgatcttcatccagtgtaccatggctcagggaatggcactgctatatatttgggtgtagtaacaagaaatatagttgtatattctggatacctgtctcttgtatatgttatgcatcaccaattttgctgtttttacctcctatataggtcttgattggctgcttcacatcacctccatcatctattactataattaaaaacatttttcctctattgactgccacagctactatcttcctggtctcccatacctattttgcttaccaccctatcactcatatgttttatacattgtggccagagttatttgccagaatgaaaatctgacttatgatagcaaccttcatctcattcagcttaaatcttttctgtgtttaactataacatttaagataaagacaaaactgtttatctttgcctgcaagtcctgcttggtctgtttacttctttgatctccattgtcatcttccccattttctcctctgcagccaaactttcagtctcttttattcattgtacttggccctcttctaggtcctttgcacaagtggtttattttgcctgaaatgatcttcctaataactctctttcattcttcaggtcacagctcagacatcactttttcagagactttctcaccttcctgatgaggtcatatctccccattacatgatttcatagccagactgtcttgtgtagaggtcatcacagtttcatttggcacacattttgttgatgctttgattactcgtgtgatgctgcatccatgcagaagaagccccatgaaggaaaagtactgaaatggtatctgttagagtatttcagattcatcctcatgggttttcaatgcaattttaacaatatttacatcacatgatccttttgctgataaacttcttgttcactttgataggtggcataatataggagctaagggagataagtttattgttaggttcaaactgagatctgagcaggttacttaacccttctccacttcacgttttcctgtacaatatttagcactttacatattcagtaactttctcactggaggattgggtaaattaaatatttttactgtcttaagctattcttttaattatttatatgccagtaagtcaccatcaacacttccactgatggagtatcagctttctgtagatcactacacagaaaggcctaatgagaggtaatagcccttaagaagtttactgctgagcttggaaaattctacacattctaacaaatacaaagtgggcaatgtaaatttgtttattaactaaaaagttgtataatcagacataagagcttatgaagaaggtaggaataaaggttcttaggggagaaaagagaatacaagctttgcaagaagaaggggcacaccaggcaaaaatgcttattttattattattatgaaccatgaactgttaatgagctatgagttcatgctggtggttcatggcaagttagcatggcaaggtttttatggaccaagtttgcgaggatttttgagcaccagatggaatgtatgattcttacttgtgcttgagcatgcagttaattgcttcaaccaatagaattgtgttgttactggtgaatgtgtgtcaccatcactgaagcaatcactactagttcatggtgtttgcagagtttaatccctgcttgtaggatcattgtaaaggaaaagaagtttttgtttatttgtttgtttagttacagaaacagttcttagggagatacttgatggtattttagttagaagaagaaaatgtttgagatatattcttgcttatggttattctcaagggagagaaatttgatcctgtctgtatgcttgagttgcatccatttagcttatgaatgttaatgaaagcctgaaagtatatcacaatagtagattgaacratgtgacagtgaaatttttgaaactattaagtttcttcttccctcctgtaagagaaaaattacctcccattttcccagcgccttggggtaggggaaggacayctgtgcttgattgttggtctgagatctaactgttacttcttttggctgaagttattttttattttagtttctacagtacaccccagagggaagctttaaaaaattagtgtgggaactaaaactctacaatttctcaatgtttgtgtttacccattgagccttaagttagcatttatgaaaacattaaagtacaattctcagttgctctcagggcaaaaaaacaaacaaaaaaaaacaaaaaaaaaacacactgttggaatggaggtcacttgcgtcatgcagcttttctggttatgtttaaaaggaatgttttgttgaaggaatatctttgggtgattgtatttgttaagacaaagttgaattaattgtatgctacaatcagagaagtatttgcttgctcttcctttcctcaccattggtcaatgtggcatttcataattgaccagatgtgttttggctattttttaaattttgtttttcaaaataactgcattgctagcactgaaagtagaatagcctatcccagagacctgggatatgatttaatattatactttgctcaattattggagaccactaattccattaaagctgccttaagttaatgtagactgaggggattttacaagggtttcaggttttttttttctttaagtatatattttataccaaaaccttgagctatagttgacgatcttgtgaccaaaagcaacagtctcaaaatttgaggagatggcaccattcgcttttacttttttatatcctaggatctcagtttcttttattatatttgtatggtttatgaagctactggtgagatgaaaaataaaataaccctattttctctaccaccctgttttcctctcttttctttcatcttctcagaacttaacattttaaagtgtaagcacttatttcatccctttttccttctactacttgagctcttttcttcattttgctatgcccagtctctcattttttttttttttttgttatcattcccttttgcttttattttccttttcttgtcttagaacctctaaggcagaactgtttcaaacaagcagaccgatttttggcttaggtgatagtactttgtaaataaamaaatgaaaagatgttttcctttgacagttcccacttccgtaatccttgcaacaatccactcaaacagtgcttttattatatctaagacatttatctgttccaggcctcagattttcatcagtaagatggtagagaggagacatagtggaaagtgacagaacgtggctgttaatttaggcctctgacttcagagcctgaattcttaaccatttcttttgtttgtttgttttttgtttttgagacagtgtctcactctgtcgcccaggctgaagtgcagtggcatggctttggctcagtgcaaacttcgcctcctgggttcaaacgattctccagcctcagcctcccgagtagctgggattacaggtgcccgccaccacgcctggctaatttttgtatttttagtagagacagggtttcaccatgttggccaggctggtcttgaactcctgacctcgtgaacagtcctcctcagcccccaaagtccggggattacaggcgtgagccaccgcgcttggccttaaccatttcataaacaggaatatgcttttatttgggtgatgggggagattatatttttccttccttttgaatatttcatgaagtgtcttttattgtattaagaacttcagtggacttaaagtttaataaaggaagaaacttctttggtggccaattgaactgcccctgtgacctgatgatccttgttcctgagaactgagttgaaaaactttgttcaatctgaattcttctctaattgatcattacttgccatttacttattcaggagagcagtgaccattgttacagttataaaattgaatagttataattgttattagttttgagtcacagtaaggtctagttgttcttcatgtacttcttgtactaaaagtactttagttcttctaggttatgttgtctgaaaagtgggaactttcagaataatagactagttgagttggaaggaaacttacatcattcagtacagctacaggcataccttgttttattgtgctttgcctcattgtactttgcagatattgtatgttttacaaattgaacattttggaaattctcacagtatttcattttgtgtaacaaaatgtaacattttggtaattctcacaatatttcatacttgattattgttaattatatctgttatggtgatctgtgatcagtgatctttgatgttactgttgtaattttttcatgcaccacgaacagctcccgtataagatggtgagcttaactgataaatgttgtatgtattctgactgttccacctactggctgttcccgtctttcttcctctcctcagccctccctgttctctgagacacaacaatattgaaattaagccaattagtaaccctacggtggccctttaattatcaacttaaaggaataactgcaggtctctcactttaaatcaaaagctaaaaatgattaagcttagtgaggaaggcatatcaaagctgagataggccaatagctgggcctcttgttcctgttagccaagtttcgaatgcaaaggaaaagttcttgaaggaaattggaagtgctactccagtgaacacccagatgataagaaagtgaaacagccttattgctgacagggagaaagttttagtagtctggataggagattaaaccagccacagcattcccttaagccaaagcctaatccagagcaaggccctcaacattgaggcaagaccctctactagcaaaaagataatgacttgctgaaggctcagatgattgttagcattttttttagcaataaactattctaaaattaaggtatatattttatatatcttatataccttttttttagacatgatgctattgcacacttaatggactacagtattgtataaacataactttaatatgcagtgggaaacaaaaaataaaaatttggtaccttcagaaataatgtgactaccgagtagaatgttttgactttgagaatattcatttacatagaaatcatagatgtgttgtgcactcattctctttagaccttcagttctggtctttaatgtttaacagtgttgaagtatatccagacaacaggtgggaattgttagcatgatttttagtcttcaggcagtttccagggaatacaggccacactaccttctcttacctttaattgttcatttcaatcttggatcttttggaaaggtgagtgatgattacaaaattggccacaggacaaagcctttattgccttttgggtcatgttactgattattttctcttaagttgcttttctttttagcagctacttctcaaaacttttcactactatgtaacataaaagctatgcaggttggatagctgtaggagagtgccatgatttcagaaattggaaaaatcttaaaacaagagttcttaaacttagatcaatgagtcctttgaaattgttggtgaagtaagtgtgtgtgtttcttggagtgggcgttgaggcaacaatactttaaatttacttcagatttcaaagaaagagtgagagagggagggttatagaggaataggaaggataagactgagaaagaggcctgactcactttgggatgaaagggataggtagagttgtgaagggaagggttaagaaaggttatgaaggttaagtgccattaagttggaagtttttaagtgtaccaccctttaacattgtcatctcatttttaaacttcgaaagtattctcttcatacattttctagttttattttctttactgtttggtggaagaaggaatgagtacgtctaaaggaacaagtattgaagacccatctattcctctcgtcagtgtgccttcgcacatcatggaggtagtctcatttagtcctcacaccrgacctcagtggggtgggcacttcaagatgaggaaacaagacagagaggggttaaattatttgcccaggataaacaagtaaatagatgtgtaggaagtagggaaaattggagtcctggaaggtactggaaaggaaatcaaaacctattataaaattagccacttttaaataggaaacagatggcactaatccttttaactatttatgacataggtttcctatgtcataaagatgaaactggaaattttgttcgtcaaagtaatggccaagtacttgttttttgtctccttaagatgtagtaggggaaggggattaaactataaaacaatgcttggccaggtttctaaatcttaatgtgtagtgtagcgggtaaattccatgaggacacccacttcctaagaaggagaaatttgctactttctactgaaactttcattttagtttttttgtgttgcctgaaggtttttagaagctattatcttaaatccatacatttttctattttcaaatgtaaactggctacctagaacaaatacaaagcacttcctcagagatcaagagaaattttgtcattcggactgtgaaggaaacaggtttatatttttacaaggcaatgggagggacatgtcacggatactaaagttgttggaagtagactcctgcaaagatgcaaattcagttaatttgttttgaagtttgggggacaagtttactttttctaactttttctgacattttgtaatatttgcctcatactgtcttagaaacaaactgtatgatgtaggggatagacttcattagaagagaagcatccatcttaagaagtaatagaatgtaaaagctcgaagaattaaaactagactgtacaaaaagtgatggcactgatgtccgtctaaccaaattaatggagtattttagggttattctcaagattgaaaattttgcttattatcatttcaaattttactctttttttttctctttgactatctttgaaaaaaaaacaatacttaaaaaaatatttttgcttaccttcagtggagcttgccaagtttacaggttacacagtccctctgttaggggctggcgaggccaaagaggtttctaatcttaaaaagcttgcactagggttttggggatgcacagacagatatggtatattttgtacataaaagagcattatgtaagtgctatgggaatgcagggcaggaaacacaaatagatagttgtccgacttttttataaaacatccaacttcaaactgaatactccagaccttgttctagatttttggatgaacaacatacatgaaatcccaacttttcatggagtttttcaattaagtaaacaaataaattcagtaagtggaaagtgctataaaggaaataataaaaagtgatatgttagaaagaaccctggaaggaactactttaacagacctaggaatgctgcaccaatagatgaatgatgaaaatcagccagctgaggacagagcatttcaaacagaggaaggtccagtgcatggagactgagacaagcataaacttaggtgtttttttgttttgttttgttttgtttttgtttttgtttttgtttttgtttttcagaaaaaaagcccattgtatctgaaacatcttgtgtaagggaagagaggtgtaagaaataatgttggagaggaaggcaggcaccagatcatgttgaagctgaggggtggggctaaagagtttggattttattctcaatgcaatgtatgagaaagatttaaaaaaattaacctggctatgtatcagaaacgattgtagggctgctagtgtggaaatcataaaacttgctaggattccattctatttgtcctcctgagaggtaataggagtttggtaaaactagtggatatgaagagacgtgaatggattgaggagagagcttgaaaatagaaacaatgagaattgctagttaattaaaagaggaaagtgaaggaaggggaaaaatcaaactgattcctagtttgatcaytgagtccttagttttaataattggttatatttgttgccacttaatcagatgaaaaaaatagtggtaggagaagaggcttgaaaaaaggaaatgaaaagatgaacgatatgaaaaggagggtaatggcattgccttcagcacaaaggtaatagcaacagaagtacttagagagattaattttataacaaagaaaaaaaatatccccgatgggctgagacccaaatcatgatttcacttgtcactcttctttctacttagagatcctgattattgcttcttaagctgtctgggcatgaagcaatattattgtatagtgtctttagtttttttacaccaacagtttctggcatgttctttgttactactgggaaaatctcactcaatgccaagagctagctgttttgcacagtgcgttggtgctttggtagctattcaagatggtctccagaacacataaaaatacttttcttatgaggatagaatattacttagtcctctgtactcctccgctcatacataacaatctgattctctgatgttgagagactagagtggaagaaagccctttgtgacggtcaattttgtgtgtcaattagactcagcgatagggtgcccgaatattaggttaaacattatttctagggatgtgtgtgtgtgtgtatgtttctggatgtgattaacatttgaaatggtacactgagtaaagcagatagccctcccactgtgggtgggcctcatccaatcgcttgaagtactgagttgaataaggagtaagaaatccctctgtgtctgactgtttacaagctgggacatcagtctcctgcctttggacttggactcagattggaacttacaccaatggctctcctggttattggactcagacttggacttgaactggaatttataccattgactgtcctgtttctcaggcctttgggctcggattggaattataccatcagctctcctgtcctgagtctggacttctcagcttccacaatcatatgagtctattccttgtaatattgtgtgtgtgtgtgtgtgtgtgtgtgtgtgtttatctatatattccttttctctggagaatcctgactaatatatccttcgtactagggtagaaaatttcaacttttttcatcttcattcttcagacatccaacactctggtgaaggattttgttttctaactgattttatagagtacatctttataccctgcagagactgaatgagtgaagtagactcaacataaataaaagcactaatagtgttctcattagagcagagcgataaaaagatttatgtatattaaaatatagggttctctacatgtgatccaaagatctctgtagaccctcatactctttcaggtgatccatgaggtcaaaattgcttatcaataacattgaaatatagttttccttttttctctttcattttctgatgaatgaatagaagaatttcccagaggttacataatgtatgatactacaacagattgaaagatgaagtaaaaatgagaatctaattgccttctattgagacagatactaaagagatttgtaaaaagtaaaacaatgcttattacttcttactatcttttttgtttattttgggaaatggttatttttcatgaaaatatagtaaattatgagatcattgctaatcttaaattattatttttgagatttttccattttaaattctaatatggtcaatattgatataactcagaaacaaaagctgcttgatatccttagtatcacaagtataaaggggtcctgagactaaaacatttgagaacctttgttctaatataaggtttcttatatataccagcgtgactctgacaaatacattaaatatgtacttccaaacattatactcgttcattaaatccttatgtttggaagcagcataaactagtttcatttgtttttctttttgttgttgttttgacattttctggtaatttatctcacatatagttagaactagtgctgcctcaattgttcatgttattaactagtgtctttgtctcctcattcaattggtaatctaactaatcaagtaacaagtgtttattagacttctactgtatgcaaagcccttgttagatagggtgccagttatcaatttattgccccggagcttaaaatttgtccttcattacctgcyctgtcatagtagcacttgaccctttaagcggttctgctttacagctggcacagtgttaagctttgtcagtagagggcactggagagacacttaagaaagaaggatcatctattcttggttgaattgtgatcctaagtttgtttttagttggtggtactgcacagtggacggagctgtgtgcatgtagcagacatagtccctcagtgagcttgtagcaacaaacctggcctggtgactgccttgctgtggcacacacataccccaggcctcatgccactctgctgcagggagaatgtgtcctgtttccctagcttccctagagcaggattggctctggcctgagtgacccagcagactttatcttcccgtgagctgcaactgcaccttctttaaggaaatctgattctcagcaacctcccctgtctatattggtttctttcttgggtactttgattrttctttaaggttttcttcacagcgttaaagtttctatcttcttataggtagtaattctttatattacattttcactgttaaatttactgtgtggcttctctcttctgattggactctgaataattcaggtgctttctaagagaacaaaattacccttctgaggttgacaagagatatcccagtaaatcatttaaaattggcacaaaagcaatgtataattgggggccagaatcagacatttagaaactgtgagacagtttgaggacagaaaactggcatgatgtgtggagaaaataatgaggggtctgtcagactggagaaggtggtttgtgaagagaagtgggaggtaaaatgaccagttactttgggataagatcatggaaagttgtgaatactaggcaaagaaattgaaattttgcttttagtttatagggcacattcaacagattttaaataagaactgacaatacaaatattatgttagtgtactaaagtataccaacacatacatatataaaggagttttagaagaaagtatggaaatctatttatcatgaattattttctttgctattratccaatttcccatgtaaataccttattcatagaagtgtaacttaaagataaaaaataattaatgtataaaatccatagggcattacatattcatctatatactagattatgttattttccttgcccattctttttagtaaaaactgtcatttgttttaagtcttctctgcctttctcttttttaatgaattggaataagaagtactcaatttttgtattgtgttttttgaaatatttagttatttataggatcctatttgtatcctataaatacaaatagaatttatttttaaaagatttaaaaaacacgcttgtgtttatttactatttatcattattcatttgattttcctcttgtaagatagtattcatgtagtctctgttttaataaaaatgtgcaaatctaatgcctattcattatagaactctcagaaactgtacatatgcaaaaacttttttgaaaacctagaagacaattacagcccaccagataatataccgttaagattttgctacatatttttccagtcatatgtacaagtgtatgtgtgtgcatatgtgaatatacacacatttacacagatataattatttaacacaaatatgtatttttcataagtgggtttaatattttataacctgcatattttacttaacatattgtaaatatcttccataaaatgttttaaaataatattattcttaatgactgcattattgttcattaaattgatttgctgtaattttgcaaattactgrttattgaatattgagaatacttaatttttctctgttttaaatagtgtaatgagttaggcatcttttaaagctgtatcttttatacatacctgatggtttatttagtatacatttgtagacatggaattcccagatcagaaggtatgtatctctttttttaaaatatactttaagttctgagatacatatgcagaatgtgcaggtttgttacataagtatacatgtgccatggtggtttgctgcactcgtcaacccgttgtctacattaggtatttctccttatgctctccttccccttgcctcccaacaggccctggtgtgtgttcccctctctgtgtccatgtgttctcattgttcagttcccacttatgagtgagaaaatgtggtgtttggttttctgttcttgtgatagtttgctgagaattatggttttcaacttcatccatgtccctgcaaaggacatgaactcatccttttttatggctgcacagtattccatggtgtttatgtgccacattttctttatccagtctaccattgatggacatttgggttggttccaagtctttgctattgtgaatagtgctgcagtaaacatacgtgtgcctgtgtctttgtagcagaatgatttataatcctttggatatatacatagtaatgggattgacacgtcaaatggtatttctagttttagatccttgaggaatcaccacactgtcttccacaatggttgaactaatttacactcccaccaacagtgtaaaaacatcctatttctacacatcctctccagcatctgttttttcttgactttttaatgatcaccattctaactggcgtgagatggtatctcattgtggttttgatttgcatttctctaatgaccagtgatgatgacctttttttttatgtttgttggccgcataaatgtcttcttttgaaaagtgtctgttcatatctttcacccactttttgatgggtttgtttttttcttgtaaatttgtttaagttccttgtagattctgaatattattcccttgtcaaatggatagattgtaaaaattttttcccattctgtagtttgcctgttcactctgatggtagtttcttttgctgtgcagaagctctttagtttaattagatcccatttgtcaattttgggttttgttgcaattgcttttgatgttttattcatgaatatctcttaaaggtcttttatgtcaaattgctgtctataaaggttgcacttaaaacaaacaaaaagcatatatagttttctctgtgttgaatgatatatttgagaactctattgatcaagagactgtaaggaatatttgtaaggccactttaaagaagttttaattaaaagctagtacattgtatgtgtgggaacatagatgttttattaagccttgagataactaaactcttgttagaaatctgaggaattagttagctggtaacagaacaatcgtaaataagcttaaattataacataaagtatgagagaagtacatattgtataatttcccaagtgtaaggattgggagccagttattctgggagactacagaagtgatttttagatgttgataagaatagcacagtatcttctgtgtttgggatgatggaagggaattttgtttcagacaggcagcttcctccctagtgcctactgggtaaattgccgttatatcaagtcagtaggcagaaagatttagatggctttttggtgctagtgcttkcttcctcctttctggaactgtgcaataaatgcattattattccagagcactcggagaatgtggcagtagtcaggcattattgaaagagggccatttagcggaaacattctatagagatgaattatcaacactatttttctttattatttaacttgcttgaaatgttgaaatagtgtagacaagcttttattttgtgacttttgtcttcctagtgatcaaattgataatgcctayaaatgaatataccttgcccatccggtttccctaataagacagataattattgtagcttaagggtacaactgactgaaaattcctaaatggtctttatagtaaatattatgctatataattaaaatgtgacacaaagcatatttttactccaaagtttattttataataggaaaaaatgactattagaaagccaataaatcatttagagattactactttaaagttgacattcagaagccataattgatacagacctctaaaaataatttaaatgcactactgccataatattccactgaggggagggggtggaactgttatagtagtggagaaataggctacaggtttgtgaagatgctgaggcccagtaacaaacactaggtaacttatccaagatctcagggctggtcctcgttgaaaggaatgattggtctgctatgcagtggcraatctgaaagacatcttgccaaatcaaccattgacttcagaatgtgaatataataaagaatagaaacatcctgcttctataaattgggttgggatccaggatatcctttttaaaaataaagacataatttctccaaaatacacacggacagtttattctattaatgtgccgtctgtgagactcagaaagaaagaaagagagaaaaaaaaaagaatcctagcttacaagagaagatgataactaggaaaaagaagtgaacaataatatcagccactatcactatgatctgtttattctgtacttcgattatactgaagtgttacagaaatcttcccaaaagctctcaaccagaggctacctaccactcagtggcaatcggtcacatttgaaatttggcttctcaaatagttgacaccatcctctctgccatgatttgcatctgttgttgagggttaattgaacaagttagactagtagttattgagtggttaatgtgtcatgggtacaaattttggggagggaatgcagaagattgattacttttacatgttgtcaggaagaaagggtcaagtgcaactcttataacactgagttttataacactacatctgatatattttggttaaaattacatgctagcaaagaaaaaagatattttacaataaaatttgtgttccatcttctgtgtaataaataggcatatttgcatttttgtgatatgtgtctttgttaaaatccacaatgacatgagaacaattggttgtcttactggagagttttctgggactaaaagcagcagcccgttgttcaagtctcatttttgtacttagtctctgtgtggcctttgtctgcaatggaaagtctatatgtgagctatgagagtgggactctatgtcctgtgcctcctcatgacagataaccaatgaacacttactaagtcaaagggatagagtagattggtgattttaaactgggtttcttgtagctctacaagagtttagggactgttacagaactggggccagtagcagtggtgattagctgacaccttagtgggtgagactccaagtggggaaatctgctgtgtcctgatcctcagctctaggcatttttaactttagccctcatactgacactacaaagtgtcctcattccctgaactgaggttcaaagttagtatgttacaaatgatcacataacttgtataaatgatgattttccaatacgaaattagaaatggttccattgtttgcactctaagcacatctccctgcaataatattctggatagcgaaaaataaaggtgtaccctttgtgtaaaccaggccaataatgtatcgcttttgtgtatgtgtgtatacatatatatatatattatattaaaagacttgtgttcagtaataccagagatttagagtgagatytggatttgaacccagctttgagtgttactaattgtgcctcaatttcctaatttgtaaaataggataataacaggttgttgtggagactaaatgaattgatacagaatgtgtactttgaacactgtctgttacctagtaagaattcagttcatctacttatttgattgatgtatttctgtggctgtgttctggaaaacagtctttttaacttaaatttaatgctcagaatggattrgcatatttttattgttatatgttccctttgcttatatatctctttagcattattatttgtaatgtcatttcaggttcctatatgatagtggactcttcagatcacgaccctggagaaaaagccagacttcagctgcctacaatgaaggagaacgacactcactgcattgatttcagttacctattatatagccagaaaggactgaatcctggcactttgaacatattagttagggtgaataaaggacctcttgccaatccaatttggaatgtgactggattcackggtagagattggcttcgggctgagctagcagtgagcaccttttggcccaatgaatatcaggtaatcatctgtacttttctgktgtatgttttgatgycatcagttctcactatatgtgtaatacatagatgtaaatatgcatctcatggtaatgagagattgccctcttgcctcccccacccccattattggggaagtgtcatacatagatatacatatgcatcccatggtaatgagagattgcccctctttcttccccaccctgttgatgaggaagtgtttggagacattggcacaaaaccttcaaactagagaaagtatttctatgtgttaaaataagtttaggtccaaaatttgttggtggtttgacaaagagctacttattgacagattctttcctacagctttgttcaggaagaaatagcctttttgagtttattgtaatcttcagactggactgatttactgactttttgaaagtaacatttgggaaataaatgtgatgtagagtttcatgaactatgttaagggggaggcattttcattaattattttaattttgattaattaattgaataaattaaatgacatataaaaataagccaaaaaggataagttattcacaaagctttggatgtttgtttcagaaatgattcattgaattatgattaaatcagacaatcaatagtgtcagtacccactttatgattctgtgactgagtttatatgctcttaacaaaaaaaaggttcatttactagtttggagagtttgttcagtaaccctcactatgaggttccgtccctggatgctgttatttctttaaaaggtcaattttgtgttagaccttgagatttaaacttttaaaggacttgtttatttgtagcttattataaagcctaaagagaatacatttatgtaaaagtatattttatgatggtcagcaagcaatatataaactaatagttttatttctgccttttaaaaatgaattatgtctttaagttaggtttgtctttattcttgaaggggaaaaaagaaatgctttgctttaattgctttgtcttgagttgagttttctgttttattaaaagcctcctacattgtaggcatggttccacaggtaagattttcagttcaaggttgtatgtttattgagttttcaatggattttcattagatacaagttgattctattattccggagcataaggatatttctcttcagtcagagagagccatytgctttttcagggtccacagccccaggagggctgcatatatgatatggtaggtaggtggatgggagtgtgtgaaactaatgctagagcacttgttgcaagatcagtgggctcaactctgacaaaagtgggttgatggctgtcatcaccaggtcactctcacaatgcattatcattgtactgatttcatgagaatctgtcataggagcttaacttagcactggaaagaagttctgattcaacagagtcagcctccacaaaacaaattaaaacccccaataaaaattaatctagcacactccttaaaaatatgggttttgaagtcagattgcctgtattcaaccctgttcacaacttgtttcctgtgtagatagttctttaaggaatcagactgtcagttgtactttaaaacaagaacaataacaacatagaagtaactgttgataaatccagcaagtagtatatctgtgatatatttctttttcctcgtaactacgaaataacatacatgtagttattttttctaagttgttaaagatctatctttgaatcattgatgttaataacattttctcatggcacagattactgtggtgttaattctactattaagttacagtaatttgaactggattaataattctttgttcagtctcattttgcatgacaaaacccccttcgttatatgtgcttgtggtgtatttaagcaagaagtacaaaaagtgcctgggtgagttccagcctggccagtgacatcattttggagatgttttgtcagagaaaatgatgactaaataaatacatggaacctatgggtaaatgtctcattgttgcagattaaaatttgagccatagataatttcttaagtgattgttttgctctcacatctttttccttaacctacaaaacttaatcaatgagagcaaacaacagagtactttttattcatgtgcttagtgctcagtaaattacttgtttgatgtttttatcaatttaatcatttagattattagttgtacctgtacatttgtgattagaaacaaccaacataacataaactatatttatgtgctttctttctcttggaaagtaacatgaaaaacattaaatctcccatacattttgatagctttcaaagtcaaatcaatacctgtgaagtgtttggtaagtgctggtttgctggcaaaacacggtagaattttttgattggtgttttaggtgctgatgtctctatatttaaagagaaactcaactgctttaaataccagatattggaggccagtcttgagattccatcaggttcttaaagaatatccccattttcttttattttgaaagcatgacattcttttcaagttttttatttattgtaacatctactattagacacatactgtgaggtcacatcatgctaactcctggggatacacaggcaaagtcccttttctcatgaagttctcagcctagctttgctctgtagaagataaaaatgtaaatcagatgtttgctctgctcttaaggaggctagtccagatgggaaatgcgagatatacatagatataacttgaaataccatagcgatggttaaatgacataagagaggtaaatataaaatgcagtggggaaagcaaaaacaaaagatagtttagtttctgaagtaatttcaagtagaaatgagactagaattcttttgtcgattcctctattcctagatgctttccactgtactgtgtatttttcttaaatcacacttacttagagccagcaaatgtaaattttgctttttgacatatcattacagtgatccactaacatataaggaacaaactgtttttcacctatgtgttcagaacaatcratgccttttcagcttactatactaattatagaaattatcgtattacatttgttttatttgctatggttgaaagatgctattctacgtattttatgggccacaartaagtactgtagattcttaaattgattgctaaatagaagtaaatagggaaaatcccgcaaatccttaggcgtcatctccatattaaatttcagctgaagatcagcatacctctaaaagcgtaattttctccactctggaaatctgacctgtcttgtattcataaaactaagttctgctttgggattaaatccattaccttcttactgaacagtgaggttgttactaaatgaggcaggcagacgtatgtaacttgcaaaactattagtggaaacctaatctactgttttccattaactgggtgcccatcattaatcacaaaaatgatgtgtgatgaaaactacaggggtttgtccagaaattggaatgtgatartatagcagaaagtgcctttttctcccccaatacatggagaaacaaacacaacttttgcaatgcattttcttcttaacattttccattggtttgaaaaaaaatgtaagaattgacaggcatgagattttctgtttttgtctccttttaaaggggttatattaatgtatattatattgatattttgtcagtagaaagattgttatactccagagattccactggctttggatctgaaaagattggggcttaaaccaagtgaccrtttttacttgaataaaaagcctctaaaagattgatcttcaggcacagaggcctgtgtaagaagaacatactcatgaaccatccatgcaaagagtaaaaagaggggatgtccctcctctgtcatagctctcagaactcttccaatttttttgctgatctgcattcatccatatagagacccactttagaaagacaagcagcaggatttttttttctctagatatatcatatagcggtaacttcctgcataagcattgtaagtgactctgctcatgatcttgtatagcagtgttgtggatattgtttgttgtctatttattagttattctcctagctttcttccatagtggcaggagttccaaccagcttacttgctttcccagcttctttgtaggtaaggatggctatatgcgacacagttctggtcaattaggaaggaaagtctgccaggaaacttctgggaaagatgttcctccctgataataaagagagtgttgtatgagaacatggctcttggtgccattgtgatcattttgtaactgcaaggaaggaaatagctgacaaacagggtgacagaagaaggcattcaaggagcctgggtcctattctcaaaataataataataataaaattatttaaagaatttttagatgactattctcctgtgcagccaaaagcattgttatacatcatgttgtgtcttaagctttcaagcaatactacctgtcagcacatactgtttgtggatggcacatatgagacacgtggcagaatttaaaaaaatatatatctaccaatgaatgaagcagtttttttttttcaatctatttggagagagaagacttaaacagggctataagacagtggatcactgactaaacaggctagaaaggaaggaagaaagatgatctattgggtatctactgtgagtgggatactaggctggatactttcatgtttgtcatcttttacttgtattaatatttgaacgtgtgctaagtaaatgtttcttaccttcatgcacagttgaagttgtgcttacgtagtggtggagcaatattatttcccattttttgtctttagtaaaatagtatgatttttatgagtttggtctttagctgtatcagtgacttctgaagttagccacaactagatagacttattttagttacggcaacaggatttacctaacacggtcatcgtggcttatttttacactggcaaaataccttttatttgataggctattaacaaaacatctttgctgctactttttaatcttaacgattctctttgttgcaaacagagtaccccaaatgggttggaaaggccctcatattattatagtcattgttttcttgaaacttagaatcctgaaattagccgggcatggtggcgggtgcctgtaatcccagctactcaggaggctgaggcaggagaatcgcttgaaccaggaggcggaggttgcagtgagtggagatcgcaccactgcactccagcctgggcgacagcgtgagactctgtctcaaatttaaaaaaaaaaaaaaaaaaagaaaaagcttagaaccctgtgaaggtgacctctctggttcctgatggtgatttgcttttattacaaaatgtctgctctactttgactttaaatagttgttgttgattcattgatgaaacttatggttgtgtaaataaattttaacagatgaacaaaagagccctggtagttaacagaacaattaatgtaaatctgtgacaagcctcttttcattctgctcagtcatacctgcttttatgtagggtggtggcagctgccacagtacccttcattgtttcttttgagaaatatttccataaattagtccaattccctttcagtaactgattgaaaaataatgagcggtcaggagaaataagcattgtttgttcaatgcatgattttttcttacttaggagtttgttttatctaaggggaatgaggaagacagatgctaaaaggagcagtggaagagataccagttctttgcttatgttctcaactagcactcactttggtttgctgaatctgaaaaaatacatttctgatttcttgttttgcatacttctttattaattatttagcgtacattgatcaggcagataaatgtgagaaccatttccrtctaatcagtttaatgatgtttctgacaatgctatactgtttcatataatacatgacaaatagataacaatttaaaattatttttgtcttcaattatgttgtctgctgactttgatagttaattggaattggtctagtttttagggctttccagtttttgaacaacttgaatttttgtgtgaactctgtccattttcatttcaaagacttatttttcttcacttcagtgtgtatataatatgtgaacaaaatattggtgttataagggacaaacaaaaacgaatacgttttttatctaaaatttaacttttgtgctgtggtgatttcagtttcaattcttagaaaacaaatacatttttcatttgagagaatgtgggaagaaggaaatatacagcaaatgtcagacatttgtagtcttttcaattttattattcattacataatattacatagaatctaattattctgttgttagtggggttggaatataaacgaaaacaaactttggacactaaattttactcatgtaatctagtggacaatttatagttaattttagctgtcttgattttcaaaaggtgttcttaaaactatcattataaaactagctactacatgttatttctgcatttagttataaataatcattgcacacaccactggaattcccttatgagaattagattcttaatattctttgaatgatctgttaaaaaatcattcttctcagccctctagaagcagtaaatcagttcacattttatgtttaaaaataaggtctatagtcaaatttataccaagtaataattcaataaaataataaagaatgaaaaatgtctagtacctagagacaaggtttggttcaagcttaaatatctttagatcctggcattttgcaacaacatcacaaatataataattagaaacagataccatggttctctgggcttatatttattaaaagacacttttggtttggttgtaaactttagtaatgtaaggcttacaaagagatgaagtcaatttagctccataaataccaggatgaatttctgtgttttgtttttggttgttgttcctttgtttgtttgtttttttctttcatttaaccccctctttctatgtcttggggggttggagtgagacccattgtaagcagaacaataaagagaaccaaataattgtttttctgatacgtatattagacattgtgacatgaagtgtgagaattagaagtagaaggtctccttttttttttttttaaatagtggtggagaaaaaagtagaggccattttgtatattgggtaaaggtttggattagttctcatttgacctgtgtttaatatccattatcacatgttcatgtccattctgtcaaggcctccttgctcactgagtgactatgttgtgggacttcttgagtttcagtccctgcaatatgggatgatagctagtctactgtgatttattaggttcacaaaattgtctatttaaagctcttatttaaaaataacagacaccaactagagctagttaagtagaaaagagacagaattgaaaagatttgggaatcactcacaacatttaagggaagtggaattcccagcctgaagaaggcataggacccaattagatctgaagaaaacagaaacactttctctctgaaggactgctgtactgacttatttattttatccatttggtgagtggttattgagcaacctaatccatgccaggcacccttctgggtgctggggttggacagtgctgaataagtttcaaggttcctatagtcccaggaattctactctaggggtcagagccagtgggggagaaaatccagataaataaatgagaaaaagattagaatacaacaagtgctaaagaaataattaaaatttaaaaaatatgaaagcagaagtcttagaaactgcattagaccaggtgttctaggaagaactgtcacctggagatctgaatgacaaaaacgaactaggcatgcagagatcaggrgaaataccttagagacagaaaaaaaccaaggacctaaatatggaaggaaattggcattgcagagggacagagacagatacagaggtcaaaggttacctttttcaagatgagatgggtagattccagttatgtgagctttgcaatctgaggaaagaatcctaatgctttcagataatttttatcaagggaccctatttactcattcttagtctcatcttgtacgtgcttcccatttatatttttctttagtcttttttactgtttactcacagctctgattgtgtctggtcttgataacggtaatttcctattttctctcaccttaaaatctattataagtcaattacttgttgggagatgctaatttgctgatattgagctcctcagattttgccagtgtttcctttaaagtcaaaacactcagcctttatttgaggtccttcgtcatttagcctcaggcaactactctaatctttctaccattcttttttttaggatgtaatatatgtatgtcctgaaatggctttgtttcttccttttcattgtccaagttctgtttgtcctttaagacccaactttatgtccacttctgccacgtagcctttgcttaatacctctgcactcagtggtctctcccttctccttggacgtgtgttgcctgtattgcttattagacattttgcttgttatatgtatttcaggtatttttcctccaatagtattataggccctcttttaaaaaggtcagggtgtcccataaagacaatataacaattaggtgctttatatttcagaaagcaattgtacaaattttaaaaaaatcatcctcacaatagcactatggggtcactgggaaaagtacaactatttttattttagagataagggctgacagagggtaagtgacttgctttaggtcttgtttctagtgagaatagagctagccctcctctctcttgtgaaattctagtccctgtctcctgtgccagactgtatattggtgatgattttccagtcttggtgtcaaaagaaaattggcttgctgattaagtattcaatgatggtacaagaataaagttagaattattttatatgcatacactttctcaggggacttattctttaatattatttgttaatgtttctttaaaaacactgaatggtttcatgggttgtgtatccaagaattgattggatgaggctgaatacttcatggaatgctcagaactttggtgaactgaagtttaattcatttccacaaccaagtgctaagttcttagtacatgcttagcactagtctgtgtttagggacaaaaccagcaaaaaaaaaaaatgaaaacaattttatacttttccttagagaatataaagtccactaagacaattgcgtatacatcgataatttttaatggaaaatgatggttaaatgagacttggttatactattatcgttaactctatatatgtttgaaaatgccataattaaacaatgaggggaagaaagtcttctgagagagataaaacatccacattggcagccttgtattttgtgtcattaaatgtccaaagagttgttagggtgcagaaaacaatctccaaaatgaagacctccgaagcagtttcagaaataaaagtttctctctgaccttctccttccttcctgtttctcacttctactcccccaaggctagccactgaaactacagttggcttccacaggaacctcttccccatggcagggcatagaaaccagaacctctctttttcttcaaagccagccataacacctaaaaacaactgctctaactttcccctgcctttctgtgaagtaactggccatgaagaaattatctgacctgtcttatttgcatgtaggtcaaaagacccgaatactagaaagggtcctgccctgtacccaggaggaagaaatgctgtacaaagtggccaagaagaatttgaacagacaggccttgctgggtttcttcacctcagtctactagcattaattagatcatactctttatgtgaaatcatatttctacatgggtgtccatacatcattgaacctaagcataaaaatggattttttgccatatctttgggtcttccttctgaaggttcctgtgtcgtctaaactatgatcaaataaatttgttatgtttttctcttgttaacctgtttttgtgataggagtgttggtcatgacccttaaatgggaaggaaaaggatcaaaatattagtactgtggagaaaatagtactaataaaggatctccaagaaggaagaaacacataggctctggggtccagtaaaagttgatctggtacttgagaggctgaggcaggaggatcgcttgaacccaggagttctaatccagcctgagcaacatagcaagaccctgtctcttaaaaaattgagctactatggtgggcatgaaaatggtgggtgtgtaaaggcaggagtaaaaggcacttgaggtttcccaattataaggcatagatagcagtctcaggtggtcagaaatgagaacgatcatactgtgtaaggggccagccatactgctctctctggcccacatggagggtcttgaaatgaggagggaagtagtatgttgaaaaagttgtaccttattgagaagtttccaaatccagggtgggagatttttctgtctgactcctcggtgcttggaccactcagaagaggctaatcagcagaacaatgtgatgacagtgatgatttttacaagtcaatcttatgactgaattcagcagatcaaaggggcccataacacagcatttactggacatccacacactgtacgattcaagccccatcggtctgaactagacctatgaagttgcgttgttcgcatttttagatgatgacctgtggaaagcaaggcatatttttgttacttagttccctttctcttgggtagagatttatttttttgttatgaaaggtaatcaggtttttggcttacaaactcatattttttaaaagtctattcaaatattcttttgtcaacagaattgctaaattttgttcatttaagtttgttctttctgctgggatcccgggggaactttcccttataataaaagctgaaggatgtccagattatgctcttctcctccatctgcctgttaagtccttaatctcctacacctgggtgttctaatcctttatttgctttaagtaccaagtggttccaagtcggacaagttctgtgtccaatatgccaagtaagattcattgtgccatagaagggcatgctactccccaagatctcctggagaataaagtgggttgctgttcacaaatggacctgctggttttaatgcagcccagttaataaatggcattcactcagcatacagccaagagtactccattgattggcagcaggaagctccttgttcatgttgagagttcctttttgcggtgccacttgcctctgagaattgtcagtgggctgccttcacagtgcagcaaaaggtcctttctgctttttcattgccatttgcttcccagtttggagccagttgagttatttagctatgggcctgagttgtgtaaggtacagcatttttaaatgagtttgtttttgtgtcttccttgttcggagttttttgtttgtttgtttttttggaaaaacatccagcaaaggatacggaaggcaacgttatcctgtgcttcttagttatcactatgctaactgaaattcagyggactacccttgtcaagaggttatgccgtatattgagtttcagccttgggtctcactctagttcagagagagctcatgttacagaaacaatcctctcacctcagccaataaatcctaacaaatcatctctacacccagtgagaccatgtatatctatcagctatcttatggagtgaccagaaatcagagagaaagaaggcacaatctacttcccctgttatccaagtaaaagcttagtcatctataactaacttaataaagcatgtgcttgttgggtaaagacagagtagctcactaagcttagaaaagaaagataagagaaaggctattcattgtctagtacctttgcatttctgattagcctgcatataagtggatggcattttttttgtaggcaccgagactggaactttccatattatttttcaatcttattacctctactagaaagacagtggataagggagattacttaaaccattttttgtgatcatattgttgggagggagtgaactggtaccagggagaattggaaattttctataaaaatggtgttaatttattagccatgagaaggagaaataaaaaaaatcagaatatcttaattcagagggaatggtttggaaaatatgaattagaatgacatttgtacttcttattacaagctggccacacaacattttttaattcttaagtttttttaaggttctctccttccataatataaaacaaagaggctgatgagaagttatttcagctgctgaggtaacagactttgacggcagtaactccagtgtggggaggtcagcaagctgctttatgtagcagctaccacacttcagcatagcyattgccttgtgtagggtccgaacgttggttgcagaccaggactcctgcatctggtctgtaatgatttcctactctctagatgatctgaattgatttctgattactcctggactctaggctcccccacccctctctgccatcagctttgttccaggaagccccatttataccctaactttcacttcccactcctcttccaagaggaaccatgtccctattaggaaaagattttgtccttgcaccaggggttaagagaattgagagtaggagaggtgatgtctgtaccatgtcttttagttggtctcagtttttaaaaaggtctagtgaatsctcagttggattagactgtgtggtaagtgaaaaaagaatgaaaaatattaaatctttgaattaagaagttgttctctagcagggttgtaattgataacctattgacttgactgttgagtggtgagacatttaatatagagaatggcaaccctatcattttttagtgcccaagattataatattatttatttaaaagtgacatgtaaccttaacaatgatctgccttctcctgaatctttgattcttttctccaggcctactccggtgtacaccacgtgtccactgatgcctacctgtctctttgcaaatatgtaaaggtttcattcagctgcaaagcttggcgaaagtttatgaaacttaagaagaattgatgtacagaaggacagtgaaaaactttgccctgtctttctggacatatgttcttcatagctggacttcgtagggtggtttttacttaatgcctctagttcctttcaaattgtctcataacttgtaacttggttgctattcctttcatgcgtcgaaaattgctgtcttctgatgagatatctctgacttttcccaagtccttattcccgttgacttccatgtaatatttgagattattggactctccttccttccttagatataaaagcctatactatcctttattttttggtaaacttttttgatcgttttttcttttttcacctttttaaaaaaaattcctctaaatgcaagcagttcgtgtatttaattttcttttattaatatttatttttggtgaaatattttatacatgactaatcaggaaatataaataataataatatatgtatgttttatggaaatcgacttaatcttaccagtacttcctaaaagtttctctctattaatcactttccttctatcctaaggaatgtagtattttgaattttttgttcatcattttgtttcttttttctttaatttactttaaacaaatattttgttttatacagttaacaaatgttttataaatggtatcatgatttgtatattttttggctactcgatttttttttcccagtcaatatccaggtttatgtagtggtaatcatttttttcagtgttgtatagcattctatttttgaataagctgaaattgattattcagtcatttgtctatggatagttgggttgttttctggttttctagtggtaatatttttaaaaatgttgttatgagcattcatgtacatgtgtatgatattgctaagtagtgatattgctaagtcatgtggtttatgtattcaacttgttgactctaagctgttcaccaaaatgactgaacaattggcattccwgctggcagtatgcatttctattgatgcatatgctgagtaacccttggtatttatttgcacattttcagattatttttcctattaggtaaagataatattgtggtccaaatttgaatttttctgactaccattgaggttgagcatgttttcaaatatctgatatttgtgtttctttccctttcatgttttcatttgtgtcttttgctcagttatctattggtttatctgtttcttatcaattgggaagccttcttttctggtctagatagtaatcatttgacaataatacatgcttgtcttggcttgggtttattttttcagtttcttatagttctttggacaaaaagccttaattttaatattgatttttttttgattttttttttttttactttacaaataaaaaaggaatgactttgttaagaagctcttcccagcactgaggttatttaattctatatttcttctaaaaattttatgatttgcctttccaatttaaatatttgatgactttgggtttgattttatatacagcataaagtaggatatttatgatactcttccttagtgctggattcatgcatatacatttttttctgtgtttttttctttgtttctctgtgtttgtcttgtatgtgtgtgtctatgtgtgtgtgtgtgtatgtatatatccatatatatatatatatatttttttttcttctgagctctgagccttctatctgcctgctagaaatttccatgttgatgtacatcaccttaaactaattatatctaaaatggaaccagtttctcacactttcttactccccctacatctaactggcatctagatcctttaaacatgtcctttgaaatgagtttttatctgatagtttttattcctactaccaccctatttcatgccatgtgacctgaacctcagacctccgaaatgtttcaagtatacctcttgaatttctgttttccccacacagatcatgtgcagctgacaccatattagtattaatttttctaaagtataaattttgattctcttaattttttttcttttgagacaaaatatcactctgttgcccaggctggaatgcagtgctgtggtcatagctcactgcagtctctaactcctgagctcaagtgatcctccctgcctcagcctcccgagtggctgggactacaggcacatgccaccacacccggctaatttttaaattttttttttcagagatgctgtctgcctatgttgaccaagctagccttgaactcctggcctcaagctactctggcttcaacctcctgaaatgttggggttacatgcatgagccaccataccttgccgattctctcgaatgaaagtaacattattaattcctctttgtcatagtaaagtggctggtccctaaggctctctctgtttcttgtctagccccagttctgttttataacatctgtcttctaacttagtttctctttaaattatcttgcatttttgttttcacttattagctcattccattgtatccattgctccactaactggcaaatagaaatccaatccattctatcattcttttggcattcatgattcactgagctataaccttcttgaatgtttttgttgaaataaaggtacagattcttatattttcctttattccctggtatggttaggctctgtgtcaccacccaattctcatcttgaatcgtaatccccataatctccatgtgccaagggcagaacaggtgaagataactgaatcatggggatggtttcccccacgctgttcttgtgatagtgagtgagttctcaggagatctgatggttttataagaggcttcccccttcactctgtcctgccaccctgtgaagaagatatctgcttcgcctttgccttctgccatgattgtaaattacccagtctcacgtatttcttcatagctgtgttagaacaaactaatgcattccctatagcatccatcataatagctagcatataacacataattaataaatactgagggattgattagtagaaggatactggtcttattctatgaaattgtatttgggttcttctgggtgaaattcttttaataacaattcatttgtgtagttaaagtttaaaggatgctattaattttattatggcaaaaatgaaacatttgagttttacttagaataattgacagaatctgtatttttctgaagatccaattttcaacctgcatggatagcctttctttcctaaattacttgttttttaaatgttaactataaatgtttcatttctatttgttttcttgatttcttttctttttgtgtgtttcttgactttctcagccagagaaaagtaatgctaccatagcaataatacatttagattctagtagacttgttttcttacatttctgttttatataaacaaggcgagtcatagtgaaagtacctagactaactattcaagcctgatatgtttatggactctttgtggaaaaaaggaaactttaaatcctctaagctactaaagatgtagaaggataatccagtattatttggtgattcatgtaaagaagaaaaataaaagaaggagaaaaatctggttgaagccacctctattagtcaactttatttcagatattaattagtctgcactaaaatgacagtgataagccaataaaatgatgactttgaaacgggaattcttcaaaaatctagtaaaaagagtatcgactctttcttgtcttctttttcaaacttactgtttagctcatctttatagcattcaagaaaagaatacttgagtagaataaagagctatttttatcttcagaaaaaaaattatttaagaaatatggaagtaacaaaataggcatgccagagaactgccatttgccactgctttttgagcagcacggtggtatatgatccatttcttaaactgccatggtgagttagagtgccttgtttctcacaagttttgttttattaaaaaaatagtttcttgtcttcttctctcttctaggttttatcagtttgttaactgtcttcctagctggactagggagcatgtgctgattgtatgtgaaaatgaactccttgggaatttagcgttctactgaattctcttgaacaaataaatctggagatgcttttctttgtgcaaagttgcatttctttaaacaggtaatcatcgttattaaacttagcaattggtagagttatatatgttttaatttcaagggctttaatgattattttctctaacaaccagattttagagactcataagaagccacttgatttgcacatatcacacacagaaagggttcttagtgagcctttccattcaactactttcaaaaaaacttaaatgttttatgcattttacaaataactttttctcttaaagtccaaccaaaggggtgttttgtgtatttttatcctttacatccattgaaattacctgttctgtatgatataatgaaacatgggtacttatttaagctaaaatatagttgctaaagttgggcctccctgatgttaaatgctacccccttcagtagtgacattaattaaagaaaacttgttaatttgtgagttattctaaaatactttctctcataaagaagctatgtttctccttctaactagtatacttaggttttgcttggcaagactatgtggaaagaggtcttatgtcaccccagcttagcagtgaagagcagaaggcactactgtgcctctcttggtctttttaggtaaaccacaggcaaaatatggagcacatttcagaataatgttaatgctccaaaattgcataagtcctgggctccaaaattgcataagtcgtggggctgtgacacaaccatcttccatgattgtgtttcagtctgactgcagtgttgcttttgtcttcgtagggtaaactctgttgtttcaacaggtatctagacttcaaataattgttaaatgagtgttgtaattgaaataatcagcccttggaactgcaatcattatgaaaattgtatgctctttaaattctatgtaaaaatagattgttttaaagaaaaaaaattcattttaaaaacagaaatgtgcttgaacaacttattttaatggaataaagttaagcaacgaatcttcattccacagctttaacaagtcttccagcttaaggtaatcaactacagcagatattattttaagatattgaggtagcaaagagtcctatctacttagagaatgtatgatttataatagaataccatgcactaatattgaacagcatcaacccatatgaaatcattttattacaaatataacctaggcagtagcatggaagagaactgatgagaaatatagtaggagtaatacactaacggatatgatctccaaatgtttattctctgtcttacttctcacctatggggccgctttcactccctaagggcttctcatagactgacaaagacctcagctccttaatgcaatgccagtaatacggattcataggaaaacttcccagtgaatctagggggtagagtttagtggaacaaaaaagggcgaccagctttggaagctgtagttaggaatggggagacaataggcagaactggagttagcctgcagatttagcgactgtaggtcagagatggggatgcaaaacctgaaatactggtgatgcagattgagtgaagtcagttgatttcagaaatgccttggagatgtaactgataggagtagaaggttattggcatgtgagtttagggaaggaaggcggacatgttgcctggttttctaattgtacaagcgtagtgaatcgtgatgccattttttgatacataagttatttgagaggaggcagattatgagtgtgtatgttttgtgtttgtgtgtgtgtgtatgtgtacactgtgagttgtggggttgaagatgctggtttaggtgactgtgggccagccatgtgccattggctcaaagtttgaatatttaagggttaggagaaagatcctaactaaggagccgttagcataaagatactgacagaagtgagaaggagctaagctagtattgccctggaagaataaacagagtatgaaaagggttcatgaataccaacatttatgatagtctatagaagagccagaaaattgagcctgcaaaaggggccagagaagcaacatataacgagttaagtacaaaccacaatattgagtaacaggaaatttaaaggaagagaatgtttcaagaaaggaacaggtaagactgacaaatcttacagaaatctcaaagaagttaaaatttaaaagatttattgactttagcctagaagactggttttaacttcttccaaatgcatgttttgagtaaataaacagagcaatggaagtatggatagttctgacgcacatgatattctgtttctttcctggcttttttttttttttttttttttttttggaattgagtcttcctctgtcgcccaggctggagtgcagtggtgcgatcttggctcactgcaagctccgcctcctgggttcacaccattcttatgccgcagcctccctagtagctgggactacaggcgcccgccaccacacccagctaattttgtttttgtatttttagtagagacggggtttcaccatgttaggcaggatggtctccatctcctgacctcgtgatccgcccaccccggcctcccaaagtgttgagattacaggcgtgagccacctcacccggcccgtttcctggctttttatgaaaatgatgtgttcttctggtttgtctttggttagcttttttgtttctttatttgtaatttagtctcgggaacttaagataaagttatctgtattatctgctattcttaacagaaggccaatttttgaatgtgctacaaaataatctacctaaagcaggcaagacaatataaatcattttatttttgcttatatagatccagaacataaatccctgagataatatcctcatcctaaaaggaagagtaaagtaatatagccttccagcttggaagaaaggcagtctagttatcaaataatatatgatcaatgatgatctccaactctaaagtaaactcaaacagtgtgtatattcagatgaattaaaaccatatattcatttagtatatgtgataagtagatgtgcatttatagaattactttcttctgaaaaggcaaaaagactctttttataatgtaaataaattaatgttattttaaaaatgaagatactatatgcctgaagttttaatgtacttttaaaaattggatcagagtgtgaaatcaaatgttagtgattaatattattattattatcgtaactaataatattaatgcatgtgcttaacagttctctcagcttcttaaatgttaaattttaaagcaaataacaagtacaatgcaaaatttaccaacacaccaatgtgatacatacttttacctattatttttttttaaaagagagtattgaaaaattatcattttggtttaagcatttgagcaaacaaaataaaatttctgattttaagatttaaaataatgtatgagtaaaaacattattttgggaaaaatgaattgtattaaaagaaatgctgaaattttttacagttggacaaattgctatatttttgtggctttattaaaaatagaaatagtgatatccaccctccattaggggaaacattcacttgtttattcaagaaatatttttcaagtgtcttcttcatgccaggcactattttcagtacttaaaatgtaacaatgggtcaaagaaacaagtcttgactctgaaaaagctctcctgttggggaaggtggttacaaacaatgaacagctaacattataagtaagactagatggtagtacagttatgggaaagaagatagagcagtgtggtgggggtggggtgtgtatgttgaaatctgggaggtaaggacatattgtaattttttttaaattttattttattattatactttaagttttagggtacatgtgcacaatgtgcaggttagttacatatgtatacatgtgccatgctggtgtgctgcacccattaacttgtcatttagcattagttatatctcctaaagctatccgtcccccctccccccaccccacaacagtccccatactgtgatgttccccttcctgtgtccgtgtgttctcattgttcagttcccacctatgagtgagaatatgcagtgtttggttttttgttcttgcgatagtttactgagaatgatgatttccaatttcatccatgtccctacaaaggacatgaactcatcattttttatggctgcatagtatatgtgccacattttcttaatccagtctatcattgttggacatttgggttggatccaagtctttgctattgtgaataatgccgcaataaacatacgtgtgtatgtgtctttatagcagcatgatttatagtcctttgggtatatacccagtaatgggatggctgggtcaaatggtatttctagttctagatccctgaggaatccccccactgacttccacaggggttgaactagtttacagtcccaccaagagtgtaaaagtgttcgtacttctccatatcctctccagcacctgttgtttcctgattttttaatgattgccattctaactggtgtgagatggtatctcattgtggttttgatttgcattcctctgttggcccgtgatggtgagcattttttcacgtgtttttggctgcataaatgtcttcttttgagaagtgtctgttcatgtcctttgcccactttttgttggggttgtttgtttttttcttgtaaatttgtttgagttcattgtagattctggatattagccctttgtcagatgagtaggttgcgaaaattttctcccattttgtaggttgcctgttcactctgatggtagtttcttttgctgtgcagaggctctttagtttaattagatcccatttgtcaattttgggttttgttgccattgcttttggtgttttagacatgaagtcctttcccatgcctatgtcctgaatggtaatgcctaggttttcttctggggtttttatggttttaggtctaacgtttaagtctttaatccatcttgaattaatgtttgtataaggtgtaaggaagggatccagtttcagctttctacataaggctagccagttttcccagcaccatttattaaatagggaatcctttccgcattgcttgtttttctcaggtttgtcaaagatcagatagttgtagatatgcggcattatttctgagggctctgttctgttccattgatctatatctctgttttggtaccagtaccatgctgttttggttactgtagccttgtagtatagtttgaagtcaggtagcatgatgcctccagctttgttcttttggcttaggattgacttggcagtgcgggctcttttttgattccatatgaactttaaagtagttttttccaattctgtgaagaaagtcattggtagcttgatgggggatggcattgaatctataaattaccttgggcagtatggccattttcatgatattgattcttcctacccatgagcatggaatgttcttccatttgtttgtatcctcttttatttccttgagcagtggtttgtagttctccttgaagatatccttcacgtcccttgtaagttggattcctaggtattttattctctttgaagcaattgtgattgggagttcactcatgatttggctctctgtttgtctgttattggtgtataagaatgcttgtgatttttgcacattgattttgtatcctgagacttcgctgaagttgcttatcagcttgaggagattttgggctgagacagtggggttttctaggtatacaatcatgtcgtctgcaaacagggacaatttgacttcctcttttcctaattgaataccctttatttccttctcctgcctaattgccctgaccagaacttccaacactatgttgaataggagtggtgagagagggcatccctgtcttgtgccagttttcaaaggaaatgcttccagtttttgcccattcagtatgatattggctgtgggtttgtcatagatagctcttattattttgagatacgtcccatcaatacctaatttattgagagtttttagcatgaagggttattgaattttgtcaacggccttttctgcatctattgagataatcatgtggtttttgtcttttgttctgtttatatgctggattacatttattgatttgtgtatattgaaccagccttgcatcccagggatgaagcccacttgatcatagtggataagctttttgatgtgctgctggattcggtttgccagtattttattgaggatttttgcatcaatgttcatcaaggatattggtcttttttggttgtgtctctgcccggctttggtatcaggatgatgctggcctcataaaatgagctacagaggattccctctttttctattgattggaatagtttcagaaggaatggtaccagttcctccttgtacctttggtagaattcggctgtgaatccatctggtcctggactctttttggttggtaagctattgattattgccacaatttcagagcctgttattggtctattcagagagtcaacttcttcctgttttagtctttggagagtgtgtgtcaaggaatttatacgtttcttctagattttctagtttatttgcttagaggtgtttgtagtattctctgatggtagtttgtatttctgtgggatcgataaagaggtgatatcccctttatcattttttattgcatctatatgattcttctctcttttcttctttatttgtcttgctagcagtctatcaattttgttgatcctttcaaaaaaccagctcctggattcattaattttttgaagggctttttatgtctctacttccttcagttctgctctgattttagttatttcttgccttccgctagcttttgaatgtgtttgctcttgcttctctagttcttttaattgtgatgttagggtgtcaattttggatctttcctgctttctcttgtgggcatttagtgctataaatttccctctacacactgctttgaatgtgtcccagagattctggtatgctgtgtctttgttctcattggtttcaaagaacatctttatttctgccttcattttgttatgtacccagtagtcattcaggagcaggttgttcagtttccatgtagttgagcgattttaagtgagtttcttaatgctgagttctagtttgattgcactgtggtctgagagacagtttgttataatttctgatcttttacatttgctgaggagagctttacttccaactatgtggtcaattttggaatagatgtggtgtggtgctgaaaaaaatgtatattctgttgatttggggtggagagatctgtagatgtctgttaggtctgcctagtgcagagctgagttcaattcctgggtatccttgttaactttccgtctcattgatctgtctaatgttgacagtggggtgttaaagtctcccattattattgtgtgggagtctaagtctctttgtaggtcactcaggacttgctttatgaatctgggtgctcctgtgttgggtgcatatatatttaggatagttagctcttcttgttgaattgatccctttaccattatgtaatggccttctttgtctcttttgatctttgttggtttaaagtctgttttatccgagactaggattgcaacccctgcctttttttgttttccatttgcttggtagatcttcctccatccttttattttgagcctatgtgtgtctctgcacgtgagatgggtttcctgaatacagcacactgatgggtcttgactctttatccgatttgccagtctgtgtcttttaattggagcatttagtccatttacatttaaagttaatattgttatgtgtgaatttgatcctgtcattatgatattagctggttattttgctcgttagttgatatagtttcttcctagcctcgatggtctttacaatttggcatgattttgcagtggctggtaccggttgttcctttccatgtttagggcttccttcaggagctcttttagggcaggcctggtggtgacaaaatctctcagcatttgcttgtctgtaaagtattttatttctccttcacttatgaagcttagtttggctgaatatgaaattctgggttgaaaattcttttctttaagaatgttgaatattggcccccactctcttctggcttgtagagtttctgccaagagatccgctgttagtctgatgggcttccctttgtggataacccaacctttctctatggctgcccttaacattttttccttcatttcaactttggtgaatctgacaattatgtgtcttggagttgctcttctcgaggagtatctttgtggcattctctgtgtttcctgaatytgaatgttggcctgccttgctaggttggaattgagtagtctgagtgggcttcattgagttgatttttgagcaaagatgtgaagaagacgagggtatattctgaataggtatctactagaagagccagggtaaaggccctgtggtggaagcatgcctgtccatgggttgcaaggagtcactgtggctagatggcagtgagcaagaaggggagaggagaaagaggagaaggaggttaagacagggagggaattgagtcaggtcactttagaaacttgttttgcttcgaaggacttgcccttgactcagaggccatggagagtcattggaagcttttgagtagagaaacttgctaggaacttgatttcagtgatgttaatcgttttttatgttctttagagcacactctgtaaggatgtaagtctaaacttttcttttttagccttttcaacagtaagctatacataaaagttacagtgtagcctactggccatgaatagaagtgctatgtgactttatggtgtcctgaagtttaaggtatattagctctgcatatgtcctgtttccagaatcttaaaaatttaattttggagaatcaagctttgtttaaaataatcaccttaatatgtagatgtggaaaactaacttgcttaagtttattgaaccggatttaccagagctagaattagggtttaggtctcctgactataaatgagaatgagaagcaagaaccaaaaagtatcaactgtgatcagatttgtattcggcactttacttattttgtaccaagctaggctcagtttcccccacttaaatgacattgctgcatcttttacacatttctttgaccaggtgttagtagatcattgcttttactacttagtgttactttttaattagtatgtaaaaaaatccatcctccttttcctccttagcaccaatttaaaaaaaaatcttgctttgtactcacttgagaaatacttgcaatccattaccagcctatggtttttccgtatcctgtaacagaggttggcaaattaccaccagcaggccaaatctgtcttgtggcttgtttgtgtccactatccaatagtggtttttacacttttaagtggttggaagggtagaaaagagaagaatcatactttatgacctgttaaaattattttaaagttgaaggacaatagtttgaaagtattcatatgttgacacatagtttattgcatagtttgtatttcaaatgtaaattaatcatatagttaaattttgaaagagaatcacatattactgacttaaggacttccaaactgtataatggaatcacatgtacaattatgtatctgtttatgtggaaacagataaacatatctgtttcatactgtaattctaaccatatgtctttcttaattacbctttgttcctcaaagtctatggtttctttttgagttggtcagccctctgttctttactcatatttacaaacttatcattatgtctacattcataagttatttaataaaacttatttgaatttatgataaagcagaagtagaatgtatattatacacatattatggaaactttgcacttagcatgccttaagtggataaaaaagcaaaaattggcttcttagccaatgtgaaatttaggtaaatcttaaacttttgttttttactgcagatatatttttarttactatcagatataccctctgtctaccaaaatgatagagatgaaatgcaataaactttgtatcttttcccaaaactgtaatgtggtaaattaacttaataaaaatttagtatgaaaaatgcaagtaaacatttccagacttcactaattgtaaatggaaacaagatgctagagtctgtgaaacccaagaggactctaaagaagaccagcttggtaattcaagtaacagaagagaaatagatatgaaacagcatttctacttcagggtacactggagaaagaaaaaagaaggactcctttatgcatcattccaagagaaatagggagaaaaaaactgtgtttgaaggaaaggctgtgatttaatcaataatggacaccttagaaagactgattcttagcaccagggttaggaataataaaataatctgctcatagaaggcacagcaaacattgatttcttctttttaagaatatttgtttatatgatcaaatttactaaaataaaccgttaattacagtgtacatttaaataatgtacttagtttactaatgtatcaaacataaacatttttaattgtccttgtggaaaaatatgtaatatgatggagatggggaagtataaaaaaagcaaagattaaaagaaaaaagaatcatctacagctataagcacaaaggctccatcacagggatatcaagcatgtttcccttagattctgtyatatgcgttactgtctgcttgagtccatctgatcacaatgtatgcacaaggaaacatgtctatgatatgatcgtgtgtctcttttgtgctttttgcacctgaattgtctgtactagagaattgcaaaacaagtttgaaatgaattgtacctcttttcctcagttagttttattgttattgttatttaattgtagtaaacctaagagcctgtaattcagataattcctggaaaagtattttgatcaggcatattggtttggaataggtctgagctttgcattctctaaaattttattacatgctttacttcttccatgagatactggtaagtgatgtttggtatttctgataaggtcttagaaatcccagtccaattaaataataagggagtaaaggtttatggaggtctgcagtagaggatcactattgctatggtttgaatgtatcctctattaagagggaggacttttaagagatgattaagtcatgagggcacctgcctacacaaatgggtttaaagcccttataaaaggtgttggcttgtggggttttgttttgttttgttttgccactcaccatgtgaaaacacagcatttctcctctctgaggatgcagcaacaagtcaccatcttggaagcagagagcagccttcaccagacaaccaaacctgctagtgccttgattttggacttcgcagcttctagaactgtgagaaataaatttgttttaaattacccagtctctggtattttgttatagcagcataaagtgaactatgacaaaacaatggctacctccacttattctatactgatatatttattgcattatatactttgactttcataataattgtatgaagtgaaatatgttcattttataaagaaaaaaactaaaagcctgggtgaaactttcttaaccagggtcacaaagctaatacacaccagttggctgttgaaccccaaaccatttcactatttggctattctttgaccaccaagacacttttctttctttaacaaaggttattgatggtctgtttgcaagataggcattcatttaggtgttggaataaaaatataaattacccacagctgttgcgcttgtctagcttctgtcttgtatggggtgaaaataattataagtaattagtcaataaataattacattaaaattcaaatactataatggatatatgtcaatgtactagttaacacagagtaggattatctattacctgagactggcaaagaaagaattcataggacggatgccctatgaactgcatcctatttttaggaaaagaggaggaaggtcatgacagagaaaataacacatataaatccaccgagttgtgaaagaaatgttctgggagttatatttctttgtgtctgatgcctggggaaaataaatctaaaataatatctgaaatagaaaccagtatttccaaagggaaaatacattatgctctaatttattcacatattaatttttagttttgataaaattgcaattagaatagcaatgggattgttatttaatatattttaaaaatattcatctaggtcagtattcttcaaagtctttttaaaaaatgcatttggacttttctaaataaatactatgagaagatttatgtttacaatatatggcataatttccatgagaaatatgtggaatacaatcaggaagtcagcaatacagaattatctaaaacttattcatgtaagttttactgatatttgttttatttttctatgagcaaaataatttttctttgggtatcctcaattgctttttacaagtccatgtgatatatagtaatctatcttattgatacctacggatttatttaattaaaatagttttttattggtagctgatgataccttctgcaaagaatgccatatttatcttttcatttctaacagtggcatattttatttctctttcatgatmtattgcattagcgtgaacttctaaaactgtaggtttttcttcaattggttaaaggagttaaaagttgtggtgagagaactttgccctttttctacaacaagagtagttaaaaacaaatgcctaccagggccacactgtagcataaatatgtgaacagggatgactgtaagaacacagaaaatggcagagcaagagaaattgagaatgtattgtgttaaaacaccatgccaaacaaacacaacataagtttgcatatgcaagcttgatgcaggtaaaggactgatggaggtgatcccagttgagaaagggtatagtactcctgaagagattgctcattataaccacagcagtgggagaaatatcactgtgctgtaagagctgctaaattatttggtatcaatgggtattgattgcaaaacaacatggaccaatgaaagtacagggattttgaatctgagttcaaattataactcagttccttactagtattgtgatcttggacacgtaacttatagtattagttttctaatttatcccataacaaattgccaaaaacttagtggcttaaaattacatttataatcttacagttctaggtcagtagcctgacatgggtctcattggtctaaaatcaaggtgttggcaggaatgtgttcccttttagaggctccaggaaagaatcttggcttttgtagcctcagaaggccatctacccaccttccttagcttatggccccttctgtcttcaagaccagcgacagcagggttgagcccttctcccattgaatccctctgacctcttctgtagctacattgcttcggagtcttatttttctcttttacttttaaagactcttatgattacattgaacccacctgggtaatccaaggttaatgtcacatttcaaggtcacctgactggtaaccttaattcctccttgccatgtaacagcattcccacattctggagattcatatgtaggcatttttcaagaagccattttgtctactacattatcttttaatttctttccttatttataaaatgagactgttctgaagattaacagcaaaaaaaagataaagtatattaaatgccttgtttaataccaggcatatagtcagaattcaataagtgttatctgatgytgtttcctgcattgcttttcctattacacccttagtttttggcttatagttatcctctatttttaaaatcaatcttcagatatttttcaatgattaagagtttcattcagtatgttgcttttacactgataaacatacagggtataagtttaaataagcttaaaaaattaaattgctaatgtgtagaatcctttaaagcagctccagttctctatcctagagaactggcccctgttcccctaatctctacaccagggtttcccaagcctgaggaggtattctgatgaatgcctggagtacttggtaaactgaaatctctgagccccataccaaggatttctgacacggtaggactggggaaagacctgagaatttgcatttttaacaagtcatcagtgtatgtcatcagtggatactgatggctttggtctgtgaccacagtttgagaaccagtgctatagaaataatggggttaatttggctttcttcacatgtgcagttaagcatatctttgtgggtttttttggatgctagctctccaaatactgacaaagtctgcttagtggtagaaaatgtcagttttaagtggtaatgcgtaaacatttttctttatcccagaatgcaaatctaccctcaaaagcactgttatttgaagtgaagcaaattgtaaccatagagtagatatcaaaacttgtgtgcctttctaaccaaagaagcgcatctgaacaagattcatagggagattttggttgtttcccatctttgttcagtcagtttagctggctatttttcagttttgaaaattgtaaaaatggaatggttttccatctgattgtgttactgcttcacaaatcaagtgtcttttaataatactgtcctgaagttactaaatgtagtgccattttttgccacatgacatttatgcagtgcaaagatacttcattattatataaggcatgaaaaacaaagtgttaaattaataatattgtttgacacatccttgaaattgtccttgaattatggtagtatgaaatacctaacaatttgcatcatgtttaaactcagattgctttgatataggaatctagaataagtttctgaaacttatttcatctccataaagtatattacggtggcaaaggtcaaattttctgtatttatctatgtgttaagaggctaagactttaaaaggaggaaaaagagcctagagatgtctcactaaaaccttcaaatatgttatttaaaaggtatcccacaggatcaattgctctttattaaaaatatgattttttaaagaggtttaatgtcattgcattgattgaacaacaatagagaatcaaatacattgttaaagaaatttgacctttaggtcatttaaactgtaagtcagacattctatttcaatactttgaactaagactgtacttagattttataaatttgatttgtggctcattttcttgaagaatagcacatataacaaattgtatttggtgtagtgttaataatgattgaaatcttagtaagacaatataattggacatttctggaccctgaaacagacactgcttctaaaactttgctgtgaacaagaatttcaagtccattctagtggtttataatgtcagagtctttaagaatcacctggtatgcttttcaaacatgcaggtccaagggccctaccactcagaaatgatgactttccatatctttagtagaacttagaaatgttaatttataatatatattttagatgggtctaatgcaagtagttcagagacaccacttcaagaagcactggtgcacgctgtagccatagtgaccatagatttggtggaagtaagaatggattgctgaacatgggattcagatggaaaatggaagaaagccaatgcagtaataagaaagaagaaaggtcaggagcttgaggaaacaattataccaagagaaggtatttcatacttttaaatttaaaagtgctaaagtggtatttgctaatttttaaggaattctcagttttcaaagctaggttccactaaattatataacatatacttaatgttaactgactatagagtgtgaagggggagagtatttcaagcatatgaggatgaataaacagttttttcctaaaagtatttgtaatttaatatagtaggtttcaaatgttcttgtttcatcatttttatttgaggggtatcttacttgtaattctaacatcaaaagcagaaccagatgtctaaaatctttggtttgatttctaacagagctgaatcccatgcccttttatcctctgtttcatgtattccacactcttctaaagtagagcattcttaaagcatcactatggaaattctaggattcttcagcacacaaattgaaaatgattattttagaaagttctcaatacaaaattgagtatgcagatagagatattttcacatgaaatggggaaataatctagattcacttttgtattattatatccaaagcgtatagatgtagacttcaaaaaaatctgtgaattaactgatataaaatttagtatttaatgtgctgaaagccatgtgtgtatgacaagaaacgaatcttggatagcatccatatttatgaaagaaatacaaagaacccccaaaatgagaacagccaacgagtatacagtgaaataactttcagttttgtgaaagctagtgtagtcaagtgtcaagaagcaagctatcacagagccagaaatctgaagaataatctttgtatttaattatacagtctgcttcaatgagaaagcctccagtagagatttgagtgaagaagccatatctcagtgggaagacaagttagttggagatgataaaaaatagaaagtaggtagggagtagaaaattggataagaagagaatgtttggacagtagccacaggataatcatgatcagaaggctttttaaaaaatgaaagaaactacttgagcatatttataaaaggctaatggaaaggagtaaatagaaaggggatgttaaagatacagaagaaattgatgacagacggaatgagatccaggaaaagcaaatagtcaaatgcttagagttggccctgaacagctaacgtcagctcatcttccaagaatgacggaaaggaagtaacaatagagaggatgcacagaggtttttagcttggtgacaagaagttaagggcaatggtgtctagttttgatgatttgtcttgataaagtttgaaaccaaaaagtggctatactgtggtttgtgatgttgaatttacaggtaagaggaacttagatgatcaactgtgaggttgaaggtagataaaagtttggaagtccctctgaggtgaaagagcagacagtgaaaggaggttttggattatcatcacgcttgggagaaactctgcttttgctcatgaaagatttgctcatgaaaatgtggaatacatgaaacagaggataaaagggcatgggattcagctctgttagaaagataaccactgcagttgtctttctgagcaagagttttcggacatggtcttcagggaagacagtactgctattcctgatagatgagaaacaaatgaggtgccccctacgttcatcccaattcacagcctcttggtagtatctgggcctggcagagggagaggaacctaaataggatctagcactttcacttgatgggaggagactgagatcagagctggggaagctgaggcagtgagacattgtagggcaaggaactggagagaaagaagatgcacagaaagaaayacctccagagattaacagagggatcatttcaaattggaatatatatcaggtaaaactttaagaggcaggatagaaatccactgaaaagcagtaggacaaaaaaattctcaaaattcacccagatctgggaactagttggcactcccatcagccaggctagaaaaccttcataatacacaaagtattggatagagtgttcaaaaagatactgccttattagtgggactaaattggctttactctgaaggctacactaacaaagctttaaattaatctttgtgagaattagattaatttacacataacagtgtgcacccctcaaaagcttgatattctttaaaggaatacaacaatatccagcatcaaacaatataaaatctgcgtgcaaagaagcagaataacatgaactgtagctagtggtgggaaacaatccatggaaacatacctgcaaaaggtagagatgaccggactagcaaagatgttaaacagctattaaaaatatgtgctgtgtgctcaagagagaggaaaatatgaacataataaggagagaaatggaaggtacacaaatgaaccaaatggaacttctagagatagttcctatacaaatcatagcaatagaaattattgaaaatgaaacacaaacagaaaaaaatgtgaaaaaagattaatataagctcagtgcactgtggggcagtatcaagtagtctgacatgtaattgggtttcacagcaaaagagaaggagaacaaaaatatttggaaaagtaatggccaaatattttctaaatttgatgaaaactataaacgcacagttcgaagagcacaatgaaccccaagcagagtaaatgtaaagaaaacaacaccatgacgtcacctagtagagtggctgaatactggtgttaggagaaaattttaaaagcagttagagaaaaaagacaggatcaccactggctgctgtggggagggtgcataatagaggcagggcaagagcccagtctttaccctgggtttggttacagagacaacagcttttaaaagtaggtgattctgggtcccgtacagaaagggatttaacaacagtaggatcttccagagggctcgtggatcacggttcgaacaaggcaggggaaggagtcataagattaagtagaactttctggtgcccaggattaaggattgaggtcataaagaatgacctcaatatttctaactttcctatgacatttctttcttatttatttatttatttattttggagacttttttttgagacagcgtattactctgttgcccaggcaacagtgcagtgtcacaatctaggctcattgcaagcctcccgggttcaaggaattctcctgtctcagcctcccaagcagctgggacggcaggcacacgccaccatgctcagctaatttttgtatttttagtaaagatggagtttcaccaagccaggctggtctccacctcctgaccttgtgatccacctgccttggcctcccaaagtgctgggattacaggcatgagccaccacgcccagcctttttttttttttttagacagagtcttgctctgtcacccagactggagtgcagtggtgcaatctcagctcactgcaacctaaacctcccaggttcaagcgattcttctgtctcagcctccaaagtagctgggattacaagcacccgtgaccgtgcctggctaatttttgtatttttagtagagacagggtttcaccatgttggccaggctggtctcaaactcctgacctcaggtgacccgcctgccttggcctcccaaagtgctggaattacaggcgcaagccaccacgcctggcctcctatgacatttcgatataactggctcagattctcagatcatgaccagcgtggcctgagaacattagaatttgctacaacatttgcaaagggatggcaaaagtcagtttttatctgtttttgtgtaatttgggtaagaagacaacagtattcctcttagtatattgtgtatgtataggagagtattggtatgtaaactgagaaataataaggtctccatttgtttcattcaactttatattctttttgtgtaacacaatgctagcccataacttgagacttaaggtatttaatgaacttctgtatactcagttttaattggtggcagttctttaataccagaaacaaattaaagtttttaaagttgacaacagaccccacatacttcccagtcaagcatagtaagaatgacatgaagttttattaagtaattgtatagtagagccctacagaaatttgcactctagtttccttagctttacagggaaggtgacgcttctgacctactttgtatgcattatgaacattaattataaaacatcatgtactttaaaaaatgtcctataaatgcatcttttctgtaaatatcatgcagattttaaaaaggaggtcatcttgtttttgtcttccaaactccagtgaaacagagaataacctttaggagttttgctgcaaagtagaaacattcattcttgcattggacacttttcattgagtgaacatttgaagcagggtaccacatgagatcgagttgtagaagagagaatttctgtcctctcagaacaaacacacatgggtcagtatctataaacaaatcagtatgtgaaaagtatcatgtgattagtccaggatatgtgccctgattgtgaagggtggctgggggccagggtgctgagcatggaggtggaaatcaaatctacataatgtggaaaagatgaccaggatgaaaggcatttgaattgttagtacttaccctggtgacagcaggagagagacatcatagtcacaggcattggcatttaaaaggtgctttgggaattgagagatgggcattttctgtgaattacagaagtccaaattgagtaggagttgggctttgttttggaacagaaattgagaacataagaggctgaatggagccagactgtgaagagctgtgaatgccagcctaataagtttgagctgtatccagtttttgaaaaagagagagagaaacagagagaacctcaaattttaacctgcaataaataccttcagagtcttgcttcagggaaatttaattttttgccatatgtaggccacatggagtcaggcagacttgttagtgggtcattgtggtagtctaggtatagtgagctaatggcctaaaagtgaaatacaatgcaaaagaaaaatgaagaatagataccagaaagattcttaggaactggtgataacatactacaaattgagtggatctttggctaaattgctgctttgtggctcctttcaagggcagtttatttctaactactaaacctattttcttaatataataaatgctcttgattttaattttagtatgaatatgtgcattgcttctatttatattatttttcggtctgtatacttgtatctgaaaatgatagtttaggaatggtcatattttatagattgggccattgaaaattatttaatttaccagacaatgtttaggaatttatagtgttaatgacttacatataaaagttcatgctttctaaaaagccctctctttcccccagcattattacttctgagatatgagaaggaagaattaccttacatttggctttataactgagaaattcttctcatacatcaaaaatgtactaattgtattttgagctctcctaaatcacttttgctccttggtttatatatatttctgagtcttgtttgttgactagaatggactctatttcagagcttctgctttttgtttctgtgtcaccttgtcattttctaaattgattggggcacccttgggggaagtggtctgtgaaggacaagtgtgcaccaaggactctgtaggcagggcaggaaaggagtgagccttgggggcgagcacaagtcaaacacaagctgggttcttcctgtcctcaccttcctggagaaatcaggacactttgctgcgggaaagcatgacctgttttaaccctttgtggtgggggtgttttgttgcaatactgctgtgggaaggcaccaccctttcttgttttccacataggactcatatattcatattttttatacttattctgccctctaatctctttctgcagccatctcattcattttcatcccaactaccattccgttttgtacacttatagctatattattgcctctttatctcacaagttgtggtatgataaataagtgatgtttgtacactgtttttgcaaaaaagctcacagtgctttctgggggtatctactaattaatctttacagaatccctatgagatagatagggctggatagggtattcagcacacaattcactagaccatgctgtctctctattatgataaaggattattattatgttaaaatgtttatacactgaatacataaatttgtagagattgatgtaaaccgaatcccttggcaaaaatatgaacatgcctgtagcataaaattgcaattgtgaagcaggttttatcaacttctggtgtttaaagaattattccagatttgcacattaaacctctgttggatagcttgttttcgttatcttgcctcttggggaatgacagggagcagtgagctactgaacttctgggatttcagcaagtgacaaactcagattcttgatagcgttatttaaaaagtatagcaagctcctctggcttgtgtgtgactcatctacatgtatataatagcttgattgacttatataattagtacttttatgtttatatactgataatatttgtggaaatctagtcaggtattttatgcttttgcagagtttgatgtggattagctgcattrccttttctacaaaagcaaacaccctgaagagttgtctcctttagggagggagcttcactcttttcagtcaacagccatgtatagtcctaagatgctttagtagtgtttcccccaccgtagcatatggattcactggggaaaaacacaaataaaccaggcagcagaaaagaaaagctagagaatcagttctttgctaatcttatgctatcacttccttctttttttttctctcaatgagtccatgttgcttttctctctttaccttccctttaatttcttttagctgttgaacatgtcaaaaactgcagctgctcatgaactcctatttcagctaaatacgtaaagatagattaattctgatagggattcatggaagttgaaagaaacttgagtttgtgtataagtatatggccactggcttgcacctctctgccttctattaggattccaagagagagggatgtagagtgggtttggaattggtgggatggtaagtgcagagatagggggttttaattcctaggcacagggggctccaggaagataggaagttctctaatcaccgaggtacagttctgcttccagggaaggatttatggaaagtaacaaaatatgtatacagtccctgattctagactactgagtgccaggcataggggtgttcttggaggtttctaagacagagaatagggtgataaaagtgaaacaatgggaaaactaacttatcaacttaaactccctggttggctcctgaactctcttccttcagcctttgcccctttcacattcatttggaggaatatttgaggggagaaaaaggagtgcgggaaggataattatattcttcctaaaatatgcgtaagatacagatcatttttggataagtgaaacctaaaaattgttttctttaccattagaccctaaagctcaatcagcacctcctgccttcgctttatttggagaagtccacatctggctggccctgttctcagatactggccttgcctgcttggtcttggcctgccctttgattcctgacctgctctgcagggttcagcagagtggatcatgttacaggggtcagcaggatatcaaactgcctttctgtactgatgtagagaaatagttactgctttgtgctataatatgacccaatgtttgcaaatacagatttctttctcttctataatcttcttaaagggtcaaaataagaaatcactatcacctagatttttttttcctaaaaagtttgattcgattaactgggaagktatttttttaaaaataattactcaaagaatatgctacaaaaagtataaaaatagactttaaaaatattcgaagtcccaaacatctaacataactacaattaatttattagcattttccagatttttctaaatatatgtttcacatactgtgtgtgctctaacatattctgtttgaaaatttaaatgttttaattgaatatgttttcccactttattttgatattgtttttgtgaacataattttcaaagcctggaacatatgcttaagaaattattatagttgaccaagttattctcctaatgattccatactttttctcttaaattttatatatatctttaaaaacacattttatattatttccataaacttaatttcccaaaggtgccttttgaacacagaaagtatggccaatgggctgtattgttaagttgctttctgaaagcatcatgcaagttacctttgaagcttctgtgttattagataatagtattttctttgataaactttcctgataggatagtcacaaggaggagaaggatagtgataattttcttgctactgagatcatataggaacagtattttaaaatgtattcactgacattgagaagctactaggagctcattattgtgttaagtgccagcctcccagggatgagtatgcagaactctgtccctaactttacaggtcctgaggagagtctggcgtaggatacctggttaccaagaagcttgatgagtgctgtcctggagttttgagttgagagctggaggaggagatattaagtttgataaggaaatagagtagtttaactcaagctgtgttttcagatttaggagatggggaagaggttaattttgtttctgttgatattattcatacatgcatgaatttaaaaaattgatgctaataaaggaaaacatcaaaaacccttaacacaattcatatacacacatgcatgtccaatgggtctgttctagtaagtcagtgattaacaaagactttactgcctgatgataggcttttccaggctgatggcaactattatttataaatatgctgtcattgagatgggaaatggcttgggatggaatgtgaggagttgttaataataagggcgttagctgtgatccacgaatactttcttccactcagtacattaaaattttggaggtaaacatgtagcaaaaattgtatggctacttttgtcaaaattaaaatagataatattttaatcttcactttggggatacattatttgcattccccattaagcctaactttctgaaataatgcttcaaaagacacttggtaagagtgttttcttccagtggcttcacgttaaaaaagggaaaaaagaacggctctttggttaacgtctggagtatatgtctacttggcttccaacttcattgatccctgttgaagtagctgctgccataacagatttacctgataagcaattctgcagttagctgaggaaagccattcattggggaatgagtccagttattttgtgtttttaattaaaggtatctaatgctggagtgcctgttgtttttccattttcttaaacatcacaaatcaatatttttttaaacttctcttaatctaggggctgacttatgttaattttttgttgttgttaattagaatcaagctgtaacacattcacagaacaggcatacatgctaaacaatttttccagacatctttttttttttttttaatttaacctcagtagaaatttgggggacttgttctcccagggatttgtatgatttccagctctgttacagtcaacttctaatggctcacrgtctgagcctctacataagtgcttaggctgtatctcagagtgattaatgactgagtaggaaagctaaacacacagcactttgtgaactaaagaccagatcaaaccagtctggattctacccccatccctggcctctttgctcaggaccccatcctggactgttattactgattaaaaatcatctctcttttgatgtctgaatgtgttggagtgtaacaagagcactgacctgaaatgaggaggttggtatttgaaccgaacttgaacattgtctctaatacattttatcttattggatgtgtctcattatcatagcctgttaagaatwttttatagtaagtttttcagacagtgcattcgatgtkttttatagtcttgtgtgtttgagaagtattagttagttatgttatctttcaagtgtttgataataatattaaataataagtagactaaatctaaagaccaagcccagtggccttgtgcaggatggcatctttctggttgataacaatgcattagtcaatttttttccagtatagaggttagactagtcataaagtgacattactttgttattatccagctctcatttctgcaccttgcccataagtggagggtgagagattctttcaaatgctttattgaaatgtagacatattaagacctggccaggtgcagtggctcackcctgtaatcccagcactttgggaggccaaggtgggcagatcacaaagtcgggatttcaagaccaktctggcaaacagagtgaaacactgtctctactaaaaatacaaaaaattacctgggcgtggtggtgtgcacctgtaatcccagctacttgggaggctgaggcaggagaatcgcatgaacccaggaagcggaggttgcaagaagctaagatcacgccattgcactccagcccaggctacagtgcgagactccgtctcaaataaataaataaataaataaataaataaataaataaataaataaataaaaaacacaaaaacacctgcattgtttcctttacctatttttatggtactactagcttttttgggaaaagagccagaaagtattcatttaaaatgtcaatagaatttcaccaataatttggaaacactgatttgtaggttttttcttttaaaacaaactcaatttattccatttaaaaaatatttggactgtatttgttctcatgttctcatatcatgcccatttttgtcagtattagcaaatagcaaattagattattcagcccctcattcaacaaacagttttaagtacctcagatgggccaggtacttctgcaaattttctccataccttaggatattctttgtttggactagaagactagaattaattcaagacagctattcaaacctaagccatttgctgaggtcgattcataaatcatgttaaaatgttagtctaacctcacataaattaatatgcgtcctttccccaaccttcacttctttggccaggagatgaaagctcaacatggacttcccaccccaggtattgatctcctttcagaatctgcctctgtattactgtttcgagagtcagggtcagcaggaatattgttttgggagaacaggtcacatattgcattagagtaacatatgattattttctgacctctcttctctttaacttaattctcagtgttttgacagagctcttgcatgcctgttccctaataaaggacaaaagacaatcattttcttatgacagtttcrtattttatctcaatctaacagcagcatgaattgataactacttgtacaagtaatgttattttatttggttcaatgtactatgactgacttttatttaaaagacccgttctgcaaattaccttggtttatacttaataggtagtttttataagcttagctccaagttaaacgttcaatgtttgttttattgaattactttctatatgaacttgagtagacagctgttttcatgttagtgagacttttttttttttctttcagactgacactgttgtgccaagctataaggagtagattcttcaggcagaggtcactcattgtctttcagttagagatttagaaaaacttttctaagctagtgctcctgtggtattgcatgctacaaagtggggaggccctttgggacatggtcaagtctttttaaagatcaaatcctcaatttttggaagagtatatatatctcatatacacagtttcttaaaatttagggtttgttgagacacatggaaaaaaatttaaatgccactgttgagtaattttatgctgtatactttttcagggaatagtcttgaactcatcggtgcccacaacttagagaaataatatttggggaacattatttgaaagatacgcaactccttctatgtttcttcattttctaaaaatctatccccaaatcaagccagatctacagagactggcacaaggaagaatcagtttacctcccaatggaattgttttactgaatcacattacactgggagctgcttgctgcatttattgccagaaagcttaaagccagtttatggctctctaataagaartatataaatgtttatggtaaacatgtttgagctttatttctggctctaattgatggctttattcccatttttctttcttctttctgtccagttttacacttctggaattttcttgtggttaatatatcctttcagcttcctttagtcttttctagaatggaggcagaatctaaataaacaaatacaaaacatctgcagtagaaaaggataatgagaaaagaatgattttttctttgaacttctgttctgtggtcaaagacaatatttctkctttcttaaataaaatagcctggtaaatgctattagtagacaaataaagaaatttgtatttaaattacttacagataccataaaactttatatgtgttgcctcaagtagaatcttatgctcttgttrttgaataatttagtatattggcatttatagttaagacatcctattttaacatgattttaatagtgaatcacttaatatttaattaaatagttaatgttaccttatgtgcatacttaaaattttttttaaagtttacatatatcatcatactgataggaaaagtctataaagtaggcaaggtttatatattacccccatttaaaaggcatggttgggttatgacttgccaaaaaacaaaaggcaaaaaatatatcatgtggcaaagaaaaataagacattaaattttgaaagaaccttatgagtcagacataattcatcaagtacagtttgccttttagttttatgaaatattaatactgaaagggaccttagaaagyattttgtccagccttctgattttatgagtgaaaacaaccaactaattttagaacattcaaacaagtattagaacctctactcaatggaaccatatttatcccctgtataacttcaaatagagttgagtagtctaatgtatattcccaaatacgaacattaagaactttaacacctggttcagtgttttgacccttttaacctctcattactgtaaccattattaaaactaaactgtactgtcttcagttagcaattgattagctcttttttctttagagccaaatagaccccaaatgaaaatcttgccacaggcccttgaactctttcttttactcttcccatgtaacattatggagtttgccggttggttataaatagataaataaacaaaaacagagccaaacaaataaatgtaaatagattaacatatcagggctctgaacactcagcttcacatagaaaaaggtaaacaaacatagataagtaatatttgcagcattgtttataacataagagcttgagtcagaatcctttgagttcaaatcctcattctctstcatttcctgtaagcttggtcaagtgagtcagtaactgtagctttgtgtctttatctgtaaaatagggatgatacctatatcataagtgttatgttatgattaaaatgaaagtgtgtgttgtacagtgctagtgaagtataaggaaatatgcatggtaagtgttcattctaacatttggtatattgcaatcgcacagatttatttttttcttctctttggaaacaggagcataacttgcttatcctataattgaattatattattataaggtgttttcaaacaggattctattgaatgattttagttatcagacctcaccagcaccaaaaaggccattttaatttatattgtttttttggttagctgaggccagaaatttgtcttctgaattttttcttgataatctaaaatggttcaaacagacattaattttagccagaytttcaccatttcagtttrtactctcctgtaatctggtctacaaattaaatattgagacaacatacttgtcactttttggaggcatttctaaaccatttgtttggatacagagtaaaaatacttttaagtttatttatatagtgatcaatggaacaacctgagtttttaaatctgggtgtgaatgctgatgattgcttctgtagatcatttgctcaaggagctgtgatataattttaaatttaattcatgaaattgtagatcccggaaagtagtttattatgagacgcatagtaaattttaaaatgccctcaatagtattttcacagtatgtttttaataattactaagttgtcttcataggcccataatagacttagcaaaacactggtttatatttgtagttttctgaattttagagaatgtgagggtttttaagtgctggaagatggaatttagtttgtcagggaaaaattctaggcagagcaagtaaaccctgtattctgtgttgtaggaatgcagttctttcaggaaatttaaggcagtaacaacaaagcaacaataatttagtgttataattttaaaacctattgtttctttgaagtggtgggtcattatttagacttgctattctattggcaaatattcattttaatcatattgtaaaggtataatttaaatattttgaagaggaaaaatctgtaccttgcataacagagtcttgatcctttagggctgttagtctagtagattctgttgttttcactcttaccatattaataaattcaatgaaatatgttcattaataataaaaaggcacatcgcttatctctgtatgtatgtatttggtgaaaagggggagtataactttataagagttttcattttgcttgctgaacaactaactgtttgattttgatagtgaggagaaagcatgtaaaattcatactattcaggtgcttttgagacattacagtgataaattgcgacttatgcactgactaattttccatgtatcctttactggaatgtttcttattaggaagtccatgagtgtactcaatggagataaccctagacatttcattcctgaatctcaaatgaaaggactcttggcccaggacacttacacgttttcgtctggagttcaatcttgaggtgattgtagcagaagatgttgcatcttagactgtatgtctgatggagttttggagattcgggttcataatgtggggacagtggatctcagtaggttgtttagttttgagcttcaaaggcttgtaaactcaattttacataggaaggaggatagatgcttttcatagaatgggtataggactttgcaaagattaagtgtcactgctttctgtaaacagttgatagttatacaaaataaagtccatctttttttttctttttttattatactttaagttctagggtacatgtgcacaaagtgcaggtttgttacatatgtatacatgtgccatattggtgtgctgcacccattaactcatcatttacattaggtatttctcctaatgctatccctccccactcccccgaccccgcgacaggacaggccccagtgtgtgctgttccccaccctgtgtccaagtgttctcattgttcaattcctacctatgagtgagaacatgcagtgtttggttttctatccttgcgatagtcagaatgatggtttctagcttcatccatgtccctacaaaggacatgaactcatccttttttatagctgcatagtattcaatggtgtatatgtgccacattttcttaatccagtctatcattgatggacatttgggttggttccaagtctttgctattgtgaatagtgccacaataaacatacgtgtccgtgtgtctttatagcagcatgattaataatccttcgggtatatgctcagtaatgggatggctgggtcaaatggtatttctagttctagatccttgaggaatcaccacactgtcttccacaatggttgaactagtttacagtcccaccaacagtgtaaaagcattcctatttctctacatcctctccagcacctgttgtttcctgactttttaatgatcgccattctaactggtgtgagatggcatctcattgaggttttgatttgcatttctctgagggccagtgatgctgagcattttttcacgtgtctgttggctgcataaatgtcttcttttgagaagcatctgttcatatcctttgcccactttttgatgagattgtttgattttttcttgtaaatttgtttaagttctttgtagattctggatattagccctttgtcagatgagtagattgtaaaaattttttcccattctgtaagttgcctgttcactctgatggtagtttcttttgctgtgcagaagctctttagtttaattagatcccatttgtcagttttggcttttgttgccattgcttttggtgttttagtcatgaggtccttgcccatgcctgtgtcctgaatggtattgcctaggttttcttctagggtttttatggttttaggtctaacatttaagtctttaatccatcttgaattaatttttatataaggtgtaaggaaggaatccagtttcagctttctccatatggctagccagtttttccagcaccatttattaaatagggaatcctttccccatgtcttgtttttgttaggtttgtcaaagatcagatggttgtattggttttaacctatattttaatgactaatgcatatgtggataaatctgttacaatcagtcatgcagaacttcattatagttaacactaagatctttgctttaggaaactgaattactatattaacgagtactattaatatgataattcttttaattttcttgatacactacacaataaacctttcagttcaatgttaattttaagtaaaactcttgttccaactcttcaaagtaaagtaaataaaccagtcaaatgtgctaaaggcacaagcagaagcgttggccagagattatgcatctatagtcttggaggagaaccaaagatactataatcacaatttgccaagtctgactaatgactccttcaaagttgagaacaccagtgtgctgctagggttttgtgaatgctttaaactttgattgagaagggggtcttctgagcttaggccaggctgccagtagggatttgcacctgatcagacctttcttttttttgagtacttaatagctgcttctgccagaaaaccagatcaaagaatagcaggggagattagtacattggttttatcagccattttccagctacagctcttataaagctgataacaggataggggtgaataaaatcatctgctttcaacctccctgcagtgctttcatcttgatttaagaaccaaggaggaccatgtctacagtggacaccaggccggtcccctctccatccctgtcagagtttaaagcacttaactagtaatcactgctctgactctggagtagtcagctaccatgtttcctttgcttttgacttggcaactgctgtggcttctttagcacctggtcctctgccagccatctcagttaccttggattgactacagaagacttttttgaggtttgtatttctcccactattatgaaggcaaacggttgcagcctctatccccctccctaggtagatgacagaacacatatagccttttgtctatcctttttttttaataccttcaaggctactcttgatgttaaggacctaaataaaacaaatcttacttgcccaaagtggacagtcgaagtagtcggaatcatagctttttaagattttttttttaagaccttagctatccagttctgccctctccttttatacagcatatgtgcagctaaaaacaaagcattggtctcttaatgcctgattggtacactgatgtctccttaaccaaatagtatgcttggtctatttaaacagaatgattcctgagatggttttggctgagaaataaattaaaattttctgaatagcattttgaagaaatgtgtactatctgaaaaatttgcaaaaatacattctaaaagttaagactactggatgctgcgtattgtacattmtctaaagacgcatatataattgatgtttctgacattgctagtatctgtattgtatatggaaaatgcttggaattgaatatggtggaattgcagttttaatggaatatgcttactttgtaatacattgactctccttttatattcaatgtgtactaattagttatggtcactgtatgtgtcttcctaatgttaggggttgaagtataatagattgtaaaataccttgacctttgagccagtagaactcagttaaatttttatttgtcactaatttaatgaagcatttggaattctatttaagctatatgtgtcacttttctcatcccagaaaatatgttgatccattttagatactttctaaggtttcctcagtaggaaaatcctaggagaggacttagaatataatcttactgctcaaaatgattatatttatgctgattgcatatttacatttttcttttattttaataacacatggttgatattgttgtaatttattgatgtcaaaaactctaccaaaattataatataactatgagaaagtataatcccctttacagctatcttgttttatgaagtggtttccaggaaacgatcttagcccaaaagccagaactgcctattatgggataaggataatcgactagcaggtacaatcagcagaaaggaaagtgaatttacttggtttaaagactttcttgcagtcacagaaaatgctaaattgattttgtttttctccatagaaaaactgcagcacgttatataagaggagttgctttgggagactataataccttttacagactaatcagtgattttaggaaatgttgttgttggaattagctggaaactttgtaattggaattgactcaactttcatcacaatctctctctcctcctttttttcatattaaaatcagctgatgaattacattgtctctgtaatgtgtttcatatccagtaaccttctctatttccaccagcatatggatttctatatgccattctcccaattaagtgccctcccctgtcatcgacatccaaatgtagggcaccctgcaaggtgacattaaatgcattttctttatacactttaactgactttggagaatcaaaatcttttgcctctctaattataccttttttttttttaaatttatttttttaaccatcctgttagttaagatgccaccctcttttgggcctctccagcttcacctgacagtctctcctctgtgtttcagcagatttatgtagctatctctgtcatagaccatatgatgtcctcttgttactacctttattttatctagtctctggctttttggctgctgggattgtctttattttagctttgttacccattgccctgcagcagtgcctgacatattacagatgctttctaagagaatttatcttctcttgatgacaggatccatgtattctaccctatcctgccttctatacactgccttgcacagtattgggcataaaatttggtgttaaagttaagaattgccccttaaacccttatcataatttaagtacttaggtattcttgatttatgctatgtgttgttttttgaactcttaatgaacatcttcattaagagttcatatttacaatttattggtggaaagccaatgataagactaataattattcccttcaggaatgttaaccatacagtttctgatttcctaccaaggtaagaaaaaagcttgaaaagtatctctcaatagaatatttaaatcctctgtgtttatttacctatgtgttggtaaactcatcaagaaacattttagttatctcagtttatcttaagagaatatatagctagcaaagaataaaatggtaagaatggattcaatatattgaaagtattttactttagatggctatatttaaaggggacgtagtactccagataaaggactgatttaaaggtaggtgatcaggtgactgtacagtaattttattagagccattctgttttagagattgtaaaacaaatgaattgttaaaaataattttactgttcactggggcacaatgattattacagaataatgactttttgttggcaaggcagttgggcaaatataagtaaaccattttacatttttcgcctgtctttgatgctttgtctttctgaataaggaccccattcccaagaaaggcgaaatcataagcatttctaatagctctgtcttctttcatataaagtttaattaatggttctctcactttttctgcattttatgtttcctctcacgtagaaaatatgtctttttgtgctcaataattgatgacccttggagtttagtgacaaatgtgagttaatttaagtcatcaccatcaatttaacaagcacctctggtaatacgtttttcacttttaaaaaattgtatcatgaagcaaaatgtgtttctctgggaagcagcaaagattataagataatcacacacctctagggcatgagaatgggaaaggttcaggtaaatgtatctattcatttgacataatgattatttcataataactgaatgcttccatttcagccttccccaccgccactatcccattcctccctattctgttagtctgggagaagaataatataatttttcttgtgtgctaaaatatgatgctggtagttttatgatggttccgtatatattttagctgaactgtacattttcttataatcactagaaaataagaatggtctcttagccccagtagttgatgtaatagtgaaaagagatatatcttgaagtcttttgctcacgcctttcccaataaaacttatcagatctcctttttccagaagtctccaatttaaactcatattctgctgttacttacaattttgatgtacattcatgtgtttgtaggtttttactgtttgtagaatatttaagctaatagttaacattgtactcaatatttcaagtactgttacatagccacagttccaggactggagacaagggattgtatatgttgttattgtgaactgtggtgtcttgtggcttgtttagtcaattactcaatataaacttttttgaggaagttttttgkgaattattggtaatagccaactattggagaggaagttacacagttttaaagagcattggctttaggatcaaatccagttaaaataaaatcccagtggaatcacttgccatctctttccttgtacagcttataaagtgtttttattctctatttttattatggctatcaggtacaaaaataaaagagagatatttccccccatggaatacatgggttttaaatgatacagcagtcaataggttttggtgaaataataaataagacagaagaaataagagaggacataaaataattcatattttgtggactcatctagtgatttctcttcttggtaaattggttgaaaaaatgagttacatttttgcctgtttaaagatgcatttatggcaggtagataaatcacagactttattcttttttccatttacttcatactgactcatcactgatgcacacccagaaaaataacaaatcagcattaatatrtgagcctttttgtttctgcttatttgtgaaaaacttaaatatcgaattarcattgaattagctatgtgatttcataagatttttatgagattaataacaatgttcaatatcataataaataagtttccttacagttgatgatttctagaataaagtgagatataattttcactcagattgtttagaatttttgtttttcagaaattactctttgctatattcctccttcacatcccacttcagttttggtcttcacttccatgcacaagccccgctggttaggctagcttgaaaacattgttttcaggaagcacacaaaarcttccgagttgaaagctggttcagcacaagtttgttttatttctgactccctgtgagctttgcttggattcttccctttggcattgtgtgtgcttagatgtgtattcagtatcctgcacttttggacatgttgccttccatgttggtgttatagtctcrtgattctattctaggaaagaccttagattttgtggtccaaggatgaaaattcatagaagaaggaattgtggtctggagagagtaagtagcataatcaagattcaaatcaggcttgacctctaaattcagtgtttcttagcaaattgcacgtaaacttattcttttaaaactgcctaatccagtgcttttcagactttttccacgttggtatactgagcctcattaacccatctgtctgggtccccagtcactgccagaccactggaaagtgaagggaaacaggtatttggtagacatttgctatgtgccactgtgcagcgtttagtgatattgtcaaaagttcaagcaatagcacttacttctgtgtcctttcccagcctcaggaccttttgctcttctagtagctttagccttgtttgattcttgttctgtatccacaacctactgccgtccttcctgcaagaaaatgtgtgtgctagcttagtcacttcagtctgctatagcaaaatgccataaactggatgtcttataaacaacagaaattgatttctcactgtcctggaggatggggagtccaaaatcaaggcacyaacagacttggtgtctaatgagggtctattttctcgttcatagacagtgcctactcactgtgttctcacagtgcagaagaggcaaggatctctcatgaataagggcactaatcccattcaccaaggtggagtccgcatgacctgatcacctcccagaaacctcacttcctaataccatcgctttggggattcaaatttcaacataagaattttggagtcaaacagatattggaccatgacatgtatgaatttttaaatttttaatgtctctaaaatacactaagaagtaattaattaaatgttgtaccaccttagagattcaaatgctttcaaatttcaattcttagttcagggcaaaattttgaaaggtaattccatttgatgagttcacttatatatcacactgcatagtaagcaaaatgcaagaactgtggcaccagactatctgggttagaatctggtgctgccactgaatagctgtgcgaccttgggagagatacttacctttctttgcttctatgtcttcatcagtaatattgcccctacctcatagggttgttacaagaaccaaatgaattaatatttaaagcagttggaagagtttctagtacatgatcagtattatctatgtgtttgttagcaaatgactaattaaaaagttatttatatttatagtaaattttctttaaattgaaagtttcaaaaattagttatcttagcagaatgtatgtatatttgccacctcatgtataataatcaaatcagtcctaaatcatgtagyttttgtggtgatatgatgatatacggagtaggacaaggtatatcgggtaattgtgtagatctttgagtgtattcaaagtttggcttttaagtgagcttgtcacttcgtttctctcagctccatttttagtatctataagatgtgactattaaaatctgttctacacacttgtattagtctgttttcacgctgctgataaagacacacctgagactgggcaatttacaaaagaaaatgctttaatggacttacagttccaattggctggagaaatctcacaatcatggcagaaggcaaggagaaacaagtcacatcttacatggatggcagcaggcaaagagagagcttgtgcagggaaattcccattttaaaaatcatcagatctcgtgagatttattcactatcacaagaacagcatgggtaatacctgcctccatgattcaattatctcccatsaggttcctcccaggacacatgggaattgtgggagttacaattcaagatgagatttgggtggggacacaaccaaaccatattaacacctagcaagtgttttatggggatcaaatgaagtaatgttcatgaatatactctgtgagccaggtatggtggtgcatgcctgtagtcccagttattcactgaagtgggaggattgcttgagcctaggagtttaagtttgtagtgcactatgatcatgcctgtgaatagccactgcactcgagcctggacaacatagcaagaccctgtctctaaaaaaataataaaattaaaaatactttgtaaactataaagacctatccaaagtaaatatattcttaatgatgaygacttatgtatttaaagcactgtacagttytttgcatttgctgtaaatatatgatggcaaaatgcttacctagaagtaacagaactrcatgtattactgtgtatctgatatcaatatttaaaatagtgggctgttcttctttaaagaaaaacttatctttgcttatttttaatttccttgttagcagtgggtgcttagtacaatactccaaataatatcactcctgagtttggaacagacataagggaggcaggcatcttcttcgttaactggacctacatcagatgtggggaggaccccccatcttcctctggcttttcttcttttgtcatgttttagctttgctgccaatctccactgatgggtatggcttttttctcattgttggcagggtagtttgcttgatgtagtagtctgcttcataccaacctcctctatcttcaaggacctccttggaaagaaacagctgtgcttcttctggagcaaagtgkttcactactctgkcctttccaacggtggtggtctctcacttagatgctgcctgggaagcccttagagtcccagtgccacctctacaaggtrctctttcatgtgaagacaggaaaacctcttctgtgtcctcatgacagcagaaaaactcccatacacttatcaggcacaccactggtgtgcaagagcggcttgtacrgactctcaaatgctaactgttaaatttttaggaagttgtgatcttgttgttaacacaatcattactaattatattatgtaagtgattaatcaaaaagattattttagaaactgtactaaatatttaaaatatcactttcttattattttgctgcattttgttattacctgtgctcctgatattgctttatatctgctgtatttttatggtagataataccgtataatggtgtgctactgcacatctctccccactccacattctttaacttcacactagtagcttgaaattggccatggtgagagcatttctacctctgaaatcaacaagtgccacaaaccatgatctgtcattccctgccatttgttgaacatttaccagcagactactgggctcactgtattctggtctcttctggttctactgctacaggctacagcagcaagtgttccctcattaatagtctctataatgagaaagaaattgcctcttccttcttaggactttttaccaagtcctcccaagaactctgtcatgaagcatttatccagaagtcagttgccagccacctcttctcataggcaccccagtcttgactgattcttctacagtcttccttgtgtttggcccagggagcgttcctgtggggtgagcactcgcttcccttcctttgtggaggcaaggaagctcatcactatcagtactggacttctctgcctggtcctcagggctcagttcagatcagctgggtgtatgaaggtgaaagactatggtagacgtgggtctgccacctcccagcaaacactcaaggaaaattggcccagttttttatgaattatctagaatgtaaagcacttagacttttttttttttttttttggttattggttttggacccacctaaaaattcttgggaaaaaaaaaaaagaagtaccatttaactttgtwttataaaaaagactgaaagggtatttcatttacaaaatttatttcacaaaaaagacttttcgtataaatgcatcacattaaacagaaaggtaggaattcctgatgtctaagtgtctagtcctaaactgattttccaaagcaactgagagtttagttggttttggagacagtgtctgtcattctctccctctccctccttctttgccttgccccctccatakctctgtagttgggtctagtttagggcttacctatatgaaagattaagtaaacactctgttcttttctttgggaagttagtgttgttttagtatgtggggagtcgaacactctttaaaataactcatttctagaaaacaaaaaggccaaaaatttaggataagataacagatattgaagatcaatgattacatattaagtctgtcagtgtgattctcttgagataaaaaatccttttttaagagagtatagtgcataatatatttttgcttctatgaacttatttggtttcaataatttaatattgaggctgtctcacattttaaacctagggagaaaacaggttggaaactacataaaattggtgtatcaacagttttgagttgcagtttaactttcactatgctgcttaatttgtcatccataaaattgggatgaatccaaacctggaaagtaatatttgactgtaataccaagccatacagcattgcctgatccacataaagcacacttgatcagttttgtcatttgcacatgtggagagttttctcaggctgagtaactcctggtattggattctaggcataatcatgtcattcttgcttgttggtgccatgaaataattagcccaccatgtaagggcccaacttgatgctgtgcttaagagtagagcctatattcttgattcttgtggaatttgtgtcttatatgaaagtttgcttgacccaccagttgcttctttttgcttttaactgttaatatagctccaaaagctattgcccaaatttgtcaaaattcatatttaaaagttctgctgttcaatgagctagtcactagccagatgcaattattaaaattaaaattaaaaatgtatttattcatttgcactatccacattttaagtgcttgatgcctgcaggtggctggttagtggctactatgtagacagatacagaacatttttcttgtggcagacaattttgctggacagttttgctctagactgaagctctgcacacagtacttcccctgtaataactatagacatctggctagtttttactgtgttacaaacattttgctaattcaagtttggagacaatggatttcataaagaaattataataaaatatacctgtcaatgtacaatgtagtgtttcaccatattatgtaataaaatatcttaagtgctagtttggaaaatttgctgttttttgttatagtgtttttaacatcttttgccctctagaacattattctcaaattttaaatccatataactattgaaaaatctgtataagtattgatttctgcttttacatctttaatcatatgaaccaaaagaaatacaacaatgaatcatctaatatgtttgaacaaaaattgatgggtttttcttttttgaaagttttatttggagcactgagcttggaatataaaataaataaagacaacatggaatttaaatttggatgggtaaaatagaaaatgaagtttagaggcttgatagattgacagatcaagaggggtaaaacagaaactattgctatataagctcaggatgaaatactaagtagagacctcagcctatacataaaaagagatggaaaaactaagaaaatgcatgtttgttttgcaatttaaatttttattttcagatcttagaggacaactatatcattaaatgttaagcttgctaaagcagtattttttaggtgtctttaaagtaacttactacaacttcctatatttttgcagcatcttctaatgtacatgaaagttcagtgaatgtacatgaaagttcagggaccacatgcttaaatactggagttgaacggagaactaagcttgttttgaaataatttttgttgtccctgcttccaaatttgttgtggtagtggttatatgagtcttttatttattaggagattaggaaactgctttcataaatggacattatacaagcatcttcaagaaacatgtttcgcttctccagctccaattagaaaagcggtaatctccatcccagccttctggatggctggcctctcttcctaactttcttacccgaatacctctttataggaggcttactacatgccatttgctatgctagatattgtgggtagcaatgataaaggccatcttctctattttatttttgggcatcctcagggttaatgccgtcatcttttccttcaacaactgcagtggtctccttaacattgtctctgcttctggatcttggtctcccacaaaccacttctcacagtcatcaaaacaaacttcttcagatcataattcagattatgtcactcctctgctataagcctgttctgttacatttagaatgaaatccaatcttttaaaaaatagaataaaaawawatatattttaggaagccatgtcatcagaagtgtaatccagagaataatatactctataggtctaaaaaaagattttctaaattatgcaattatattttgataaatacttataaatattcaaatacagacatcagtaaaatgaaaagtgaaactcatttcacccatttcattcaatttctcccccaagatgactactgttaattgggtctatatagtttaaggcctttcctatgaaattacgtccatgttgtacgtttgctttayatatgttatggactggaaaatgaaagcagttgtgtggaagggttcttatgttacagaaggaagtcacatttttttagtttccttttaactttctttaaatgaaaaggaaagaatgttttaagttatatcttcamctgctagaaaggtagtatacttagaatttttatggccctttcctagggatttatgattttcacataaaagaatgaaaattgaacacacactgaattatacttctaaaacatacttgaaattttttgcctctctctattcgtgttacttaaccagtgcaaacttactgtaagtaacgaaatcattgaagaaatacacagaaaatgaaagtaatccataatctcaccttctgctttctagagatgactcctaatattttgacaggtggcacatacatatgcatgtatgtatgtgcatatatgtacattatatatgtgtgtgtgcatgtgcatattaaacttgatattcagtggaatcataatacataatgttttggtttccttaattaggttattgtgaaaagctttcctcttcatattctatttttaagcaacctgtcccaatctgacaatttctcactcttagtttagtggttttgagctgtggcatactggtgttccctgacagtggtattgcaggtgttgaaaaatttgtagtgtgataacctagcctatagggtggagcctggaactatgacagttgtctttttacttcaaggkgccacacagwtgttgtcatctcctgtttgtttttcataatataaaagcatttgggaagcactgctaaaaatccatgctttccctgtctccctcctcaaacatggacctccccacacttctcccagcttcccttattacctctctgaggctcttctcctcacagcagactgatcttttaaaaacacatgtcagatatcaggaacttaggaattctaccccatatcctccactggcttctcaatggagtcaataaaatccaaatccagttattggctagctccacgttaaattgtcttctgctctctgcctccctcattcagctttctgatcgtggaatgctccaagatcattcgtatctcaaagtctttgtgcctgtcattccctccgcctggaatggcattacmtccatcttcccattctggtctctactcatattttgccttctcagaggctgacctaattaccccgtctctacccttctgttygttaactcctttgcctccttgccttagcactttggtcactgttccatatgcttgtttagtgtctttcttccatactagcctgttttccatgaagacatcaactttgttttatgtttttcatctcttgtacatatcaggtgctcgagaaataattatctaatgaaaaagtacatatacaatgaaaaaagtacatagcgaaactaacatttttattcagtatttgtttcctttatttcattttcccagtgccttggatttttctggtcagttatctctagtgttagcatgagcacttcaggaagaggtaagggagagatattagccagttaaaccatgcatgattactctgtgatatcagttttatgtaacatattttgatctttttaacatagtcaaatggatgttgtaacacttgcttgatttaacattatattttggtctttattatagaaattttaaggaatttcacataatcactattttcttatagaagaatatagggacaagcagaatggtgattttcttaaaggccttatttcttaaagagaataaaatttagtttatgtataaagaaaatgattttattctcagacactttcctccctgtgtgtatcccctcaaattatcacatttaaataattctcagtggtcctaattgatttctgaataaaatatattctggccatttttctttctcccaggatttattatgagccatgacaataaagtttaggtctatttacaaatcagagaaccttcatatttttgagaactggaactttgaactagattagttgagtatatcatgttggtttttttggtgacacgcagtatagagaaaattaaaaatgaatttccatcacacctatctttgaaaactgaatttagcttaaattgaaaggggtgaaaagttggcattttattacatcatttcacttatcttataaatcttagagtgaagacaatgtttatgacattattttaagtctgaaattaaatttaagtgaagcctttctgagacttatttattttaaacacttgttattgcattttggattaaaaaattacatacacamatttgttttcctgaatatataatgtgtttgatctctccataaatatgtatgttaatatagcactaaaatctaaatctttccacattattgtacacgtaggtatgcaataaatatttcttgattggttgactaatatccaagcatatttaggcatactattacatgtttaggtctttctgatgagattccagttcttgaatctggttgttgctaccacactgacctttttaaggtgcaaatcacattatccctcatgtagaaccctttaaaggcattacaacaccttcaaaaataaaataaaataaaatraaaaaaggcagactcctttttgtggtgtagaagtccatgcaagataaggtcccagcttcctatctcccaggtgtcttttttttttttttggatggagtttctctctgtctcccaggctggagtgcaatggcgtgatctgggctcaccacaatctccgcctcccatgttcaagcaattctcctgcctcagcctcccgagtagctgggattacaggcatgtgccaccatgcctggctaattttgtatttttagtagagacggggtttctccttgttggtcagtctggtctcgaactcccgacctcatgtgatcctcctgcctcggcctcccaaagttctgggattacaggcatgagccactccatctcccaggttttaatctcttctgttctattcttcctaactagatgttcyacaaaattgcttgtgccaatagctcattatatttcctcttgtcagtcttttgcaaatacaccttatttggtctgtaacgccctctttttttgcagtgttttaaaactgcttggaatcatcttttttttgaatcattgtccgctttcccagatagaaaatagtttgcctacagccgggcatggttgcttacgcctgtaatcccagcactttgggaggctgaggcgggcggatcacgaggtcaggagatcgagaccatcctgaccaacacggtgaaaccccgtctctactaaaaatacaaaaattagccaggtgtggtggcatgcaactgtaatcccagttactcgggaggctgaggcagaagtgcttgaacccgggagttggaggttgcagtgagccaagatcgccactgcactccaacctggcaacagaacgagactccatctcaaaaaaaaaaaaaaatgaagaacatagtttgcctactctttctcttgttttacattattgctctacatatgtcatagaggtttaccttctaaaaggtgtggctctgccttttatccatcttcgtatccctagcggctagaatagtgtgtgctcactaagtgctgggttaatgaaggatgtttcaaaggtcgctttctctgaagtcttgctgttttcccaggtggagtaattttctctctcccctgaactctcatagcgttctaactctgctttatcacatrtaactgtgctatagttatttcctaccatgcttatctcttctgccacattgtgactctcttgaggacagggaccaaaaattaggtatttctttctgtcagatattagtccagcaaatattagacactccataaatttcttcttgttgaataaatacatggctaattgttcaaatttttaaaaattggtattttatacaggcttatatttttgttttagctggctatctgataaagaaaacctatgaatctacttacagtttttttcttgaaaaggaaaaagttctgaaggaagaaaacctataggattgaaactgtcatgtaacttttagctcagcttggagatcagcctagatgaatggttctcacattttagcctgcatcagtatcacctgcaggagctctgaaaccatggatcggtgggtcccacccacagagtttccaagaagtttccaggtgttgttgatgcttttgttgccaggaccatgttttgataacttttgacctgatctgtcttaccagtatttttcagccttcagcatcttgataatttgttcatactttaatgccgatatgtggagtcagtgcaaaggttaaacaggttaaatatctcctgatgtctttggcaaaggccttctgttttcatagacaacatctaaaatcatttgagtggctctttcagtcctcctaaatcactttatgttagtttctattctatacactctttattaaaggaggcacttggtcattataatgtctagtgctttccctcacttatgactagatactgccaataaaattaatgctttccctcgtctttttcaccatctcccatattgtgttctcaatgaagatgagtttatctctctccatctatccttaaaacctgatttagggcccggcatggtggctcacgcctgttatcccagcactttgggaggccgaggtgggtggatcatgaggtcaggagatcgagcccatcctggccaacatggtgaaaccccgtctctactaaaaatacaaaaattggctgggcatggtggcgggcgcctgtagtcccagctactcaggaggctgaggcaggagaatcacttgaacccaggaggcggaggttgtggtgagctgagatcgcgtcactgtactccagcctgggcgatagagcaagactctggctcaagaaaaacaaaacaaaaccctgattttattccacttattttgttttatatgggtaacaacattggtctatgaatcaggcccattttaaaagtagagtttcaagcctttataattgtacaaaaagttccaaggatttatttctccctagtatttcttaatttctctgcttcaacccatttttactgattgtcggacacccagagaggtcataggtattcttcaaaaagtttgtgatatgaaaaggatgtcgtttccttcttttttttttgactaacttctgaataatctctgagtattctagataaaaatattttgccttaaaatttttagcaagattcttaaagtcttacagacttcatcttttgctgatttatgacacatgaatattttcttaagcatatcgtcaaaaatttgagttcatcttctgcaaagaatcaagtgaaccatatacttttaatgtcttcattttaaatatatgttttaagaaaaaagtcaagacaaatatagatatgcatatttgtgtgtttgcacccattatttttagtcgttctgggatatcttctaaagttccctattattttctcctgttgaacctgacygtcaaacgtattgtttgttacatctcttcgtaaatatttttcaatttcagctgggcttttactagctaaaagcactaacatcataaattatataataatatgtaattatatttgtgctatttaaacgttatatagctaatgatatcactgttcttgactatttgtcttgtaaaataaaacagaaaataaaagttcacaggcgttctatccctaaattcaactaagagtacacaaactagttactcttacaaactttatgtcaaaacctttctcctctcccctccaaccataactaattttttcagtagggaaagttcacaatacttttgaaattacttaattcttaaatcaatattatgtaagtagagaattctctttttacaagaggtttaaacaaaacaattacttattaatatatctgaatttgtgatgtgaaaactcaagtttagcatctggctgaactttgtctgtatgtaggctcatccatttatcttatctcttcactcaaaattaatcatctggtttacttaaaggttgcttttctttgtaagtgcatactgtcatcagatttcatctgttaatagatatttagtatgatggtacatgtaggctgaactactgattttaattttcttgagtttcataagcataaattaaagctattgagagttgtttaaatttgttaagaacagacttactgtgttagtttgaaagcattatttttcaaatatagttgtgcaggtgaagtgatctacttctgctatgtgtaagattggactgttggtgctgaaatttaaaaggttctgcttgtggattgtaggaagacaaatggcacatctctagaagtgaggagaaatagtactgtaattcagtgtcatgttgatagaagtagaaaccttcaccagtcatcttttatttttgtaccagacaactaactataaaatataacccagatggtggagctatgatagtaaagatacagaaatgacattttgctgatgaattttctgctactctttgcttccccactttcagttttataccaaatcttttatggtgtaggttgcttgcttatgtatctaaggacagatccataggatgaaaaatgtgtttaagggcatttttagatcttggattatttcagtaaacttttattttcctcttttaattgcctttttggtttttcctctctttttgctaaactaatattctcacataaattagactgagccatgaatagtgggtcctatttcaattttatttctgagtttcatatttaaggcatttgggatgtattattatgctctgcctgtctgtctgcctatattggaattgggaagcctcagaagagagcaggggtttggcataccttatactgtggtctctagtctcaggcagcttcaccacacttaggccctgaattgaactgtaaaaggaattatggaaaggggctttagtgataggggtgtcagacattaggaatgagcaaggtagtgagtttgtggtactgtttttgtagcacagaagagctaaaaggtgtatctgcgatggcaaaggtcaggaaaggggctaacatttatgagaaacctcctaatttgtgtataatatcttttaatctttacaatggcctcatgaggtcggaactgggacctgagttgaggtctgtggctcagagttggggctctgctgctgggaactgtggtgtgcactgtgttgagtgggtgtgcttgtgtgtgtctctgtcttaccttgagggtctatgtcaaaaccttcttgagaaagcaagtatataatcccttctacccccagagccattttaatgatatagagaatatgcagagaacacaagaactttttgtgggtttattttgttaaagttattcattctcagttcaggttttgggtttgttttcagaaatgagaagtatgtcttagtcactttaagactaagaagtcatgtgtttttgatacatataaacctgcgtcaacatctattctaattaaaaacaccattgataatcgtttacaagtgcaagatttcaggaatgcagaattaatttaaataactagtggactattattataacttcaacatactagcatacactctgaaatgattattgttcattcatttatttagattttctagatacttttagtgattacattagggatagccaactccctgggctaatttgaaacataggaatgtagtatgcttgcatattcatttcagtatggaacttgtgaaaatctccgtctttgggcttttctttcatacaggctacttttgtatgaagtctgttaggttttattttctccttctgatctgtggtcctgactttttacagttacctggacactgccatgtgctttgactgatgttctgttgtttattaggcaaaacacagtatcattcttgaaaggcctgcagttggtggatgctctagctgcttttcatgcaactgcactctggttatacctgatgtcatccctgttagataatgtggtagtccttctcatcatgcaggcaattggtaatgctaaacctcaggatatttttgtaatcaaagcccttgtaattggataaattgatgttttattaaagaatacctggtaacattataaatagtattaacattctaaaattaacttgtcactgtaatattaattacaktgatatatggatacatagaattatgtgggcacgtgtatatatgtatgtgtgcrtagatatatgaaagtgaaagaatatttaaacctatactgtagctcctgctgagtggcagatgctgtaactatgcaaaaggcctgtgtgtattcaggtaagagaatgttggtatttagaatctctggagccctagttactccctgtagatagtaaaatcctgatgcgaagtcttgataatactagtctttctaaggaaccagccatttttaatctcaggacatcttaaggaaaattatgcatctatgagtcatggaagtgctaaggatagctaaaatctgaaattacttaggggttagatgaagaatcgatttgggcttgattatatgtcttaattgccttccatatttagttggcatataattagaaccccctcattactttctcaagaaactcgaaaatcaaagagtttacaaatagtcaaataattgactttagcaactctaaagcaaagagtatacaaatatttcccttgtttagatattttatctatgtatctttttgtgattgcaggtatatatctccttcaggaactaagtaaacaagtaaacaacaaataggaaaaggttaataagaattcatcagtttcagagtctcaaggccttgactaaaggccttttcacactttagactcttagaagtggactattacatgagtcaataggcaaaccagcctgtcttgcaggggtctgacgaagagaagctccttttctctaatatttgctgctgattcttagttgagaaaccataattccaaattgccagtgtctatgagaggagctacagtgagtgacagtaactgctagttgtacattgcacttttggtatcacctgtcagttatgtgtgtcttcatctttatgtatggatgaaaatagaatatgcacatttgaaaagtaactagattctagaattttaagttttcatgtagatactggacttactctgtagaaaatcttctggggcctatcagcagaaatttatgccttatagcattatttagctgttcaggggaggtttatgttttcatgatttctaatatagcttgggaaaattatctagaactttctcaaacaagtgtcattgtattatttcaacacaattttgtgagttcagcaaaaatgagctaaatgtctattctcatatttcccttttaggtaaaacagttaatccactgatactgcattgttgttttctgtgacatattgggactctttgagccctgactgtcaacaggattcatgtggttcaatgatgttgtgaggaacatgacaatccattgccctcagtgagtttatattttactagaggaaataaacatcaaatgtttacttagagttaattatgtaattataatcatcatatgttcatggctatagcctacagacactttttcccaaatattctctaaaagagaagatattaattcccaagtaacttaggtcaatgggtggtgtattagttcattttcacgctgctgataaagacatacatgagactgggaagaaaaataggtttgatagattcacagttacatgtagctaaaggcctcataatcatggtggaaggtgaaaggcacttcttatgtgccttggcaagagagaatgagaatcaagcgaaaacggaaacctcaaatctcctgaaaaccatcagatctcgtgagacttattcactaccatgagaacaggatgggggaaactgccttcatgattcagttacctctcactgggtccctcccacaacatgtgggaattacaggagctacaatgcaagatgagatttgggtgggggcgcagccaaaccatatcatgtgggaaatgtctttgcaccttcgagtttttttttctttcaaccacgtcatcatccttattattaccttccactggacctgaaatcattttgttctactcatgatgaacttgggtaccagcataatttagagttgctctctccactttcaaggctcatcgtcttcctgacgacatcagtatatgtgtggaaagcgcctggatagttttttcacctcaccacttccaaaggtcacacctctgtttactactctggttacatggatgttgtaatatctcacaactgttctaactttatgcatatgtatcatacttcccaagtataaacctatcttcttctactatactcattttgcttagatcatccagtaacttcatggagagctccaatccatcaaaccatctgtctttagctagttcatcaacttgcttatcatcaaatgaaatcaaaatttgatttcattgtgataacttttgttatacaattgctgtttccataaactctttactgacttttattctatccactttttctgggcttaaattaaaaaaaaaatactgtttttttttttttttaaatcacaccacatgatagattttgatcactagaaattcagggttatcaatttcaattgggtccaaatataactggaaattctactactatatttttctgttcagttatctttgttcttctactctgtatttcaactcctttcaattttctccagacttcaaccactccttcttttcactagcctattacttatagctgagaaaattgtagtcatataatggaaacttctttggctaccagtcctagaaattacatttttatgcatcttctcatttcctcttactataaaaaaaggcagagagagcctgtcttacagcctgtgatttggattttatcctgtttcacactaacagttatcacttctttcatgtgtatacacaaatactcgctaccaaattgaattatcctcaatatctaaacaagtttaagtgtttcttaccttaaaagtaataagaaaaattttttgaaagttgaacctttccttgatcccatatctttttctatccttagtcaaatttttctttatccattcagacaaacttcctataaagcattcttaaccttggtgtctctgtgctttcactgtgttcttcattgtccaatatagtttccacttccattcttcatacagaccgctctttctttgggcacttctgatctcaatggcacaaataaggggcatttccaataaccattttatgtagtatttggccagtattgggttcctgacatctcttctcctttagatactcttttattaataagcttttgtgatgccatgtacttccattttccttttgtagttctatatacttaaatatatttttttcatttccctctgtcctcattgtagcctcatcttcctcaatcttatcagagttgaaagtatagggcaaagagagtgaaagattgaggacacatcttgtggaactacaatgtttaaggttcacatggtagaattcaattttatgtgatgatgttttatatatatgcacatatatgtaatgtgtatatacacacagatgtatatagtcttgttatcatttgttgaatgtctactttgtgatagacagtatttgagctttaaggacacaaagttaactacagttcctaaattggaggtcacaccttgtcataacagataaagatacatgtgctttactggtactcatagggttggatctgcagtgtcattctatctttgtgtgtgttacagatgcctattttattcgttactgaaatttgggcataaatatttagaaataggttttgatttgggcacatttgttctttgaaggcagatgtgtgatttattctgaacgttagcaaaatttaatgtttaaatattaaaataaaaaacatgaatttaaggaggtttataggaataaaatactagtttattcatgtttttccaaactgggattggggggttaggtttttagtggagggagaagggaatggaagaaatataattttagtacatgtgtcttttatggctattttctgctcataaaagtggtgccacttaacatagcatgcttactgtgtggcaggagatgtgctaaatgttttatgtgcattatctcatttaatcttccctataaactttcctttatagaagaagaaattgaagttttcattttacataagttaaagttacagttaaagggtacgaactaggccaggtgtggtggctcatgcctgtaatcccagcagtttgggaggctgaggcaggcagatcacttgaggctaggagttcgagaccagcctagccaacatgttaaaaccccgtctctacaaaaatacaaaaattagccaggcgtggtggcatgtgcctataattccaactactggggaggctgaagcacgagaattgtttgaacctgggaggcagaggttagggtgagcccagatcatgccactgcactccagcctgtgtgacagaccaagaatctgtctcattaaaaaaaagaaaaagaatatgagttaaatatatatctgactttggagcctgggctcttaacactatgatatattgaaagaatattaaggggaaatttttttcagatttttctagtatctgtaatatcttgtattacatattgcatatattaattaatcatttcacatataccattcagtcttcacaagaaacccgtgatgtacggaaaggcagtattgtcaagatgagactacagagacccgagttaaatattaataacttgcttgggttacacgtgatagtagatcccaggcttccaaacacccagttcagctttccattataggagacacttcctgtggattcattcagtttgctagaggaaaaagttgtccttgttctctagggtttcccatctcccccaagtttaattcaactttatttcacttatttagttaataatccaggactgttgctggagtagcaaaaatttgattagaatcatcaccttcagtgtttcaggtaatggagtggagtaaaaatggcttagaaagcagagcctgttcattctgctcccaggctggcctcctggaaggtttaaagttgacatctggtatggctttcattgctctcttcttctgggaagcctggttgactgcttgacatcaagcattagatctgacctgagcattagcccaagcacgctttgcgtaattaagctattgagatttgttttccctgacaggacagaagagccctacaaggtgagggctctgttgaagtgataaagctgattagatctttagcagtaaaggaatctgatcttagaaatttcttctagctctcgttaatgaggcaaagacaacatttagcagggaaaatgaggtcactaaaaagaggaactttttttttttttaaataaagaaccaattattttgcctccttttaaatcaaggcctcaatttattgtcctgagtaaagctcaatttaaatgaacacatatgaaactttttctcaggggtgtagtaatcttgtttaaagtacaagaagttaaacaactcaagaaagtgaagctaagatagacctagaaattaaaataatttaatgaatactgacaacaaaactgaaataaccaacaatgatgtgtatttattcattagaatgtcattgttttcaaaaaaatgatttttaaaaactttttttctgtaacttctctttccttaaaccacaaacaagcaaataaaacttattttcctaggatacatttatacagacttcaggtattacactgttgacaatcacaccttttagtttagatagcacctttctatatgctgctatttaatccttagaaaactttttttgaaagctgtattatattcatattatggggttaagacttagctctaaaagtttcaaatctcaaatttatgtgaatcctcaagaatttgtaaacaagagggcttggagtataatacagggtttttttcacccctgagaaagtggtctgtaccagagttgtctcaagttatacattatttaaagtttttaatactattttctatttcttgctaagcccttgttccagtatttacaaaatgacatgggaattatgttcccaccaaatacatttatgtgaaatgtaaatcatatgcacacacatattgcacaccctcctgtgttcatagatggccacccttccatcatgaagcattctgcttaccacaaagaccccatcctccatctcactttcagcttattccagtaaaatcaattgtcacaaagggtaaacttggagtagaaaagaagtaatgcaggtagtttatgattgggacagatggaagggagatgagccatccattccagcggcttaccttatctcattgttattgactttgaggtggttgtagtgtgagaatggaaagggtttaatggaaccatgctgccatcttgtcaatataatgtctagtcagtgtgctagttaaaatgaaattcattttttaaatttaaaatttacttaacattttagacttttaaaggaaatttaaactctaaagtctacttaaatgaaatactctgtgtcttctttttcttgagaagcaatgtagtaaagttttcaaaagcaacctagaggcaggatgactcaggccattcccggcttcaccacttgttagcttttgtgccttggttcaattacttttctttaaaatgaacatgaaaataatacctacctcgtgtgattgtaatgaggattaaatcaatttatgtgtgtgtatgtgtgtgactgtagcttgggacagtctactttatatagtaagtgcttgacaaatgtaacttattatcagcccagtcaatcaaacttctcctcctccaccagagtaaaaatgtcctggcagagtttaccaaatacctaagagctaaccccaagtgatgcttattagtttcagtttctcttgacctctttcttatgttagatattatttgcctttacctaggtctttttggaaaactcagcctcccaaattttcaagttgttgttctatttctgcagaactgcaccaagctttcacagttttcacctcctcctgctagaggttttcacctcctcctactagaggttttcagtctgtactaagctagaaccatagcctgatctcagaattggcagatactcccatgggaaagaataaaatggctggagattattagataacatcagagacgctctcaccttctaaaatgtgtgtgcatctagatgccactgtttacacacgtatctgaaatctttaaattattgttattgtaatatgcctggcctttcctaatccttttattaggagtgttgacctgcttgaaacctcctggtaccaccaccctttctttcttaaccattcgatgttggctttatatccgctggtggccttttcagtcttgactttcatttccagtagttttcttctcttatttatcttcttatgccatcttactcaccaatcactttaactttcaaattagtcgcttattcccttccatggagttatctgatatccttcgtcagataacttcgaaatttatacctttattttaccctgataatcttctcttccaaatctatctatctagttattacttaagcattttccactgtgtgttatcataggcaaatcaaatttgaaatgttcaaaacatacttcattattttctccctcaatttgtttccttttctgtatcactagtcctgagaaggaatcctgacagcatcattcacctagtagtctaagccagaaatcattgagttgtcctatatttcacaactgagtcagtaagttctaccttctctgcttccttagtattatttttatctttcctttttcttctcatctcaccattcccactacttctagcatattgacttattttttctctccatatcatctttcactttatagccaaatatgtttctattagaccaatttgattatattctattcttactttaaacatcaactttcattacattttaaaaaatgctttgcaaatactccaaaataatgtatgtatccccatgaataaaggaatcaaatacaacattgaagagctgaatgctaaatctgttttctcttgaaagtcacagcacacattattattgttatttttttttagagtcagggtcttgctctgtcgctcargctggagtgcggtggtgtcatcctacctcactgcagccttgaactcctgggttcaagcaattctcccaccttagtctcttagtctgtgaagtagctgatactataggcatgtgtcaccacacccagctaatctttttcttttcttttcttttctttttttttttttttttttttttttagcgacaggctctcactgtgttccctaggctggtcttgaacttctgggctcaagtactcctcctgcctcagcctcccaaagtgttaggattataggtgtgagttaccgcacccagccacagcacacattaaaagaaaggccatatcaagctttgctattgactataactacaaaactgtaaaatgagcttatatttaaatctagaaactttttttttcttaacattcttggatataaaactattgagtgctgtactcctgacctcaccctcatggtatttaaggccttccatgcctatgtytctaatctcatctcttcccttttgagcctttgtagccatagagattatatttatttagttttccaaacatgccatcccaatctttttcattgtatttgttcctttggcctggaacatcaataatctrttggttgacactcatccttgaaaattcagctgtttaaaactcagattatcttactaatgtgttcagtggttcacatactgcttggcacatagtaggtgctccatgtatgttaagtaaacaacaaaaatggaaaaaatcaatatgcgaaagtttacctttaaagagattttctatgtctgcctatatattgcctattcaggatatataacaatacttggtaataactgcttaaaaaatttaagctgcttaacctctgtaacgtaatttttcttcaaattttatattttgatttgtttacctgtacaagagttaggaaattacttacattataaggttaaatttttaattcttactgaacaaaaattagatttacttttgcatatatttagctattcccctccactgtagaaattccttgaaaactattgttgtaaatattttctgtttctttttgacaggtaatatttgaagctgaagtctcaggagggagaagtggttatattgccattgatgacatccaagtactgagttatccttgtggtaggttgtgattaagaattgtatttttctatgtcctttccacacttgccttatattggcagtgactattgattgtttatcacttggtttttgctgtctctcttgttattgttagtcctagccttctattgrgttttaaaaggaaactgatatctttctagagtttttgaatcaaatatttttcaaacttgtaactaattgtatacctattaggagattcttttaaattatttcattactgagaacaaaatrtacatgcaaaggcagctgttagtaggacttgttcatttttttgrcatcattaaattgtctagaaaaacagagaagaatagcaaatcagagttcaacagaaaggaaaatataaagaagcctcatgaagttatttgatctgagttgagggctggggtgaaatgaagagaaataattagttcaccttattccaaatttaggactactttttttctcctctgtcataataaatgtctggctaactcatgaggtcaggagtttgagaccagtctggccaaaatggtgaaaccctatctctacttacaaaaaaaaaaaaaaaaaaattagccaggcgtggtggtgcacacctgtaatcccagctactcaggaggctgaggcaggacaatcacttgaacctgggaggtggaggttgcactgagctgagattgcaccactgcactccagcctgggcaaccacagcaagactccgtctcaaaaaaaaaaaaaaaaagaaagcaaacaaaacaagaaactcggtttattaatacacagttttgttatgcccttagaggcacattgattggttttcagatggtgtacctaaatttgtgtttacatcacagtccatgaaaaacaattactgcatgcattcagtagagccaggcaaaaaacagctggcataaattcagactttgcctatatttcccaaaagcagcattttatagggcccgtgaattctgggttatctgttcagcaatcctccctgagaagcatctataacacattgtaagcagcaggctggggcctcttgtgagggccaagacctgtgctcctgctgagtggttgtcaaactctagtgtgcttcggaatcacctacagctgtggtaaatcacagattgcttggctcttcccctggttctgattgaataggtctggggtggggcctgacaatttgcatttctgattccagtgcagctgatgttgctggtctagagttcgtaaattgagaactgctgctttagttcatgttctaactcaagaattccttattttaaatctcttcctgagaggtaagtcactagagaaagatgtagccagtaagggtcagattatatataccacgtggtggttggtaaattctaagaaaagagagaacaaaatcatctcatttaaagttcaagctgccttactaagttctttcaatctgtagtttaagagagctgtgtttttatctactgtttatttttcacttcttgaatgataggtgttaaggaaaggctttcataagtgcacagaaaatggtggattgagcacaacagcagttttagggtgatacggccctccatgaacttttctttttactcatgagccttagcttttgctgtttatataaatttcctttcaatgggaaacatggatgaggcttcagttttaaaaggtagtttcagaggatacttgtcagtcataaatcttacttatattttgactgcagtcattatttttgttagtctaatatgggtatttattttggattactatactatggttataatggaatagaaaaaaagtttaccagtttagctggtgttctttttctgagaagcaaaaatattcccttgttctttgaagtgctgtagagggttataactattgatgttttttttaaaaaaagatctaactgcttaaaatgtagcctaataagttcaatggccgtgtcactgccagtagtttagaaatcattatatgttttcattatatctttatattaggytctgatttcatgtcaatttaatctcttttggttgctttgacttgtaagtttgtaactgttttattrtcatccatatacaacatgctatggcagcagttcagcagcaattgttgagtgctcactctgtagagaacaatactccagcaattatggaacagtaagtaatagagctattgagaaaaagagaactatgagagtcacagaggaaatggtgtcttccggcacaaaaaaagcccctcagttttcttctttctgatgttagtcttggccaaaggtaaaaacactaatgataatattcagctggagaaaagtaacatggcatattttcttcatgtgaaaacaaatacatttttttttcccttccttcacagataaatctcctcatttcctccgtctaggggatgtagaggtgaatgcagggcaaaacgctacatttcagtgcattgccacagggagagatgctgtgcataacaagttatggctccaggtaaggccaagttggcagctgagctaaagagtatactttatgttttaaaaacattgcaacaggactgtttgttgtctcatccttttgagtgtgtgtgtgtgtgcgtgtgcacacgcatgtagtgggacaggctgtctgcgtgagtttaattacagattcatgttagagatttcctttyctgaaataaaacacatgagcaaataattaataagtatttttgttaggatctggtgaaacacaattctctctgttatattcaaactgcaraaaattctgtagatccatttgaaatatgaataagaatgatattttttcttatytaataatatttttaaaactgaatttacaagagttaagtaggagctgtcatactctgataaattctttaaagtattttaagaaacccttgggaatatttcaggaagtatgaattggaagagagccaattaaatttttgagtttgagggttaatcacagatctgaggtgaagacatttgcctttcacatattamttccttaatacatttgtatttaattatgatttaacatacatgttggggaactgtaaatggtgcatataaacagatttaaaagaatctgagataaaactatagactaagaaatatgccttgccttcagagaatttatagaaagtctatctgtcagtgctagggtgctrggggctgggaggagctgagagcagctctaaagccaggaagctggacctaaaacagatggctattgagcgaagtatttgaagctagatratgtgtaagtaataatattctctgagcacctctattattattttttaggttctctgcatcagaatgaggaaagagatttaataagttgtgaattttaaattcatgagaatgccaatagagaccaaaaaaaaaaaaaaaaaaacaagatgagtttaatttcttcaacataggcatcatgattttttttttactacatcctttagataggtgaaagtagtgttggggataactattagtttgcaggtggttgtaataaaggttataataaatgaatattgaaataataccttgtataatgactgatatgctgggtgttatatttgtgttatttcatcaagttcttccagcattccaattggaggttacaacaggtgtacttcatattaatctaattattactacttttatagcttatttgattttcaagtgtcaggataccatattttgtgtccaaatatgaaaaggagatgagggtcccttttttctgtgattatggtaatttctcctacagagattgaaaaataggataatttttcctggaaagcatgttgtataatgtgcaacctgttttatcaaataaatgtcaagtcagttttcttatttctcttcctatgcctaaataatagttwaaaaatgattttagatatatgttctaatcgttttgctagtgattttttcatttagatgggaacattagctggcatttggctttagttgtgagctatatagtcttttcttggagatctagaggctctgtaggtctgcccttgrttttatgcctcaggatttaatgtgacattgaaataaaaagggttttgtatcctcagtcaccagctgccttgtggcaacaaagactttctggaccctgctggtctgagtgggtggtagtcccaatactgctcattttttttttttgtttgctttctattttgtagatagtccatttcatgatggttttaaaaaatgttcctcctgccatttttgtarcaaagatgagaggtaaaatattctatgaaacttctatgttgctttctcccctacctcacctcttttttttttcttttctttttttttttttttttggcgtttgctacagaatggtgaatttatgyatttctcttccactttgacrtggacattgcctcattcttcagtagtgtgcatattcaccttaatttattcaaaagctattttacctttttcaataacaccacatcaattaccttaacttattcacttacatcagtcttccccatctacaagaaatattgaaatctattaattactaagggtgttttcaaattaaaataaaaacttttattatgaaattatttaaaaatgaaccagataagattgatcattatctatatatcaatcaattagaaggtggcagtgacttaaaaaacttgctcaacttttgccaaaagtaaaaaaaaacataataaagcaggaagaattctggttccaaagtgaatctaccagctaactcatgcaaacagatgtcagattattttcatttcacgtagaataacagcctagagttcaagaagctcagttctgaattctaacttttactctaaccctcctaaaccttttaacccagttaattgcagtggccttagagatttcatttatgtgttctgggcctcaatttgcttatttataaaaggagattctgaatagacactaaaatcccttccagctgtaagatgctaaactaggtctttacgttatttttggtggcttgaaacatggccttgataacctttttgtgtggaagatgaaaaagtcttgtaattcgttttgcatggggaaaaatggtacctttaagtatcattgtgagaacaaatgctcaaaatatctgctgctagtactgagaatgaatgtacttgaagcactcaatgaaaggtcactgcagtctatccacagaggtaatggaataatacaacagttgttatacctgccatggtcaggtaaaataccaaatggcaatcaactttatatgtcctccaaataacttacattatgtagtattgagcttcaattggcaaaatgttgtctaaatatgggctaaagtaacaaagactagaaaaacagccaattttctatttcaaaggaaaaatgatatactataactctgtgaaaggtgtacagaacacaatgcttgatcatatttgatattttaaataatttgttatggaaaaactgaaaaatttctctcacttctgtattctttctaggttataattaatatatcagtcgtttttgttgtctaaaataatatacaaattgagtaaattgaaaaatgcagggaaaaacacaaacaatgaattgcctgagttaatctaggataatttcataatgcatatcatggtagttctgaaagtatctatagggaatgttctttcttgtaagaattggattatataattgtagagtatttgaagtagatctaccttcttgtacatgctaaatgaactaatgatacataaaacaacatcgaatgtttttataagcctgagtgtcagtagactaaaaatatggtgaaatcatgaggttttctggaaagtagtttttaaaaatatgttatgcggtacatttatgcactaaaagaaatttagggtcgggcgcagtggctcacgcctgtaatcccagcactttgggacgccgaggtgggtggatcatgaggtcaggagttggagaccagcctggccaatatagtgaaaccctgtctctactaaaaatacaaaaattagccgggcgtggtggtgcgcgcatctagtcccagctactcggcaggctgaggcagaagaattgcttgaacccgggaggcggaggttgcagtgagctgagatcatgccactgcactccagcctgggtgacagagcgagaatgtgtctcaaaaaaaaaaaaaaaaaaaaaaagaaatttagaataaagtctttagtcacccttagagaacttccagattatttttcaattgagagctcagtgaagtagcatgtattctggatataaacgcattttttggttaatgatttgtaaattttttccacatgaacagacattttttaaatcttctaagttttagaactaagccattttaattttgtagtagtgttctcctatccttgggggatacattccaaaaagcccagtggatgcctgaaaccacacatagtaccaaaccccacatatactgtttttttcctatatatacatacctatgatcaagtttaattaataaattagacacagtaagagattaacaataataaaatagagcaattataacaatatactgtaataaaagttatatgaatgtgagctcttgtagcatatctttgtactttactcaccctccttaggatgaagtgaaatgataaaataactcataatgagaataagtgaggtgaatgacataggcagtgtgatgtagcattaggctactattgtccttctgacaatatgtcagaaggaggttcatctgcttggggctatcctagatcattgagccatgacgattttgatggttgggatgtcagaaacacacaatgtcgatgactaacaagtgagggatggcacaagatttcatcacgctactcagagtggagtgcaatttaaaacctatgaatggtttatttctgaaatttttcatttaagattttcagactgtgattgacagaaggtaactgcaactgcccaaagtgcgaccttggataaggaaggatgtctgtattcctgaggaacgttcaatgatacggaatttgtgattcataacttgaagctatgataaagctctacttatgggaaataagatcaaaagtgaaattataacatataatttatactgaaatgaaataataaaaagcatttggttatattcttgagaagtgtcaaataattttcttacaggaaaaataaaaattagattgtacacttttataggttagaaatgttggttatttttaaattttgaattttttgaattatttattttcagtattattgaaaatatttaaaattcaaaacttttaaaaaatattcaaatatttcaatatttgcatgtttttaatattcttgaattatttttattttttaatatcaaattattatcaatacatactacttgtacatatttatggggtacatgtgatatttttggaacaagcatataatgtgtaatgatccaattagggtaattgatgtatccgtaaccttgagtatttattatttctttgtgttaaggacattccaattccactttttaagttattttgaaatatacaataaattgttaactatagtcaccctatggtgctactgaacactagattgtaactcttatgaacactggataaagtgattgcaggaaaaagtgaatatataagcaaaaaatgaacatatggtgtagcagttccattcctaagtatttgcccaagagaaattaagacatgtgcccacaaaaagacttgtacaagaatgcctataacagctttattcataataactgataattagaaaaaacctacatgtccatgaacaggataatagatagacaatttgtggctcattcaaacaatggaatactgcttagcaataaaagaatgaactgctgataatgcaacagcgtgaatggatctcagcaacattaggttttggaaagaggacagacacaaaaaggtcatatcctttataatttcatttacattaagtttcataagaaacaaaactaacctatggtgatagaaatcagaacacttgttgcctgtggggaataaggattaattggatgtgggcagggggaaattctctagggtaatgttaatgtcatatatattgactggggtcttgatctatgagtgtacagacatttgtcaaagattaagatctgtccaatttactaattatgtttacctgaataagacacaaatgaggaaaaaatgagtaagtgacacattttatcaaataacgaacttactggcagtgctaatcaagccatagatggtaatagcctacaggcattacttgcgtttttatccatcttgtccatttcaagtgatttgattacattcaaaggtaatttgtaatcattagcctaacttgaaataaacatgttctgagtttctgctttaagaacaccttataacttgaggatatgaaagggttgtaactggggttggactgaaagttatgcattagtattctattatgaaggtccagtataagtggacacctacagggtaaatcaaatagagcctattgctgcaacatctgtcagaccatatgctttggcttcaagttcggtgtagaaactaaaatactaatgactccatccatcattacagcgcttggcaggcctgcatcattgaattgggcagagaaattcaacagtggagttattgaaagtagggaattgtgtgggtagatttggtggcaccatttgttttggtgaattgaaatgaggctgtttaatgtgtgactggtaatcctatgcagattgtcatcaaaactgtggcaattgggccaatctgtcagtaatcgccgcaggtgctggcactgtgcctcctccgtgggcctgccaaaacaggagagtcagccaccgcttcgcccttggtgaggctcatcattgctagaatagtgtgatacagctagttgctcagccaaaggaaatgtcattccttatggagcaacacataatttaagcaatggcttgagagtactaattggagagtgaaatcagtaaaatgagatgcaaattgctctcaaaaacaaccagagcgaggctgaccccctactgtaccaaccgttctcagtgaaggggcagtgaaagcggttggtctaaaacttctgaccacatagtgcgttacctgtccaggcaaattccaaagccttgttcctgtactccatgcaaacatcaccacatggtagtgggaatctaaagcatgatttctaaacaattgagttaattgggaagcacaaaaattttagctgatgaaaacatagcactacaccatttcagaggcctagtagttacggctcacagtgctctttctgatgaccccatgctatagcatttttctatgcttatttatattgccatttggcaagcccagatgtttgcagcatatttaatttctgcaagagattttactatcctgacactatttattttaggaaaaaaaagataattttccacttattataatgaaggtaagcttcctgaagaaattactgcatgcttaggaactgcagtttacagtaggcaattctttggaaactattttgagaggaggtttttaaagtcaacttgattaaatacataatatgtgatcagctcacgctaggtaacatgcataaagaaaaaacaatgcaatgcaatataataaaagttgctctaatgtctggacgtggtcaaagttctgacattttctaggtaaaagactttaagaatggctgacacacttctgaaatattaaaataacaaacagtagcatataagtaccaaaacagtgagtaaacttgaacaatgatgtcagaattgctaaaggcacatggcacaaatatatcttgagatttgtagaagattaggtaagtgacttatttactaccttgtaatgtaaggaatatacaaatggatttaatttcctccttatagatcctaaagtataataatgacatgatttgaagcttatggtgagagctataagctgattataagggagaactttgtaattgtagggctgttgaaaactacaatgagctgctccaggaggtagtaaaattacaattagtccaagtatccaagcataatctgggtaagcatatgctagagatgtagaagacatttgagcctgaggttaactactttttaagatactttttgccctgacatgtgattctataactgtgtatgggaagtctgtatagagtctaaggactgtactgtttcagagataagcgtgagcaacgcggactggagtatttggtgaaatcattagagaagacttgattgaaaccttgaagtgtacatagtacttgaataagcaaaagtgggcatggttactactgcagattcagaaggcagaaagcacgtcgtgtgtatgtgtggggacgtgggataggaaccgaaggagaaggatcttactgaagtggaaggttcaccatgaggagtggaggtaaatagaatttatggaaaagttggtactagaccacggtggagactgctggaagaggaagaggcttctgttctcagtacagtcatcagggaatgagggcctgattccggacagcgccattggcattggaagatccatgagtagcaaaggagaggacaaattaagaaacaaaacgattttgggcctggtttgcaccattttatagaatttgagaagatgtgagagtgaagtaatatagacagctttgtacattttctcagagtttatttttaaaagacagtcaatgagtttgttttttcaatttctagttttggagcgcatttgtctattagaaccattgttttactttttacctctttctaccttcataatttcatgtaagtgttcctcagtaggagtgaaaaatgaggagacatttcaattccttttgactctttctagctttaataaaagtttaccaagacaatttgaagcttgtcgccaacttaaacctctgagtggcccaggtgtcactgaggagaattaatctatgggaaaactgttggtgccttcaaccttggctgcttctgtaacttctggctcacaagacaggagtgtgaggagtgcaaaccatgtcccttgtgctttcctagtttcttgtcacctgctctaaactttagctgatagatgaatagtagcttgctatttaattctaattttctctgcttttgtctaagcagtagtgattttgccatgtatacactggtttacagttaattctgatccacttaagagaccgtgttctctttcgtagctaagagccaacactcggcagtcctgcttttcattgggccattggtatattctaattcacagcattatcttctttctgcatagctttatataaagaattctgcttataggtcttgagataaagtcaccgatctcatatcatggattataaggtttttcttctgctttctggcattttggatatgtaatgatgagcatcagaaagtttaatcatatttactttttagaattgttaaatactcctgaagtcattttggttgattttatgtggcttcctaccrtaaagagatcaatgccttgcagatataaagctttcttttccttctttaataatttataaactctgaatttaatgtttacagattacataactgatcataaatgaataatgcgtataatattctttaccttccttatctattcttggaacaggactatacaagcctggcagtcatggaagttcaaggattgctttttatcgatatctagaaataatttacttctctttctgtgcaagaacaatatgctctcctgtttgcagagctgccccttcagtgtgtttctaggtgtgtcacgtcaagcactttgtaactttcccattgagctcctgggatcagtattacaacatggatcactggcaggcctggtttcttctttatgaaaagtagtctgctagaaagatctaaaatttacaaaattattttattgtaaaataaaacgtaggtatagaataccacacaaaaataaaaactattgtgactcaatatcgggtaaacatcacacaggacaagaaagagagcttgccagccatcccagaggtgccgtccatgtgctctgtgccaggcataacagagctgtctccctgcctctacaaataaccactctcatgaattttaacccttgtagtttttttgcagttatatatgcatccctagacaccatagtcttaccagtttttaaaattagacatctttttaagtcacttttaatctgtaggtttgtcctttattcctttcctcgcaatttatctgttgagcctaggatgtttgacttctagcttcccctgtccacattttgctgattgcatactaatgccctcttcagttccacatgtccctctttcctctccatttcctgcaacttggcagccagatccagggtcaagtttgatcctttggcaacaccataggtggtgtttggtataataacaggaggaacaaaatgtgtcatctttctttttgtgatcttgtcagtctctgatgattaatgcctatatttattcctgggggtagaaaactgtgatattctatcatttttttgtgtgtcttatttcttttgtatttgtttagttgatgaaaagatacatactccccctaatctactatttggttacccaataacacaattcattaaggaaagggaaaatacatgctccaatctttgctatatttactagtttaaaatgagttggttccctatcatcctgcaaagatgacttactctttttttcttttaatatcattatacactcatggatttaaatatatttaatggagtttaatttgttgcaattattatttctattaaatcttaaatcgtcccatatttgcttagtgggcacctctccaaatttgctcctgattctttttgatatgattatagtaggctttgagagcttccttgctacctggtactgtgagatgtttcactttctcctctggatgtgagatcagtcatttttcaatgatgtcctgtttagttttagtaagaaatcatatttcaagataacgatgcaggttctgagagatactcatttctagatcgtttcagtgaatagagctaaaaaatacatacacatatatttaatgataaaatacctaatgagttcatagggatatttcaagttgaagcctaaaggtttttactcaatgtttatcttattacaacttttcagttacattttatttccacaccgatattcttggttgtcagtgacataaggaaggtggatttagaatatatcataattatacattggttttatctcattttattttgaaacttgtactaaagctccattgtcagcatatagctattgcatggataatatactttcttctacttagctcttatttagtctcacttctaaatgtaactatgtttttaatattcaatattagcccacctgtcatatctagtaattttgtacgtcagaaacaccttttttgcatttcaaattccttaggaactgctcatgggaatagtattccctgagttcttagatgttgataatagttttttgtgcccttgattcttaagtcaatttcacagtatatgaaatctttcattcacattttctttaattgagtaacttaaataatgttacttcattttctttcacagacagaataggtacagtcagtcactataaagccttggtgtctgtctgtacctattttttctagatatgcaaataattgtttctaattaatcttaccagaatatgtatcacagtaggtcactctgagatactgtcatcaggtatgtggtattttctttcattatgtagtttataaactttttttttattttagaaaattttttgttgttgttgttgtttttgctttttttttttttgagatggagtctcactctgtcaccccagctggagtgtagtggcgcgatctccgctcactgcaagctccgcctcccgggttcacgccattctcctgcctcagcctcccgagtagctggaactacaggcgcccaccaccatgcccagctaaatttttttttttttttttttgtatttttagtagagatggggtttcaccatgttcaccaggatggtctcgatctcctgtcctcgtgatcaacctgcctcggcctcccaaagtgttgggattacaggcgtgagccaccgcacccagaagttttttaaaaaactatgatttgtagtactttatctgtacccttgatcctgtagagacttctgttttctctgtttgatctttgcctgtcatcattgatcactttcaaatatttttattctccttattctaaacattaaaaattacccctttttcactcattattcaggaatcatctgttgactttactgtagttactcataatttcttttttttccctctctatttctttctttctttttttttttaattagactttaagttctggggtacatgtgcaaaacatacaggtttgttacataggtatacacgtgccatggtggtttgctgcactcatcaacccatcacctacattaggtatttctcctaatgttctctctcccctagccccctatcccctgacaggccccagtgtgtgatgttcccctccctatgtccatgtgttctcattgtttgtctcccacttatgagtgagaactcataatttctagtaattaataatgatatttctttaatttctaattttycttaattgtcatttcatttctgagttttgttgtttaagtttatattgtttcatctcatgaatcatttccktaatatgttttagcttatcttgaaatattatgttgcggttttgatctgttttatggacatatttttctgactgactttcattgacactaagaattatactctgttccttattttcttttaatcttacaaaatctatatgtggggtttgatcttgatacttttaagttattcatttttatgtgaaataagttttcctgaagttttaaaatgaggtggggttcaggaaactttacctgattttacagatttccctcttctgttgctttgagttatgttttaaaatacggcagcttgccttttgggatttctgggatttccccacttttgtctagtccttctatttccatactctcttattagtcagtctgtttttatgtggcaggttcagaaagattaaaaaactacgctactgccatcagcttcccagaatccctcagatctggtggtttcattgcatttgtcttctgacttcacccaccttccctctcactctataaattgcatggttttatagttgtggactcatatgcatcacgtttccactttctacagtgccgtttgaagcaaccagccaatcccattatgtttctttgtttgtttctttgttcttgtttctttgtttgactaaaatgttctaaggtagcaaatacatggttaccaaaactttgccttccatagatacttgattaggagtatatctaagagtgatattttacatgcctctactgctgcatcatgtagtggactagtagtgtcttctttgccactggcaagagaggttataagtacctttaaatctaatcagactgaaaaataaatttcagtaaacccagaatcagaaccaaatcagaaagttcatccataaaaatctgattctctagaagcacttctggtcctaaaatcatctctgtccctctggcctcaagaaagtaaagcagaaccagtaggagatagatatgattttattgaaatatatatatatatatatatatatatatatatatatgtctatataattataagattacatatagtaggattttatttacaaaattgaagagatttactgcaaggaattggtttatgtgcttgtgcagattggctaggcaagtctgaagtctgtagggcaagcccttggggagggcaggctaaaacatgcatgcacagactgaagctgttgttcactggtagaatttcttctacttcggagaagcctcacccctggtcttaaagcctttcaactgattcaatccagtccactcagactatctaggataatcttatttactagattatggattttaagtccattcacaaaatgccttcacaaggtcacctagtttagtatttaatgaaataactggagattgtagcataggcaagtacacacatcaaaagactgacacagttatcaaacagattatttgcttagatattgtttggattatcatcttcataatattgtgattatcagaatttgctatgaatacctttgcacagcaatctcacagagtattctcatcatctctgttgaataagttggtacaaatacatatacccaatgttagatgaaaaggtagagatttgagaagtaatgagaaattgttcagctcacaaatggttacttcagggctagaagctgggtatcatccccagcagacatggttctgtcacttacacctgctctgtccgtgtggctcctcttattggtcaccttttctctccattgcaaagayactcatgcttcctagggtgaaactctttttcttgttgaatagctgactttatattttgttacacttgattaatctgattctagtatttgctatctccagcacatctttaccctgctttatttcagaattataatattcaccacctctttctctctctgtcaaatggtattcatttaccttcttccatccttccattgccagatagtcaatagtttgaatttattgtcatttcagcatattttttttttctaggagaacactatttacttactctaatgaaataagtataataatttctatggccataaataagaaacagtgcttctctcaaaataataacatagtattttttaattttagaaatttctaaatttaagttttctgtgaaatactttcatgtttttaaaattgtctttaaaatgatttcatgtttttggaattatagaattattttgttcttcaataatggtgattgtgatgatgatagtatctttatcatcctgtgagactgaaaaaaattcatacaaatcttataaagcagacaagctctagtaaggaactctcagttccttgggattaatttggctggaatgttgtaaatttcacgtcagcctcacttggtcgtagttgtgcaaattcactttggaattcattttgacaactcatatgcagtcttcttgatgctgttcaacagggacctaaatatcaaacataagaaaataggctctttctgagtcctacaattttaagaagatgagagaatcatatatcattatgtcaatgacatatgatagtcaatgatatatgaaagtcaatgaagaaataaatatataaataaatgtaatttgattattttcaagtcaatagccttgaaataatctcgacatgtattgtcagtgcagctctttttagtctgaaatgaaactggattgattttattcctcaaactttgaaaagagactctgaagtaaagtgtaacatattttaattataccatatttcttttaggatactttcaagctgaaagtaatagaaaaccaaatgtattatttcatttaacaaaaagtccaaagagaattgggctctagtaattgttggtgtcatttcagagatttgataagtaacttcctctgtctctctgcctgatatgccatcctgagtgcatcagcatttcccttagactggactgccttatggtgatgaatcagctcttccaggttttggcatgacagtaagaaaaagcaaagggaacccattttcttatgtctccttagaagtgaggaaacctttttagaaataacttgaccaattcctatcatatctccttggccagaatatggaccgataccccattttaaaaacatgtcactgttaatggaaagaagactcaggttaacctagtgttaatggcccagtgtgtctccacgtgtaatatcttgatgcagattttgatacaatatatctaaagtgatctcttgactcttcatttgtaacaatctgccagttgatgctgatgctactggtctgtagaccacatggcaaggtgtttggttaatagcctggctggtgaaaatagatgttggagaatcaacctttattaccactatattccaccaggaatgaaacttgtcaaatgaatactgcatgcactgtgcatgatgaagctgacttagtatagtagaggagaggagtgataacattgaggattatagtgacttgcccagggttacttggtaagtgacaagttttatccagcaacttgtattggagacaaaataaatacagaagcctgagatggattggagggcgggatggaaagcaggtaaaaaaagtagtgctaggttataatcccttggatcatatatttgtgtgattcatttttcagtacttctcagaggtgggtatacatttgcaatggagaaatcatatataaaaactcaaagcagaataaagagcctataaaaggaaaagttatttttgacttctagaatttaaatgttttcaattgttacctttagctctaatgaatcgttggaagccaagtaaagaaagcaatgtctaatatagattatattagcccattggaacgatgccttgattaaacctcaatactaaataatcaatttgttggataggaactgtaaccaaaatgaacataacagctttggtttagtttagaggaaagtctgctgtattttaggtcatcaaacctagttttgaattttagtcctgctaacaggctatgtgcatcacatttctaatctttctgaactttaattggatatgactgtatcagaaaagttcataagagagagaagccacagaaccagtaacagctcacataatataaggtacatggaggtgcttattaaatgattattgaagataaacctgaatattatgactgttaattttgttattttatttcaagaaataaatatcacataagtcttttgtactcattaattatataatatacatcctatataagcatatgtatttatagttatattagtatattaatacacacacatataagcatcatgtaatatatcagcttggtgatatcttgcctggatgagtttaagtatacccctcagcctctctgagttgtggtataattatttctgaaatagcttggtgtcagtgatctcttggtgtccttgaaattcaatatttttgtaacctccctttattattaatttggattgatgattaatgtgtattttattataacttaataaaagcctaaggaggatttatgtgactcttgtctctaaaatgttcagtgaatttaattcattttaacaaagtacttgagccacccgctaaataaagataatatatattaaatattatggaggaaaaaatatatataaatgagacatgaaaccctaccttcagaatgatttcagtatacaaacagatgaaaagacattgataaatatatcatagtagaaaagatttaagatagaaaagtcagttaataagtttttataatcttttatagagtttttgaggcagtatccatgaccctgtcagcaggagtagaaagggaagagtatatatgagctgatggaatgcgaacttgaggcagaggggaaggagctagataccatagatcaggtcacgtggaaatcaagtaggaatgtctgcaagtttttaatctccatttttagataacacagacatttttcataagaacaaatgaccgatttctgcaaatgtcagtagttttagaatagttgataagatagtgcaaattcaatattggcaatgcataaacaatagaaagttgaaagaatctggagccctttcaggctagagaatgtctctttgaaatgactcctgtaaagataagggtcacaaaatgaggtctcactgccaatgtagaggattgaaggagtgagagactgaattgcacgggctgttatgattcgagaggaaactgtcacagcacaggaacttggatgttgtaaggtggtaagggaggctgttggggatcactgaggccaaagtgagtttgaggatcaatgggaatattcacaggactgggttagggaggataatttggtctgtgaatattcccagtgatgggaatgatatgtgggcaccctgcgaattccaaaagttgagaggtgattgagtgggaaagtggaagagttgtcttcaagttaggaaccaggaaaatggtagctgtccctgaaagagggtgtaaggtaccataaaatgtaccctcctttgagatagtagtgttgtgagaggaatgccaataaaggtgaaaagatggaataatgattattgagaaggaaacattaaggatactcagaatctcttcacaagagaagggttttgaaaggcatagtgtgagaagacttgagtgggtgtggacatgtgcaagagaatttggaagtcagtacaggcagtgggaattggctagtcgtgcagaagaactgagaaatacatatggcagggagcaaggagagagtttgagaacacacctggagagataagctagaggaagcccagataaggttgtataacaaaagtaagcagcgtggtgggccttccaattaggaagattgtatggaaatgatgtgctaattgaaaaaaacgcagtctgaggtttgcatgtataatttttttttttggtttatgtggtttgtagggaaagagttttggctgattttatggatttatatttttggatataagctgctttttcagttccttattatccaagggaatgagtgggggatcttgctgcaaaaatcctgaaataggttggtaagcagagaaaaattaacaaaagtaatgaataaaaaatagcaaaatcctgatttggatttgatgtccttaggtatttttgtatgcatatgcagaaacatatatgtatttactacataatatgcatatgcatgatttaagatatggagaaaggtatttaaagatacagtgtatttgggatttagaaaattattattattattattwttttttttttttttgagacagaatcttgctctatcacccaggctggagtgcagtggcgtgatctcggctcactgcaaactccacctcctgggttcacaccattctcctgcctcagcctcccaagtagctgggattataggcacccgccaccgcgcctggctaattttttgtatttttagtacagacggggtttcaccatgttagccaggatggtcttgatctcctgacctcgtgatccagccgcctcggcctcacaaagtgctgggattacaggcgtgagccaccgcgcctggccaggatttagaaaattattaaagcaatagagtatcctctttattatttactctaaaaatataatttcaaatgtacaaaaaatcatagaaaacaataaaatagccattaatgtaccaccaccctaatttaatagaagttaacagtttatatttttgtctcatgtcatcttatccttaaggaatttttaaattaacatttaaacatgcatacatgtagtactaatcagtggaatgctggaaccaatgagtgccagaaatttgttaagttttcaggaactttgatatcacactgataaactgaagttgctatagtggagtatttacaccccagaaatggacaaatactacaaaatggcattttatgtttcttgttggagaactaacagttccaaattttaccaatacattgctggtttttccttgcctagtttaactgtcccatcgtatcttactgaatgaataaaattcagtttatttatttgctactcagaaatatttggatattttccatatttcacaatcacagataatttagagttcaacatcttgtacgtatctccttgatcccacatacactggtggttcaaatgtggaaacctagaagtagaattgccgggtcctgaggtttatgcatcctcaactttactagatagtaacaaatcattttctaaagtcactctagcagtttacacttccaacaggaatgttatcatttttgtttcccatatatagccctatgaagtgatatttcaagtaatatgaaagataccaggggtagttagaatttcaccaacaagaaatgaggttgtggatcatgaccaattctttctcagcgttgtgggttttctttgtcctttttgctgtctttgacatatagaagttttaaaatttagattgacaatctcatttcatggttgttagacatacactttctcttttttataccctattcacttttgattgagttatctttttttctaattgcatatagaagatctttacgtattctggctatttattccttgatgggtatttccttgacaaatgacttatcactatttgtgacttgttttttcccctttatatatgatgtctttgaacatatagaggttataaattttttatagttgaatttttttcagtcatttcctattagtttatacttattactcttgtctgggatatgctgatatcataaatatggcttccagtatttcattttgaaatttgacaggtatgctttcaaagtttaggctcttttgactaattctctaaaatgtataaattggctgtcattaatgccaaagagagagttgtttgcaaagagtacagattttggtttgactctaaattattcatcattagtttattatcattctgtggccagcacatgctacacatttggaatacagagatgcacaggcaatgctcttactcttctggtggggaaaaacatactacagcacaggcaatacagcataagggctaaaagaagcttgtatatattactctgagagcatgggggcaatgaatcatttgccttggacccattaactctcctgttaattcatttactctggtgtagtagcaatttatggagaactgagaattactaccatagtgtcagccctacaccttttagagcaggggtccccaacccccaggctgcaaactggtactggtctgtggcctgtcaggaacagggccacacagcaggaggtgagcagtgggtgagcaagcattgccacctgagctctgcctcctatcagatcagctgtggcattagattctcataggagcacgaactctactgtgaactgtgaatgcaagggatctaggctgtgagtgcctgtgagaatctaatgcctgatgatttgaggtggaacagtttcatcctgaaatcatcccctcattgttccatagaaaaattgtcttccaggaaactggtcttttgtgccgaaaaggttgaggaccactgctttcgaggataccagtatttacttacattcttttcctgattgacaatggaaaaaaattgtggmtcttttgcaacaagaataatttatcacagatattgcttgctaagatgctttatagatttatgaaaatagtaagaacctgtttttaaagattggtttctgtttgcagagacgaaatggagaagatataccagtagcccagactaagaacatcaatcatagaaggtttgccgcttccttcagattgcaagaagtgacaaaaactgaccaggatttgtatcgctgtgtaactcagtcagaacgaggttcyggtgtgtccaattttgctcaacttattgtgagaggtaaggtgaaattgttttcacttcacgaaattgcatggctttattagaacaaaagcaactctgtagatattttgattgatttttaaaccatagtgtttctgatgtcaagtcactataaaaaatatatcatcatacaatttctcagaatgtgtgaaggtgaaattaagactgtagtttgtaaagtttttgaagtttctagtaagtgtttgccattgaaagaaatctattttataatgctctaagtggactaaatatatcaaataccttattccacattgtcatcacctcgtttgtattttaactttagatctagttcttcccgtttaaaacagttctgcggatactacttttctttgaagcattgtggcaatgaagtcaaggtccaagtttctatttccatatagtcctacaaattttactggtatcaaaacccaatagtgaattttcactgatgcatgtctcttatagaatcttagaaagttagaactaccaaacagtcctcactaatattcttggatactaaagttactagaagaatgtcagggattatgacatatcagtacatatttgtagtgaatactggaaaagtacaagtgcaaaacacatattacattcatttaagatgtatagagtccctcttatattgtaagcactgttctaggttgtagatattggagatacgattgtaaatgtaatacaatgtccctacccacatggagcatcatattgaattatgttaggcagactatatagacaggtgttaaaaatgtagtatcaagtcatggtatgggctatgaaggaaaaatagacacaaaacgatggaaattgatattttagttaaggtgttctggaaccagtcttaaggttaccactctgagaaggtaacaactgagctgaaagcttaaaaataaaaatagagacttcagccatatgaaaatctagaggtaaagcagctccgttgagtaggatatcaagcatcaatcaatattgacacaaatgaaaataatcgtaacctgtttaagtctcttcgaggagaagtgtgagagactttagcaaaaatatctaaactggggctgagactgtaaaactatcatggaaggcatttgcaagtgagttttctttgagtaaggatctgaaggttgagagaaagttgcccaagtaggggtatggatgtagagtcaggggcaagagaaagaaacaccagcaagcagagaacacagcacatgccgaggcctacgggctggaaggagaatatgagatatgtccatattttataatgcttggcatcaaatatcttttacatatattattcaatattgtcttgtttttaatactttaacctttgatatttttaacgaaaagaaatttgaaattcacactttatgataatttacccagagcaaattaaatctaatgattgacagccagaatagaacccattgtttcttgattcttaatggtgagctcattcttttccactacagttttccctcgcattaccattattggatgatgcgatcaacctcttgtaaactttagtcttggaagactctatcactcattttttaaaaaaactttatagattaaatacgactattttcagtgtaacttgtctgatgtctccgtattcagctcatatcacctgcacaagttcatgagatcccagtttcaattaagaaaatatgatagtatttgacttccgtatttaggcagagaaacaatttatcacatgttcacacatgcatctttgttaagtcccattccagcatctctctcacctgagcctaattttgaaagcctgaaggtgtccttgggtaatcttcagggtgattaatatgctatggctacaggaacgtgggcgtgctattgaattatcatgctcactggatcttctttaccatatatgcgttcacaatttgcaaccagtgaaggagatggtatcttaatagtgtacctagaatgcttttgaataacagtgatgtataatacatagttatatatgttctatatagttatctatacatttttttccagaaaagtcactcttgatgtatttctcaaaagattgtagaagacctgtttatgcttttatccaggtgctccctttatatgtatagtttcttctttcatgcgaacattttctgcctgtttattttaaaagagaatcattttgtcattactggatctcttttgtttatcttaattgataagtagattttattattttatcaaagcctggttttccttacctggagacaactacattacaatgctcttccagcagtattacttgttaaattaataattatttcaataaaatttataagaaagaggatccttaaatttcattgaaaattttgaccttttttttttttttttatttttctgagacagaatctcgctctgtcacccaggttggaatgcagtggcaggatctcggcttactgccccctctgcctcctgggttcaagtgattctcgtgcctcaacctcccaagtagctgagactacagatgtgtgccaccgcacccagctaatttttgtatttttaatagagagggggtttctccatgttggccagactggtcttgaactcctgaccttgtgatccatccgtctcagcctcccaaagtgctgggattacaggcatgagccaccactcccggccttatttttcctttttttmaagaaagtcctgccataagttttgtgatttttatgttggaaaggttgagttgaaagatgatggcattttgaatttgttatccagaatctgctatcattttagaaatatattttgatagttttgacaattttatttttctttcaacacactttaggttgttctatatttaatacgtacaggtgatactttgcttgctgttttatttgaaaaccaatacagaggaataagttttcttgtttgtagagataaccaccaaataaatattactaaccaaaaacatactctcgggggtcagctgtcttggtgttgaaacagtgctgagaattaactgtgctgacaggtcctatctctcattggcacttttaaagctgacatcctgttacatggatacaaaagatggtaattttaaaggaaattttgggggcagtgatatgaatagtctttaataagagctggcatggtattgcctgttgtcaaagatgacccaagggtaagagtttattagtgcattttctcctaaactgaaagtgacagggcatgcttaaggcttttttgttgctgtttgttacaaatgaaaatttcattgcagaattttcatgctgaagagtattgatctatgttttcccacagccagaagaataaaaaaaagtatggagaaacagaaattactttgctatgactttagcattgcttcctgatcattttgaataacgataatgtattcagcttatggaggccaatctctattgacaaaraagtttttatagagatgagatgcagagcagatatttttgctcagtgttttacaaaattgaagtgtaaaaaatttgaaatacaagtcgaagtagtatttataagcttcaaactgaatgcaccaagcttcaaactgaaagcaccaactttgtaatctaattatgctacagattattttgccaatcctcacctcagctgtgatctcctccgtctgtttccatctgtctaaaccgaagacccacttacatctcgaaccagctgacctaagtaaaacttctataaaattctctgattcctacacctcacactcaatttctattgcaaattgttatagttttatatctatcatttttacctgtgaaactacagttacattttaagtacttcagtttgaaagcacagtttttggtttgtcattgttaatggcttgagttttaaattttagtgtcaattactagtcattatcaaaatgctctggacacagaagtatttagttaatattttagtctgttcctaatgaataatagtgacctctagctataaatgggggttagtatcaatcactttacctaaccttactcagggtagttacccaaccttattcagagttggtgtttaacatcataagaaattcaaacagatgtcattccgttgtaagacaatataaactagcttatacataagaatatttactaatttttgtgactgggtagtacaggataggcttcaggatttgttgatcaagtcattaaagatccacgttctttccaattcttcactttgtagtctatgattttggcttctatcctaagccaggcctaccacctagtcttaggagagaaatatgactacatgcttccttggtcttatccagttagggataaagagggcagtacctaccacaactatcaaaataataataataataataataataatgcatcactggttattggataaacagctagtatgtccagtagagagcttttgtacacaggactccagagcgtaaacagtgttactcagaattagttgtttattttattcagataagatagtaactgaggaaataatgtcaagagaaggtacaacttaatcctgaaggacatacagagtttggaatatggtactattggagaagggtgttaccatactaagtcaagtaacagtatgaatcataggtaatcagtaggatcgtagcttatttggtcaatggtgaactgttcatggaatcacttgctttatgtcagttatttactatgcatatgaagaaggaaagcattcaaaacctattagaacttttcagattctgcttttactgtaattgtagtttatgtcctatcagagcctgtcttgttcatctttgtttgcttcagcacctagcacaatatttacatgaagaaattcagtacttttctcaaaatcaacaaataaaattgtttagttgaaatcagaggagtgggactgaccctggcatatgtaggggatgagcaatgaaccacatatttcttctcacctacagatggagtcaagtttgctggcataaaggaagtgatgatgacaattgtggtgtctacaccagactctttcctttgtcaagtgggttattaagggtgacttttcagtttggtgtaaatatttttcatttgaaaaataatattgatttgaccagtattctattccggtactctaatctttttgtacataaaattaaatctgaatttttttggtgtttttatataagaagcaaggttttgctagttggtggctaagggccatggaatttctagcttgagacctttagcaagctgtttaataccatgcagtattgatttttaactagtttccctagcacagcttttaggctcatgaattcatataaagatcctttttcttaatggtgacttgagatcccttttcttctattgtgaaaactggtcatcttgacaggaagtttggaattatcttggagaatgtaatttaaacagctatgttttctaaaaactgaaatataatgaacatttcagaacacactgaatcacatactaattttaccccccaaaacccctaaatatttaaaaaagcccatgcagccagtggataccaaatgtgtcaaatttggaggagtctccaaatctctcatatttaaaaattttactttgctccccttgagtatgataaaagaaacatttggagtctcctctcattcatattatctacttgtaattcaggtgattcagtgttcaagatgtctggtacatatttaaattctaaatgagcaaaagagtgctagatgttcttatttcagatagtatattttggtgcaaccagaaactagacactcatttgaattgttcatatagtccattaaacatacattttcaaagctgaaaagtattaaaaaaaagatagtatctatgtttatttaagagtagtagaaaaattatggcttttaaatctaatatgaatattgactgggacttcatataattactgaaactctacttgatccacttctgtacaccattatgccaaatacttttttctattaattttctccttttctgagtttccttatagctactccataaggatagtaaagtgcagcagttgtgtttgtcagattgatttttttcattttatttattttctttcagtttgtttttaaaataaaaatgcgatgagagttctttccctaaaggtttctcagtttattttcctaggcaatttgtgtgttgagtgggtagggtactggtcactgctctttggagtaaatattgggggtttgcttttgatgaagctttcgtcttaagaatttgaaaaggatcaaagaggaagcagaatcatttgcatcattaataattatttgtgctgaactcaagggaattttatttcagattgttgacagtaggcctgtacacgttttctaagtttcaattctcttctcttggagtttgtgataaatgtaatttggacccatttccgtctaccaagggactcctatctactacatggcccgagtgtcttcgtagtttatattcccctatctgttaatcatttttctttctcttaccccaaaccaaaaataaagaaacagtgtccatttgaactaagattttttagtctttctgggtttatttgcaacttcattgaaaaatcagctagcagcctttattgagttcttaatgaggtaataggcaagtgcatattatgatgttaagtattcaataaagacaaatgccaaaaaaatcgcatacatagtctcagtacttaagaatctcataatttaattctataggaaatgtagaattattgagtatcatgacacagaattttgacttaggttttgattttaaactctgtaagaataaaaaatgtttcctaacaaataaaaaatagtctacctattttctaactgcaatgaaatagcaactatttcattgaaaccccttattaagcactaatttggctttaaaaagttacactgggagagtcttatagaatgttaattgaacagaagctctatagttgacaaattggaatcaatcagtgagggcagggagataaatcagagtgtttagtggtataatgagtaaggatggcaatagaagtgttgtagtgggacattacttcattagtttgagttcttgagtctctcccactctcccctccacttcatcttcaagagagtcattaatagcagggttctctaccactatatgacttacaggtgagtttttgtgtttagtcttgcagttagcataaattatttgccacttaagcagtacatcttttaaaaagctagctaatatacattctgctgaccagtaaagcatgatcaggaacctgactgttactaagaatacaaacatggaaatatatagaaaacaaaaaaatgcataaaatgttatgtagaagccttacaaataaagcaaataataatatgtaattatttattaatgtgtcgatcaaaaccggcttgttcaaagtttatgatagtaccacagaaattgcttgctttcccatctgggttaagataaatgatgttttccctctttctaggaaataatataatctgacaagaattaaaaccaagtataaggtcaacacaaatgaatacagataaataatactttgtcactcctcagcatagattgtgtttagttcatgattattaatttttagaaaaaaagggaaatattgtaacatttcagtattaaaagtgagaatttggggacggagagctggacagaaattaaataatatggcagaaaatatggcggctttcctcaaatataaatatacaacagtctcttcttgtacaggctttactttagctctgatacttgtttttagagaaattatggcctatagatgtgttctcatctcttacaaggtatataaatacagtgacttttacactttaggatataatttatccttgttataggcacataactttcttttgctctccagtttctgttttctgagccctaaactgagaaaatattttgttgtttttctttattgttgcttgatttggagtcatagatttagctatgatgacacagaatctgtccttgtattaaacaacaaaacagcaagtaggtaattacttgtaccttcgttaggaagaaattttacccacctggttatttacgtattgctgattgcccctggattttcattagtcttttttatacatatggagataccatggctactctcatgttgccatgctacctcctccagcagcttcccttcacattaagggggaaaaaaaatcacagtcctttcctgttctaagtgaccttaaatgaaatatcccctgactgccactccaaatttgttctttatcactcacctccttccttgatccacagcaggcaaagccagctcttccgagtatacttctgtctctgggcattagacttcctgctctttccaccctcgcgtattttttcttgaatagatgcacgcttttacattcttattcctttcagctttcttcttattccccaccccccctccccaaaaatacctaaaggccaaatggcaattattttctagtacagaagagaattcattgattttgttttactgttttttttttttcctccggagttatttaggtcaaagtttttgaaagatctttatgtaatgcctactatcagtaagtatatgcataacaagagaatggtctcaaagatttttgtgctgttggaaatgcagtgaatagaaatctgtatgtctgaaatttgtttgtaatatgtatataaatagattccgttattcatattttattgcatagcctttgaatgccccacacttttctttattctcactgccaccacttgtctctgtcaccatcttctctttcgtgtacttctataaaaaacctacttattgatctccctccatgaacgcttaccttctccaaggcagtcttcacacagaagccagagtgactgtatgacacagtaagtcagaatatgctccccctggcactggcagcttcctgttcttgcggtataaattccagctgcctcatcacagctccaaggccctgcttgctcctaggcttttagctgggctcacccccttcagtccttcataagactctcctttgctcactaaactctagcaacactggttttctttcacttgctttaacataccatgatctctcatgccttagggtcttggctttttctaatcaccctgctccttcaaaatataactgcattcataacatctgtctcctccatgagactgatgtacttagggacccctttccttttgctcactcatgattggatctctgtagccaataccatgatcaaagtctagcaggtctcatcaaatattgtcaaaaaaacaaaaatagtgaggtataaagtgccatatgaatgacatgaatttaatgtgtagaatgaggagggcagcctcgtggctgccttttaatggtcaggggatgtgctgaggaggatgggaagttccatcggactcttgatgggtgggtagcatttggatagtggaagataagtaaagggcattctgggtagagggactggcactggaaaacatgttcttgtgaactagcagtaaatattgactgtaacacagtgttttccactgaaaacatctgagatgatcctgaaattgtactttgaggccttactgtggaacaatttgagtgccagactaagaaatataaatgcattgtgttatttaatttgggaacctttaggagttttgaagtaggttacttacatattatctgtctcagaaaaccaggataccagatgatgtggaaaatggygcgtttttagggagtaagttaagggggctcttacaattttaaaaacttgagatgataagtgataagtgttcctggggggggtggttatggtagaaagaatgagtcaaggatgagagattaggcagcaatgttgttaaagcattgtgtaatgacagtaggaggagaagtcaaaggagacttctagatttttgtttgggatattggataaaatgtggtattatggtcagagatttggaagccttgtagaagaactcatttgagagcatagatgttaagtttaattgtaaactttcgattgrggtgctaggaacatatccagttttaaaatctttaggaatgtgggtaagccttaaactaatcatagggcattaagtaaagactcaatacaggatgaattgaacaataggtgcttagtgcatagaaattatttgtatttcctaagtttccatttcatagcctttagcctatattattggaatttttcatgttgtttaactgtggatgaaagcacagttttttaactaaatggaaaatttagaaagagaaaccaggcagttaaatatgatgtcttttttattgctgacattatctgcatataaaaacacatgtaagatatatcatgtggaaagatatcccccactgcttcatgtagattcctgactgtattttggttgtcggttaagtggaaatctttttcctcttctttgtaaaactttttacttcatagaaataaagcaaactctctacaggcttctctactttctcttcagaattttattgctcctgataataatgctcctggacctttttcctacatcaatgttttaaagggttgggagagggaattttttttttttttttttgagggtgtaggacttttggctaacagcatttctcattctcaaagaatgtcattcactgtagtgggtggtttgaaaatatttacttaagggtagataaagagttcccacctgacataatcttcctgtgttaaaatccccactcaatttggcatttctgtgtactgtgcaggattgctaaaaagcagttaccatgatcagactggttgatgcatggtaaagatgtaaagcagggtgtttggaattcaacatggatggtagaaatgcgagatgtcagagaagccatatattaaagagaatttgaattggaaactgaatcccaatctgccaccgagaacattttgatcattttgatttattaaacttttataacaacattcagatggagctgaattaaaacctttagtcttggatagtttatgggacaccaaccactgtgttaccggtatcattttgaaggatctcttagcgtcagtgaaaaggggaaaaatgggtgggtaagatacttaatttaaaggaagttttcacttatattcttgcatctaactttaaatccctcttttgtttgcattgtgtcacttaaacatattttataatttcaacatattagataccttaaggttttgaattttattgtgaaacgtttttgaaattctgattaataattttcagattgaaacactgcttttgtatatatggtacaggctatcttttctttttgtgtatatctgtacactcagaggcatctgtatctgtctatgtttgtgttgctgaggtttatagataaatattcaaatagaaatactaatgcaattttgaagcctaacttgcatgtaaatgagtgcattttcctaaaactattgaattctgtacgtctgattttttaaaaatcaaccatcagcaatcatggatagtcttttctgaacagtagctccataataaagagaagtcaatcactattagagaagcactgtaggtgaaaggcactatagttcacacttgattttgtagcggggagagggtacttagctgtgaatcaggaatgatgcaaaagatggatgagatagagttcaaggagcagtaatgtgagagtccaggacaatcatttcaagctgtctcagcagtaatgatggatggcttggtggtaagaagtaataataccagatgatgaaagatgcatctcagcaccttgagcccgagcacaccatctacctgttggggttctggggcataatgattcctgatttgcaaccaaagggttttgctgcacttagcaacccagatttttggcagctgtgaaggaagcaagtagcatatcaaacactccttcacattgtaaatttaattacctcatatttatgcatagtagttgttgacaggaacttgtaagctatgctaatatggaaggtaatttgttacctccagaaatcactttccatgtgtcttctgatcattatcatgaaacatgataaatgatctagcccatgaggtataaatgaaaatgaaatagataattggattctatgtctacattgtggctggaatagtcacagcaattataattgaatttatctcataaaaatgagttggcaatacatcagtgacctttcatcattttgtgcctatggtattatatgaagctacttttgagatgaacacaaaaaatgtatcataattctttttaaagagtaatctctaacacttaaattttctattttcttgccttatctgcctatatatttttaagtatctagtttatctacagcgagttttaacaattaatactgataatcctttttttatactgagaataaagtgttttgttgttaccagtgccttgactgaatggcttaggaacagtgtaagacactctgattttttttttttttttttttaatgaacaccctttattattagcagcatgtatctttctgctgggtgatggaagtgtgccttcttgctgaatctgtgtgttctctttgattcttataatatgtttctgatatactaaaataaaagagtttgttttaaatatcaccagacttttttctctttaccttctctttaagtcactttaaataataatattttattattgacataaaaaccctatatattcattgatttgattaacatatttgaggatcaccatgtgttaattattggatttattgctaataaaatgactaagatgcatactctttagggggttatagtgccatatgtaactatggtaatatctagttttcaaattataacataatttcttttttctccaccagcctctttccatgagggtccaagaagcaaataaagcttctgtttatgtttttgtatttctaactaagaaagtctattccagattcagttactaacaactatatggaaaataagaagktatctggaaatgtgacttatcttttgaatgaaatatgtmaataagcagggcatgtccctagggacattttctcccactcttatattttttaacttgaattttttttttttttttttttttttttttggtctgtgatgcagattctcactgtgttgtccaggctagagttcagtggcacaatcttggctcactagaacctctgcctcccaggttcgagcaactctcctgcctccacctctcaagtaactgggattacaggtgccccccaccactcccaatttttgtgtatttttaatagagatggggtttcgccatattggccatgtttggtctcaaactcctgacctggacctcaaacaccatcctaagatggtgatccacccatcttagcctcccaaaatgctgggattataggcgtgagccaccacgcctggccttttcttgaaatttcttcactttctttccttttgtttttcttcaacttttaagttcaggggtacatgtgcaggatgtgcaggtttgttacatacataaatgtgtcccatggtggtttgctgcacagattgtcccatcacctaggtattaagctcagaatccattagccgctcttcctgatgctctccctcccccgcatacttccatccaacaggccccagtgtgtgttgttcccctccatgtatccatgtgttctcattattcagctatcacttataagtgcggaatgtggtgtttggttttctgttcttgcattagtttgctgaggataatagcttccaagtctctccatgtccctgcaaaggacatggtccaattcctttgtatggttgcatggtatttcatggtatacatgtaccacattttctttatccagtgggtcatttatgggcatctaggttgattgcatgtctttgctattgcgaatagtgctgcaatgaacacacacatgcatgtatctttataaaagaatgattccattcttttgggtatatacccagtagagggatttctgggtcaaatggtatttctgcctctaggtctctgaggaattgccacactgtcttccgcaagggttgagctaatttacattccaacagtttataagcattcctttttctccacacccttgccagcatctgttgtttttgactcttcgataatcaccattctgactgatatgagatggtatctctttgtggttttgatttgcattactctaatgatcagtgatgttgatcttttttttttttcatgtttgttggctgcctatatgtcttcttttgagaaatgtctgttcatgtcctttgcctactttttaatggagttgttttcttcttgtaaattcgcttaagttccttataaactctggatattagacttttgtcagatggatagattgcaaaaattttctcccattttgtaggttgtttgttcactctgatgttaatttcttttgctgtgcagaagttctttcgttagatcccatttgtcaatttttgcttttgttgagatttcttttggtgtcttcatcatgaaatctttatccatgcctatgtcctgaatggtattgcctagatttccttctaggctttttatagttttgagttttacatttaagtctttaatcatcttgggttaatttttgtatatgttttaaggaaggggtccagtttcaattttctgcatttggctagccagttctcccagcaccatttattaaatagggaatcctctccccattgcttgttttttcaggtttgtcaaagatcagatggttgtaggtggatagtcttatttttgaattctctattctgttccactggtctatgtgtttgttcttgtatcaatactatgctgttttggttactgtagccttatactgtagctagaagttgggtagtatgatgcctccagctttgttcattttgctttggattgtcttggctatttaggatcttttttggttccatatgaattttaaaatagtttttttctaattttatgaggaacatcaatagtagtctaatgggaatgctattgaatctataaattactttaggcagtatggccattttcatgacattgattcttcctgtccatgagcatggaatgtttcccatttgtttgtgtcctctctgatttcttggaggagtggtttgtagttttccttgaagaggtcttccacttcccttgttagctgtatttctaggcattttattctctttgtagcaattgtgaatgggagtttactcagaatttggctctgtgcttgcctcttgttggggtataggactgctagcaattttttcacattgattatcctgagactttgctgaagttgcttatcagcttaagaagcttttaggctgaggtgatggggttttctaggtataggatcatgtcatctgcaaataaagataattcaacttcctctcttcctattcaaatactctttatttctttgtcttgcctgattgccctggccagaactttcaatactatgttgaataggagtggtgagagatgacgtccttgtcttgtactggttttcaaggggaatgcttccagcttttgcccaatcagcatgatattgccgattttgcctgtgggtttgtcatatatggctgttactgttttgaagtcttttccattggtttattgagagtttttaacctgaagagatattgaattccattgaagtccttttctgcatctattgcgataatcatgtgtttttgtttttgtttttgtttttttgtctttagttctgtttatgtgatgaatcacatttatttatttgtgtatgttgaaccaaccttgcatcccrgggaagaagccaacttgatcatggtggataagctttttgatatgctgctggattcggtttaacagtattttgttgaggatttttacatagatgttcattaaggatgttggcctgaagttttcttttgtctgttgtatctctgtcaagttttggtatttaggatgatgctggccttatagaaagaggtagggaagaatcccgccttcttaattttttggattagtttccgtagaaatggtaccagctcttctttgtacctctggtagaattcagctgtcaatccatctgatcctgggctttattttggtttgtaggctatttattagtgcctcaatttcagaatttgtcattggtctatccagggattctatttcaaattcaaattgagttgactgaaccacagagatggcaaccaccccttccctggggaactccgtccttcttaggtggacggagcctgtcagcctgtcagcactgtctggctggaattccaagccagttggtcttaacttgtgaagtgccctcgaagtggggcctgcagaacaacactgcttggctccctgtattcagccccgctcctaggagtatgtagtgaccctccctgggaatcccgggtccagagtatacaaaactcctgagtgtctgtgtgtacttaagtggttgctctgctgggacatcacacagctctgtgtattggacccaaggccctagtagcctgaacttacaaggggatctcctgatctgcaggttgcaaatatttacgggagaagcgtggtttccccggggcagggttacataattcctcaccgcttcccctggctgggagtggggcttcctttggcttcatgtctccccgaagtgggccatcgccccaccctgcttttcttcattttccgtgggttgagctgtttgcctagtcagtcccagtgtgagaacctggatatttcagtggaagatgctgaattcactctctgccttcgttcctctccttaagtgccacagatggcatctgcttttattcgtccattttccagggcctatatatcaatttcttcactttccatactcattggtagtgatactccaactaataagattattgttaattttattaatactagtcttgctacttgaagcaagttttacataaatatgaataagaaacagatttgtgagatttaccccttaaatttcaatgattcttactactgtgttactggggtcattatcttgtctctagaaacaatgcatttcctttaagttgcttgactgctatttttaactgattcctgccctaacaagtagcatgatagttattacctaccattttatttaatatttttaatttttaaaatttgatttagtaaaatatatatattttttaatagagatggggtctcactatgtttcccaggctattcttgaaatcctggcttcaagcagtcctcccatctcagcctcccaaagtgctgagattacacgcatgagccgtcacgcctggccaaacctatcattttatagtagattctcaatacaggaacaggagacgtgtgttcctttctaaatcaaatgtagtttatatttgaaactatttaggactaccacacatgtcctttttttagattctgatgtactactgtaaacatacgcacacactcatgcacactcacatgtgcatggatgtgcactcaaccttgatttcagcatggctttgttagaatctaggcagagcctggcataagtgtggtttattaaaagttaagaaattattctgctattgctcttgcatttttcttctcctcttccctgaacatttttcttggattttatgtcaagaattatgaattgcctttgtagcgctaagaaaattttggaagtgttttcaatgtctttaataatatcatgagattctttgagtttcagcactttcctgtttgtagaaaaaataaattacatagaatttaatagcctatcctcttttaaagtcatagtgcttagtaatcaaagaaagtccataagcacctatttttaattaatatgaaaattaaaaacaccttccagggtaggctcagtaaggtaggatcttttaatgtcccaatcatctttgattaagtccaatgaaaattttggactctctgtcccttcccttcccctccctccctccctccctccctccctccctccctccttccctcccttcttcctcctcaccctccccctcctcctccccccctcctcctcatccttcttcttcttcttcttcttctctctctctttctgtctttttttctttttcagaccactccattgacttctcattttcagcttgataaaatagcattagaaaacttttatttatttattttacttttgacagggtctctctctgtcacctagactggttcactacagcctcagcctcccagatacaagcaatctcacctcagcctcccaagtagctaagacgatagctgagcaccaccacactggctatttttaattttatctttatatttcatagagtcaggagtcttgctgtgttccccaggctggtcttgaatgcctggccttaagtgatcctcctgcctcagactctcaaattgctatgataataggtgtgagccctctgcctggcctagaaacctttaaatgtatgctgtggaggaagtttactctaatttgtatcttaagtagggatgtaatctaaatgtctcttcatgataaaagtcaaatcatgagctaaatccccttttaaatgactcatttgcagagtagctccatttctacatttgcttaccttacctagagagatgttattagatgagttcagaatttttctctgaactaacagtggcaatgcagagtacaaataatatcaagacattaaagacctaactttgcatgattccagtataatgttacataaaagaaatatattctcataatagagagatgctctgggaaatgtatgaaccatcatatatagatgaattcaaataagtaattctgaagaacttgtagttagaaagcagaaaaaagtttacttgatgcctttatgtggtataatcacatcacaatatatgtaacatacaaagatggctgtagaactccactgctccttctaacctatacttgatccatctcataggcagaagcatttgaatgcctaaacttttgcagatggctattcttcatgtttcttttgatttcggggattctcttgctttagaagtcaaaagatctggtacattgaagcatttaaggaaaaacatagacgcccatgtttgtgattgatttaggaattttcaagagaaattttgaaggaattagattttgccatacatgctggctttaaatgttaaatctcaggatgagattccacttctacttagtggcccttgcgggggttggcccttgtgggagttggtggattttctggttaagagtttagtttgtttcctccctttccctaccctttccctccctccctccctccctccctcccttccttccttgatatattgtaggcatatggaaaagtgtatattaaacatatagtttgataaatgtatatatagcttgttgaatattaccagcaccccagaagtgctacctcattccattctagttaataacctcttcccccagagtaaccactgttcttggtttataacattaataagtaacaggtatatggcatcttacatatgaatagtttatactcttatctggtttctctcattcagcattaagtttgtgaaatctgtattgctgcatgtagctatgcatcatagaacatcattgttatgaaatcttgttgtgtgactgtgccacaatttattcatttttctgatgatagacatttggttctttttcaccttgagctatttacaatagcagtatttgaatatactactatatgacttttcaggaacagatgggatcattttggggtagcacgtacctgaaagcggaattgctaggtcatagggtatgctgattttcagctcaaggaggtactggcaaaaaattttcttaatttctcatataatttatactccaccttgcaagcataaagtttcacatcttcaccaacagttgacattatcttgctttccatttctaattatcttcttatgttaatacttttatttgttcataagtgcattcattcaacaaatattgattgcactgaagacataaatgtaattcaaaggcaaacaatatacagtccttgccttcaagaaagtcagtaagtgaagagagaggcaaaaaatataggtaaatctcttaccagaaaaagtgcgtttatttcaggctgaagagagtgtagtgagaaaggttttcagaggcagtaataactgaactgaaatttgaagatagataactttgctaagtgtataaatggcaaaaagacactctaggaagtataggataaaggtggaatgatttttattattatactttaagttctggggtacttgtgcagaatgtgcagttttgttacataggtatacacatgccatggtggtttgctgcacccatcaacccatcacctacattaggtaattctcctaatgctatccctcccctagccccctacccccacaacaggccatggtgtataatgttcccctccctgtgtccatgtgttctcgttgttcaactcaaggtgggatgattttaagagaagagtttcccatggaaaacacaagttgttaaatgtgaacatataattggacttgaagagtgataacacatgaggctggacagatgagcaggggacagatcatgaaagggcagtgcatttattttaggaagtttgcatctttctcagaagtttactttcagctgtcttaataagacatagagttctatttatcacctgctgcatcataaaacttagtggcataaaacaataaccattttatagtgttcacagcttctgtgggctataaatttgggtgatatgtatagatcactccagtatgatatttgggtcccgagctgagagtctcaaattgaacagctaaaggtgatttaaactcctggaggctagaatcatctggcacaagtctggcacttgaattgggataatgccactggctaattgaaaattggaaatggtggcacctagaacaagtgttctaggtctcattacatcactttctctgcactatacttgttgaggcaggcatgaggtctctctggattgaaggggatccagcctctcaatgcgagtgctatcagagaatttgtagcgcattttcagaccattgcagtgactaatgttattttgtgcctttatttcatgttctttttgttgtctaccgtaatagtcacaaaaatctatctagtatagtttgattgtcccccctccccagccattctgagtgtaatttgaatatcacctaggggacaccttggtttagagagcacagtcttaaccattgatctctttttcctcacataattgacattggttttataaagaagaaaatatacaatgagtacatttatatctctgtttaacataatttgcatttatatattaaaataaattttgaaagtagatttcaaaatatccaggtacaaattagtgcctttatagtttaagcaaattattatgctgtatagtaatgatacatctagtatacttctctgattaatttccaagtttagtatcttgacatttgttcaatgtcagacttttaatttaaaacctggacatagacatttaaagatagctaatgcatgaggggcttaaaacccagatgacaggttgataggtgcagcaaaccaccgtggcacatgtatacctatgtaacaaacctgcatgttctgcacatgtatcctgaacttaaagtaaattttttaagccaaaaaaaaaaaaaaagaaaaaaacaaaagagattaaaaaatgtaattgtatggcgctggagcaggaattgatacccttcagttacaatatggagatctctcagctatcaacttatattagtgcatcattttacaaaatttcataccaaagaaacatggtaccttcttcttttttctataatgtttaaaatagtagccttcctttctcaattctttattcgtcttacatccactgattgaggtaatattttcargaatcttcaatatctatgaaaatattagtgccattttatgtcttatggttcttttctccagcaaattttcagctgacctggctgagcgtggaaaaggatagggaatttgaaatttacagaaaagagtatatgaatagtctggattggtagccattttatgtccttattttttaaaggcatggtatttatcaaagtagactaggaagctctcttgttacttaggaacagtagctgtgaaagaagaacccaactccttagctgtgtaattgcattacttgtgctctagaaactattttactagcctggaaatttctcttgctgtgcatgttggattatagaactaggactcccttccagtatttcatattttggatgatatgacttattttgatactatgaatgtcagatgccccattaaggtgtgaaagtgagtgtgttcaaggggagttgaaataaaaggtcttttgctggcttggctgtcacactggtataaaatgtctttgaacaggtaactatttttacatggttaagcatcttaaaaatattattaacttgttattttatcagatgggtctataattattgccaaccttcagcttccatctatttataaaactaggtgtggtgattttgatagcactttgattattgaggacaggtattttggcccctaaaggaatggtaatagaattagatgattaaaatattttttcagaagtccttatagtaaccatattgatagatctgctttaatgcattctcttttttcttcccccatcattaagcctacatattctccaattgcccatgaaaacctgcctttcttagttgaaagacttattagaagtacgtaataacctgtcctctggttccyaggtcatgtctacctgacttttttatatcattgccatcaggatagcttrcctaaagtcagtgactccatgtagtgaactcatttctccttaaaagttctgtatctcttaatccaataagacacatgattgttttttgtttaattccaaaattgaggctattttggacaattgctaattaatatcatttgatgtccctgaataaatatatattgagaatttttacgttataaaacttagttggatctatataagctaatgacaaattttctttgctatgaagatctttaaataagtctctgaagatttatgtttttttgatccaaagagaggcttataactatgactgctttggagttagtagtacatacatgaatcctgttatctagtggaattttatatatgactgaggtcttgttccattagttttactatgtcatcacaattcctttttcgtaaaaaagtaaatatattagttgtacatacagggatatgcctggacaagtcatcgtgactctgtaccctacatagacatgtagaaataataggtagataataattcccctgattaacttagggtaaataaagttttgcattttacctgactggaaaccagggtcattgagtggaggatgcaagtagtgtctcctgatttattgcaggtctgagtcattacattttaaaatggtcatcagttgttggtttcatgtgcttaatattgacttcgttatttggtattgacttgaaatgattacaaagtatgtatttataatatgcttgtacgttgtatgttacaaagactcatcacaatggagtgtttagacctggggagtaagttggcaaacttagattaggtttcgttacaactaagtgtcacaaaaatcttctaattacataggtttcaaatttcttaaaatttggaatttaggctgatgacattttacaaatgtatttatattctagatgtggaagattcaggatatttttaataatttttttaaactatatatacatatcacatatatttacatatgtgtatgtgtctgcatatatgtatattacacacacacatctataaatagagattatattctcattatagagattttgcagtaggttttttttaaaattgatatcttgtttactggattcagccattgtgtcttaatatgaaatgaatgtggatagtgttattgtactccaagtccttttgcctataatctagaatggaataatagccagtgctatataatctaggcatattcaacaagtaactgggacatatattgccattgacaaacacagttcccttcctttctccaaccatatattttttaaaaagtctcctagctcttaaaggtgactgatgatgtggtgaggtgatcacctgtttatggccctagacttcagtgaactgaacagagttaaaggctttcctagttttattgctgacttgattgttattcctggaatcaactggatgttcttttcttgaaatactatgaacagtttgagctctgacaaagctgaaatgaggtattaaatgaccatgagaaaaatcttctgtatttattagcttatgagtcattcatagggattcataactttcatcataacatggtttgccaccatgttgactgtagtactgagagaggcttttgtaaagttgttaaaattattgctataattggccgggcgcggtggctcacgcctgtaatcccagcactttgggaggctgaggcgggtggatcacgaggtcaggagatcgagaccatcctggctaacacggtgaaaccccgtctgtacgaaaaatacagaaaaattagcctggcatagtggcacgcacctgtaatcccagctactcgggaggctgaggcaggagaatggcatgaacccaggaggtggagcttgcagtgagctgagatcatgccactgcacgctagcctgggcaacagagcaagactccgtttcctaataataataataataataataataataataataatatatatataaatattattgcgatttatcattctaaaccaattcactacatggatattaatgaagagagtagttttggacaaaatgagacgctactttttagtttccctatagtttgattatgagctaaaggacacataaacttactttttaaaattccatcaccttttcatccaccctaaatatgaacctaaccttgttttagtttctgctgacatctaaaacagtatgctgcagctgtgcctttttatttcaagcaggtaataaagttattgcagcaatgttttcaaatcaaggtgaataaaacgccatggtaatgcataggatataaaattcagtatgcaaaatttgcagtttcattgctgaaatgattcttcttatttcagcactttaggcagcaggaaagagccatgtcatagacattaaatactgtaattctacagatcttgcacttcaaaaactgaatacatatcacatggggacttgagagacaaaatcattgttgaatatgaagagcagcatatttagcatcagaattttctcctaccctgaattaaatttttgttcaagggacacacacacacacacacacacaagtattagtacaattatatacaatttcttattgatcttgtgtattcgaattagttttaaaatatataaatcggtgtgttttcttcacatggaaaatacttaaaacattttaattgatgtgatttgtagaaaagacaaaaaaaattaatgctagaattgtagctgtgcctttttttttttttttttttttttttcacaagctggataaatcatttgattccacttggtcactaagcagttgcttagaatgtgttcttttgttccagtcaactaactcttttaattaaagagtaacaatttgtaggtgctatgtatcagtgtcagggcatttggcttgctacatcgttcagagtgtgagatgttacatcttactttttaagggcttaatgttaacacctgaaaattaaataagtaaataaataaagtttgggtattgtgttctccaagtgtcgattcttacattgaagtgtacattttaaaatgtggactaggtagaatttacgtagttttttccttccttccttccctccttccctccttccccctctccctttctcccttcttctcttcctcccttcctcccttcctccctctcctcccctccccgcttcctccatgccctcccctcccctccccttcccttcccttccctttttctgatatagggtctcattctgttgcccacactggagtgcagtagcgtgatcctggttcactacagcttcaactttcccaggctcaggtgatcttcccatctcagcctcccgagtagctgggaccacagctgccaccacacctggctaatttctgtattttttgtggagatggggtttcaccatgttgcgcaggctggtctcaaactcctgggctcgagcgatttgccttcctcagcctcctaaaatgctaggattacaggcatgagccactgctcccagctgataagtttttcttacggtggcatgggtaactttttttctttggggcattgttaaggcagtcattcattctataataatagtattgaactttgtcaggcgctaaaagaaacactgggaatgtaatgatgagaatgttttgtgggcacstaacaaattgtattgaaaaacaaggataaaagaaaaagctaagtcactcatggtcctggagttccctggtcactgctattaactttttggtatgttttcttttgcttttggtggttgctgattttgttttttcaggggtatgctttttacttttgaaagtgaaaactaataatctttataacttgtgttctgttgagaagttacaccatgatttacctcccattttcccatcactgattattttgatcaagtttttactttacttttaagcaaagactgaaagtatctccttatgataaatttcccaaagtgttattactttacacatatctatttcttgatacataaattattttccaaaaataytgttatcagttcacttgcctgtgagcaattcgtgtagtcacatgcccatttccctgtgtttccctggccacagtcaagccagtgtgaataaatgatcactgccacagccacagagcttgcactctcctcctcaaaattctgctccattgcccttttgaaaaatggaaatataagtgatatagttttaggtagggatacgtggtaaatttattattttcagcattgttaaaattattttctacattgttgagctgttctagaggaacctattattgttttggactagagattttttttttcgcttcagatttattaagttatgattaacaaataaaattgaatatatttaagttgtacaatgtggtcttttggtatatgtatacaatttgaaataattatcaagctaattaccatatatttatcatctcaccatttatttgtggtgagaatatttaatatctactctcatagaaatgttgaaatatataataaattattattaattatacttacctatattatagttatagtagacctccaaaacttattcatctgaacaaattctgtacactttgaacatctctccatttccctacaaactccccgccctgcccctgccctgccccggtgctcctggtaaccaccattctactctctgcttctatgagttcaagctttttagatttcacatataagtgagatcacgcagtatttgtctttctgtgcctggcttttgaataattgcccccagtagggagccactgggagagaatgaagaaactctgtttagctgaatataattaacagtaataaaaatatagtataaacaaacatatataatatcccattaaatagatactttattatttgtaattcttttttccccttttatctaaagttttctacctacttaccactgtgaaatcatgtgtgcttatttcatggttctcagaagttactcgtgtgtgaaatattgtaagcataggcatgggggcacagtacacactctttctttagttcatcatagctatatgcagacaccaatcgaattttcatagagatggtagtagatagtggtagctccttctgattgatacctacataggtactggcataggggcctcaggtcccaacatccaaactttgtgatgtcttagcattaactttatttgaccagtacaagcttatgagccacctgagtaatatgatttgaaaaaggtctccaggccaggcctggtggctcacaactgtaatcccagcactttgggaggctgaggtgggcagatcacctgcggtctggagtttcagaccagcctggccaacatggtaaaaccccatctctactaaaaatacaaaaattagctgggcgtggtggcaagtatctgtaatcccagctacttgggaggcagaggcaggagaattgcttgaccctgggaggccaaggttgtggtgagccaagatcacaccactgcactccagcctggataacagagcgagactctgtcaaaaaaaaaaaaaaaaaaaaaaaaaaaaggtatctatcacttgaattgatgggtttaagaatagattttaacataataaaacaaatttaactcaattctatcagtgtacaaagtaaataaaacttaatagtaatttagattaaaaaatttatagaatttgctgactgcattgtgagctaaaatatgagctaaatttatgatgagttgtttggcttcccaaggaacttgtgagaactgaaaatttgaagtatcagaaaaataacagtgtgaaatcatgaaagaattctcataaatatatctgggttgcagtttttaaactggcagtgtaggagaaaccttattaaatctaaaattttcaaatgtatacttcttattttaacatctaaggaaaagttaaattgtgttgttatacatatgatattaaatgtccaaataaattgcttctaaatatgaataacctgctttctgtttgttatgggagcaaaggtcatctttctattcatcagtaatattaagtttcttgaaatgctcaagaatttattaaattatgttaccaacttgttgacataatttaaaatcatttaaaattattgtaggggtagctgataaatgcctgaattagatggtccaatgatgtctttcttcttcctcttagcctccctcatgtccatttacttgcacttctagtaggtgatggggaagaaaattaaacaatgagaaacactgtgaatttgttgtctaacaggaaccagaactggataaaaattttagtgagggaaattataaagaaacagagtaaaactgacttcaaagtgattctttcatttaagtaaagaaatggtaacaaataaaaaaaattccatctgcagggcaaacattctagtgttgaatgtgttaatagagcagtggactcctgtaaaacatgattttcatcatctctgtttttcccttttacaaaaaatagtaaaaagaaaaatatgggccaggtgtggtggctcacacctgtaatcccagcattttgggaggccgaggtgggaggatcacaaggtcaggagtttgagaccagcctggccaatatagcgaaaccccgtctctactaaaaaatacaaaaattagccgggtgtggtggcatgcacctgtagtcccggctatttgggaggctgaggcaggagagtagcttgaacccgggaggcagaggttgcagtgagccgagactgctccattgcactccagcctgggtaacagatgagactctgtctcaaaaaaaaaaaaaaaaaaaaaagaaaaagagtaaaatatgatatatatataaattattaactcttaaataatctgctactctggacccagctcagaaacttttgtaggtgaagtgttttctgctcacaagcttcctaccaactggagaaaaagtggagttgaaatatctggcaggaggaaggatgagatcatagtccatgtctgtggtaggctgaaaaatgccccccaaatagattctaatccttggaacctgtaatgttccttatatggaaaaatgatgtttgcaggtgtgattaagttaaggatgttgaaatggtgagaagatgctggattatacatatggggcctaactgcaatcacaagcatccatatccatatggaaggcagagggagatttgactacagacaggagaggagaaggcattgtgaacaaatgaaaggaatttggagggacaggaataccagcaccaccagaagttagaagactcaatcaactgattttctcctagagcctttataggaagtacggccttctgacagcttgattttgaccgagtggtactgatttcagatttctggcttccaggacttggagagaatctctgttgttttaagccaccaagtctgtagtaatttgttgcagcagccataggagaataatgtaatatcattgcctccttctgtagtggtaggactaatcttacgatactttatgtcaaggccccattgacaaataaaacccttaggaaggaggtaggattgagaggtatttaatttatctaattgggaaattaaatgtagaagtattttttgccttgacatttactttgttgctgacttttcctggatttatggcttctattttttattctgcattttattagttaactgaattttgctaagtgacacatgtgtttgtaaaataacattataataggaataactgaatgggagtattttttcataatgatttgcttgatttcaagacacttttaaaaattatttgaaataaaaataaaacaatttgaatatataattcgggttttataataggttcagttctagaataatgaatgtaagtcattaattggaagttaattggtaacatcggcaaagtttatcttatattttggggattgcatgcttcatttgatacctcctgtacaactgggatttattcgcacctcacttctgggtctggttgtgtattgttatgaagaatattaatattgctgcagaacgattacttgttcatttgtgaactgattaaaattcatgcataatttattgaaatgaatagaaattttataaataagccccattgttatcaagggcctgaaaacaaaatacatatgctaatataaagctactttttacctccaacataaaaatttaatatgtagtggtatattagcctcattaatgctagattttacatcttaaaatcatgctgttaatcaatacatatgcttttaagcctctcttaacattgccacatttccaaatttgagcaattgctttgatgctggactgcccccatttttggcctgaccatggaaagtgagatgtaaaactggccagagtgaactactacccttctgaccaagtcttgactgattacatcaaacttatttcttcatatacaaacaacactagtgttgaatattaattttcagtgttaaaatgtatatgctatatggcaaaacagaacaaagcaacctagcatcacacagggcttgttggtgtatgtaggagttgagtcttcaaaaattcttcaaataatgcctagtgcacgaatgaataaattataatgtgaaaaagttaaataacatatttaagattacacagctattaatgtgtaagcatttttttcatattaggtttccagactacaaatttttgttttcttttatatatcacttccttaaagatagaaatgttggaattaatgttgtgctttactgtttcacttatttctcttctttctttcacttgtttcttatgttgcggtatggctattttttctttccttcctctctcatcttttgctctcctcttaggttttctccttattttccatagcaagagtgtgcagagttttgattggtgagatttaccatttgatatactcacataagttcaggtttcagaatatctataaatttatgattaaccaaggtttgttatatataattcacttggcatattgtgactgtttattctatccctacactggggtagcaccccagcgagatgtgaatttagcattctttccaacttaaattagttagtatatgagccatctggaatgaaaacaaatattgcacatatgaggcaactcagtttattcacaaaatacagactgcttcttaaaatatgtgcagcatttaggtaatctcggaagacatttacattttttctattatgttcacttctcgattcagtttcattttagtttagggtttgagaatatatcaactttctccctctctacaaaaactttttaaaactctgagtacaaaagttgttagagcagttggtaaaatttcatggtatgaaatgtctagctctgtctttcatagttgataagtgaaaattctaaactgtgtttattttattcaaacttttttcttttgtgaataacttctccgttgaattcagtcgtgaaattggaaagagttcacttactatgcaattttgactacatattgttgaaacaatttgcaaactatcaggaatggatgttgtagttaaagtttgtaaatcatatgttaaccacttttctatagaaattataaatgtttgcacttcatatagcatatgttatcatctttgatcttagttttgtttttgttttaaacatgagcccagtgaatcccaaggtcatgtggttctacaaataattagtttaaaagttactgccataatgagccatgaatacttgtgaggagttacttatgtccttcaagtgattttggacaaaaaatattgatattacattcattatttatcagtcttctttttgtttcctatataaatttcagtttaaaataatgaattcattgatttctttttactatgtctcccctacaatgttatatggatacccaatgtgtaggacagcctaacaattaatagctactcaattaatatttatcatatgaattttgaaagaatcttcttgaaaattactttagcctgtgtagctgtacagaccagataatcttattcctaattttaaggttatttgtaattcagaggcttttaagctagaaactatacttttatacaatcagggttaaaaagaaaatcctggtctgcacctgaacattcttgtttcatttaaacctgcataagaaggtaaaacctgtctacaggccttatttgcattgtatatttttcatgcaatgcattgccattgaaacaaaaaatccaactagaaagatattgattatgtgctcatgacttccctctatttgtaccttcttcagtccaccccgtacctgtagtgggttggactgagggagcattttgtggttgtgttttaatagtttatgtgatttgctccaactcttaaaaaaagttttaaattaatttttgagcaattactactttattaacactttctttaggtcttttgactttcctgagaaaagtgagaagtgttccaggaattcaaagaactttatgagttattatcccttgtggaaagaccatatgaacagagctatagctgttgagtccttcataaagttcggtgtctcatttcagtcacattgttctaatgaaagaaaaaaaaagtgccttaatatatcattcaacttttctgtaagtacaaatgttgaaataatgttttccaaagtttctttcaagcagaatatcttaagatatccaaaattaaattatagtgtgcctttgatatttgagtttaatagttggtgaattgccttatcttatgctgctcccaaagaccagtgatgtttagtgatttgtgattgtgcctaggtgtaaatttaaatttgtcacactgtgaggcagatttgtagaaacaagttagcacctggcatcactttctgagttcggttatgttattctttcttcctttactcatctgtagaaactgtgaagaagtaacaaggaaagcaaaaagaaaaatacctcttgggcatagtttgtgaatgaaataaattgtcaaagatcaactctactctcttagtagctaattagagctatccatatctaaatattttctttttatttcctttgtatactgtgactttacaagttgatctcctgaaaaaaaatgtgtttttaatacaggaaaattatgttaaaatagtcatatgcacttgcaaaattatatgttctttaaaagtacagttgtcagatcatgcgtcttctagttttctttcaagtatttattatgcatttctaataaatgatccattaagcatttaggccttattagacactaatatatctttgtattattttaaatcttactaattgaagtgcacactcatctctcctagaaccgccaagacccattgctcctcctcagcttcttggtgttgggcctacatatttgctgatccaactaaatgccaactcgatcattggcgatggtcctatcatcctgaaagaagtagagtaccgaatgacatcaggatcctggacagaaacccatgcagtcaatgctccaacttacaaattatggcatttagatccagataccgaatatgagatccgagttctacttacaagacctggtgaaggtggaacggggctcccaggacctccactaatcaccagaacaaaatgtgcaggtaagactgagtagcagaccttttctaccttgtgaaggaatctagcataagacacattaatacatgcagtgttgaaggttctcattatttgatatatgatatagtcacactattaagagttccaatgaattacataaatcatcaccttgattatgtcataatttgactgatttgaggacatgggagtgcttctctattctcaagccattattattatgaatctagagtccttttttggcatggtagttttggtgagcctgctacatattcagtccaaaaatctctgatagctgtaattgaaagcattattgagagaaaagatcattttagttcaagcaaataccgaatacttttttactacgtggaaattctctccctcagtaattttgttacagtcagtgtaaaggccacatcttataatatggataagaaaagttactctggacaatgcctcgttgagataactattttcttcagaatgtcctgttgttgaggattacctcaggagcttgacacccagctgcagaacacagagagattttccttacactttaagcctttctgttgccttcctcatgactaaaactgagtagtgaaaataatagtgtatggagaaaacacaaaaaaatgaaaattaaaaaattgtatataaccacacatcctggttctttaccatgttataatgggaggaattgttagctattaattaaaagccaataaaaagtttaaatatctaatttacttgactacatttttagtgtagtgtttattttgtcttttgtttcttgagcatctgtttatcattgacagtattgttgggctacccaccaggagtactgagctaccatccaagcaaaacccattcagttacctgatgtatcgtagaacatattttttagtccagcatcatatttatatatcaaaaactcctgctgaaagatgtttactaataggaaatttaacttctcaactattagcctgagacttagatgatagagagtccaataatttgctgattgctgtatatatttatctggttgttgaaaaggagcttaagctagaagatgttgggtaaatttccatggctcagcctaaatctcacaatttgcttttcaaatattctgtatgtctatgtcctttcaatcgaggtcatgtgacaaattgtttctgtgatagaagataaactttctgagggagaggcaagttgaccccataatctcaactagtcagagaaatcatttaaagaggaagcaatttggaaactaaaaattagttcactctctattccaaaattaatatcccatgctaatgtgaaaaattgaactatggagtccattttactaagaatactgcatacatgttttctaataaaattacacttttctacatatacatacatttataatgtacatataaattttaacaattttgacaatttggtattccagtgatttccctcttgacttcctgtgcccaaactactttcttttaaatatctcacctgctttatttttttattttcgtcaaaataggtctttaaaaaattagcattaccacacagtgtattgttaatataatgtaatttttgtttaacttaggaattatttgaaattggttccagatgtgaaagccatggagattgcatgtaaataatattgtgttttgaagccagttatactgtgttaagtggataaaaacatgttactgaatattgatttatccccatacttatgttctgagtggactttggactgtttaagtaaaaatattactataaagtgctttgaagtgttttattctgagaatagccctatctatgtgagagggaatgaggatagttaacttacactcatagctgcttttttgtcttgctctattgtccaggctagagtgcagtggcgtgatcttggctcactgcaacctctgcctcctgcgttcaagcaattctcctgtctcaacttcccgagtagctgggattacaggcatgcgctaccatgcccagctaatttttgtatttttgtagagatgggtttcaccatgttgcccaggctggtcttgaactcctgacctcaagtgatctgcccgcctcggcctaccaaagtgcttgaattacagctgtgagctaccgtgcctggcccatagctgctttctaacttataaatgtcttgatattttggaattatactgtctttttatctgattcttttttctgagaaacatttaatttgtgtattctttgtggcataaaatgctttcaggctcaatcacttgtagttttactcccaacagtattaagtttatttgtttttaaaactatctttcacatgtagtgaatttttatcacatgtttattatagctaattaatgtcctcataaggtatgtctgcaagatttttggggagggaagtacttatagactagattttcaggtagactgcaaatttgagagaaaccatggttactatttcatcaggaatgtctactaatcttgctctgttattagaaaataaagagaagcttatggaagtatatattgtattaatttttaaacagtctataaaaagaaatggaacataattgatatatagtataattaaatacagagtgttagttaggattatgatgtatgttcatccacttcccttctttaagatccatttacctttccccaaatttcaggtcccccagacttgaaattaccaataccactactggcctcagcccagaagttcatatcaacaaaatagaacacagtttatgttaactatgatattaactgaattttagtacagattgcaaaaacttataaatgcttcataatcttgggaaatacctttgagactccaaaaataacctttggaggaagttaccatctaattttgttaaattctgcatgcctaaatactggttctataagaggaactgaatactagatttataaaccattcttttttaattaggactgggactattccatgttacagttgtagaatttgccattaatataatctgattgaataaatgttgataattttaaagtagctattttaatagtccctgcatgttagactatgtggctgtaaaaataagtaccaatcaaaaagtaaattacttacaatttactgtttttaaaattccattttaaggtatttgaggcattgaccttttatttctgataatagtaaatgtttatttgatggaaatctgtcaataaataattttccagcaagtcaatacaaaggttttccttatttataataaaaaataaattttacattttcaaatgtaaatgtaggtttttttgtggccaagtatggattaatgctagtgtagaatcaacatatgaagtgaatgtatcatgatattttattttcacaccaatcctgtgaaatatattattttctcactttttagttggtraatttaagactcaggaaacaaaaacaaaacagtaacttgtccaatatcagacagatgggcctcaactccttttctcagacttttaacggccttaatacttattcctcttattcctatcataggtgatttttctccctcttataatagtatagcatgagtaaataaaagcacaacaagtaaagtctggaagagatgtacattttaaaaaatagagtctgcatggctaacttattctctgagaaaatataggttaatatttgcaacttcacatttattgaaagcccaattgattagtgcttaactctccaatatatgctgtgttttaaatactttaaacagttaaagtgtaaaagtactttatccttttctgaaaatatcctgtctggttgccaaagctttttgtttgtttgttttccttccaaagtgcattataatcatttggtaactgcaattagttgcttcagggtctctgacttaggagaggtggtaattacagcctccagtggctgaagccactgaagcctacctcatgcttctctaggaacctgaggggtatgattatttcgctgttactttatactctgacccatgctattgttcacataatgtttcttcaggcacttcataaatttttaatttgtcttaaaagggaagtaattcagaaactccagtgaacaatcagagaaagtatgcttgctttttttttttctgtgtgtctatttcctctgggtataccatctggtatagaagctaggcaaatacagtttctctttctcttattaaatggaaataaaatatgccatcatcagaaattgtctgtgttgcatgctttggcaattgcatgttaaaattgctcttttaaattgccttctgcttctgggtaacccattgtggaactgctttatgattaactgacattttagcagcatctctctcatagggaaggtcaatagttcagagtgtccagaacataatacatttatgcagttgggaaaactactctctactcttatattgaagttcaatgctcttggcaattttcagtgaaacagttagatctatgaagcagtgaaaaggagagtgtcttattttaaaagtaagcatttactaaaaatgcattttttttcttgtcccaaatccaaaatggaaggaaaaacaaaacaaaataatactcaggcatataccagaaaccacaaagtgagaagttaaattttagcctttagtctatagcatcatcagcaaaatggtaccatatattgatttttgctatggtttaagatagttatcaatcacaaagactagtaaccgctaacactcagcctagaggttgaaacaaaataaacaactcttctaagagttggttcggtttcacaatgtaaggatgacttactatttgatttaaattgttggcttatatcaatgcttgctttaaatttttttgaaatgtatgagcttcttatatatgatctttatatggctttgtattgtttttgagcaagaaatttaaaaggcaatgctattattattattgaaataaaaaacaaactaaaggtaaaaagccacaggaaaagtaatggaagcagttcttcaattttcttgggaatgtaagaataaaatttcattttagatttcctttttgtgagtaataacctaatttttggtttttagattctgtagagaatacttctgtttgaaaaatatttattcagaaaaaaacttctgttggcttctttctttgttaacagtaccgtgttaattaataggtcttcaaagttatacaaccaatgcctcacacttaagctcctagaagtcactagggaccagacctataaacagaataaatgcaaagtgaaatgaataaaatgagagcaaactgcatgtttttacctcctcgtaaacattaatgatatttttgggtttctgaaaatagatgggttcaggtggatcactggctaactctaggcttgtggtagaactgaggctggcaggtgagctgcagctaagtctaacatgatctacctctaatggataatgtataggtagtcaacacctatacattctgctaattttcaggtagactgcaaatttgagagaaaccatggttactatttcatcaggaatgtctactaatcttgctctgttattagaaaagaaagagaatatattatggataataacataatctaacatgattacctagttgtttgtatgatacagactgacattactagatttgtttgtaaaaggatcatcccatctctggaagctaaggaaggactagaagcagagagatcatgaaaacatgcatatagatagatagatagatagatagatagatagatagatagatagatagatagatgtcttctctacagcatctttctcatttcaaatcagaaacaggaaatccataaattcctggaaaatattatcattcataataatcaggaaggttacttttataaggggattttaaagatatgttataagtgaataactttattgtttgaattacttttcttattcaaatatgtgaattgtccaatattaatacacatgaaaaaaatggtataatacattatattagaggggaaaatcatgagagattggagataaattcaagagctactgtgtatttgatgagatgtttaattatttcacaaattttagtgagggcccaagttgtacacatcgccacacgcaggactgcagaagataaaacattgagaagacaacattcctgctcttaaggaattgacaggctagtgttataaccataataaaaatataataaatgatacaataaaaatataacatacttcagtaatccaaagaagagagggataatatctgaccaaaaataatttttcccaaacactattaatttttctaaacagagttggtttaatgcttccgttgaacaaagccatggccttatccataattccttacttgtgaaataatgcataaaacaatgtctagccagtagtcaccataaggatggtttgccttccctctttcctttctactcagatataggaaatctatatggacagatggaggtattaaaatgaaagatatagttcatattctaatatatatcatcaaagttgtttgtgtttttttaaacctctggggttcatgggaatatagaaatgttattctaaatttctatggaaatggagagacagagacagactgacttataaggtaatcaacacctatacattctgctaatggtctattatgctaggagttcccagcataagagtcatgaaagttgaacaaatatgaaatagccttgcccagtaccttttgggtttcacctcaggagcaggttgtacagttagtcatacatcccaattcaaggcacatttccttataggtggtatcatcagtagcagtgtaattaactttactaatagagttgggttgttttcaccttaaaattgtgtcatctgactgactagttggtgaaagacatttggtaaccagtgttaatgacactgtatttatttattcatagtactttaccacatgctgagtctgttaactgtatcattaagtactctttttattggctttgtttgtttttattgaattttgcataactacaataaatcttcaggtagaaatgatttgaataacagcatcagtctcatgaaatgttctttcccctcaagtcctaggttttttatttgatatcaggaagtagaaatggctttaaaagtaaaatggtatatttataatgtcttaaatgatgataacaccaggagtatatgatgaagaaaatgacctagatagaattttaaagatatagatctaggcatcaaactctaagggatgtgttagtcacaaagacaggttcaagagatctagcctgtgagtttgagacttttctttgatggtgctattggggtcactatgaggtatagacttgctcttgattttctttctctttacctagagaatttacttctgtcttcaattctcacaccctattcatatcttttgttgaattgtgatttcctttctttgttttgaaatatgaaagaaatctctaaatcaggttctgacagatgggtatggataaccatacccatcctaggtattattagcattttgggggagtgttggtcattctgtgcaatttcttgattgaaaaaaatgatatatggatgaatctcattattttcatcatttaatttgactcattactacatggaatcatcagcttaggatctcactttctggtcttcattgtcttcctgcaagatatggccttatcatggctaataattgctggaggataactcttcaatcttctttcctctccaccaacctgaatgtaaactgcagaggggaaaaaaagcatgttcaaaggaaaaagcaaatgagtgaattctaatcccaagtcttcttatttatagtaaactttgtgaactcagtaaaaaatgaacttcaaagggcagaaattcatgccttttatgtcaccctaagcaagatctgtgcaaattcagctgtcactacatatgatatggcctagaaatcattgagtgatgttcattttaattgtctcagccaaatcatctcagtgaagttgagtttaaagaactcatctttcattctttggctatgttattatttcccacttctacatagtccctcaccacaacaaaataataataagcaatcataaaacagtttattattacctgttaattaaattattttaagcagttgctatattctgtcctgttattcaacctacccaaaatttactaaaaaccatatttttgttacatatgaacctataataccttttgctaatacaaggaatatacacacacatatgcatatatatatgtacacactctccttttaagaggaattaattttaaaaatttagataccaccttaaaaattatattagtgaagaatattaaagcagagtcattgttccagagtcctctttcctgcttctccatctctctcctccagctaattttgcatttcatgcatgtgtgtgcattgtgcatgtttggatgttgtgcttttatttggggtggggggcagatactgatttagagttttctttctacaacagccaaatcctttctgtttaggtggataaaatgtgacatgggtgaactagctatccttaagcttgatttctttggagggcccttgctggaagtcccatattctgtaaagactgcatagagcttacgtacccaaattatttttttaaattatgtatatattaaaataatacatcaaatgttgcaactagaatttagaaaaaaactcattattttagaatgtttacaaaactattgtcatttttgtcaatgcactattatttttctctgttcctgggagtattttagttgtaaagtacaaagtatatacagttctatattccgcttattgtaattgccatcatgccaacccatttcctttgtttctacagaacattatcaccatcactttaaatgactgcttaatattctgttggatatatatatatatctgaatgtatgtaaccattcttatgttactgaaagtttggactaactcccgctattggccattgtaaaagccgcagtgaagatcatgaatgtaccttttttccacataactgaaaagttcttgacaaatactattcaactactttttgaaagtattatatcaatgcgctttactgacaccatcaaggccaatcatatggttttagtgcaagtaagtgctttataattaatcaagtccaactcctttattaatcatcattctgggcatttagtctcaatagggaagtgatttgatcaatatcaaacagctattgtaggagaaaaaccaagactatcatttgtattgcatttttaagcttttcttttacatgagtatctcctgtattctagactctgtctaaattactggatattctaagataaaaactctgttctctagctactcaaagtctagagaattatgattacagtagctcacaagtactgagtaattgctgtgtgtcaggcactagtgtaaactcataaatgcaaactgaggctgcctgaatgcatttctgtgttgagctgcccagaatggttagaaggtagacatgcaggttaataattaaaccaataagctgtataatagatgtgcacaaaacatctctaaaatatgagtataatttcatcaagcagtcaatcagtaaaataggtggttatcttaaggtttgagagccagtaaagtctaggttcaaatcttgctgtaatccttactgatgtgcaagtaatttaatgtaatgtttcacttcttcatctataaaataaaaatcaataactgaacctgcccaatttgatacttttgagctatttgggcatgtactaaagctaacaatcaatttattaaatttgcaggaattttgccagctggttgtgaaatgattattttgaaataaatttatatatatttacaagtatattttaaacaaaggaacatgcacttaaacctcctagttattttaatatattataccattatttctattcttgaggttatttatgtttattttatctgtatgttggaaacactatataatgatcctctgatgctcacttattcctaatttttacgctagtggcaacgttagagcactgaaattttaagtgctacaaatgagggtttcttttccctccccactccttcttctttctggatagccacaaacatgtttacaatattaaacatttttccttcacatcaatggagatgactcctgcagagtgcttacttagcacaatgtatgagacataagaagaccatagtaaatattagccattgctacattaaaagtcatttcattaaagatatttttcctctaatattttaaaaactacaaacatgcagaaatctgaaggaattatacagtgaacactcatatgtccaccactataatttacctttgctgtatttgctatactaaatgttgatctacctttacatctttttattcatccatcagttcatcttaattcttaattaatacattaaaatattttatgtaarggaatacattttttaaagaatgaattatttgaatttttattagaatgcttagaataatttgtgttttctaaagatttctctaatgatagtttaagaaaaggactgaaaggagatttcagaaagattagaaggctgctacttcagtctaagcaaaaattgatcagtacttgaaccgaagcagaggagataagaattccaatgaggagacaggtgttgaaagagatttgataggkagaatcagtagaacttggtgacacattggaagtgaattctggcttggaacattaaggtatagggacaggttttaacttgaagggctcaaacattggggaaagttttagaaggcaaatctctgtgcttatttttagaaatgaggcattgggtcaggcagttattttcctgggtttatggttcatagagagggcagacagcaggatatacagatttaagtgtcatcaccatttaattcctcttgcgagattcatgagtatactataatttccttgaattggaaattgaagtaagtttctttcaaccacatttttagaaattatgctcttgtaggaaaaatttcactgtatatgttagtatcttattgcatgaactattctgattactcaagcctccctgctcaagggcagaaactggtaattattttacatagagataacttaaaaatatgtagcagattgttttgtgttcacaagtatttaaatttgttcaatatgtgatttatgaactgtgatcagtttgttgaattgtgatttctgtagctgcattttaattgttccccagaatgggtagctcagagcattatgctaagggcagaatcaaatgtagtttactgttggtttttrtcatccaatcccaggcatacttgcaagtaagctaatgtgtgttgagcatatttctatattcgtccctttattgctctcttacttctcattgtccctcaccctagtggttcctggtgctcatatgctgtatatgcacccttcagatgcctccacaggatgacaggagaaggacctgagcatatggccccatgattagcagtgctggtgtgcccattctttggaatatattgatatacctatagttcgtgtgtgtgagagaatatatatgtatatatgctagatatagaatatatgtcatatacacacgtatgtacacacatatgtacatgttacacacttatatgtacgtgtgtatatgtatgtgcatatcatatacatacatatatatctagtatatatacattgatatgcatatatctatagtgggtgtgtatatatatacacattatatatatacacacacactatatatatatatctacatatcagtattactttgatatcttactacaacatccaattagaacaacttatttttaaaattttttatcaagttctacacttgagtgctttggtaatgagcgaaaataattaccctgattttttaaacccttgagtcagaagcctctgtaggacaaacttaaatatttagactttccaaggattttcagtagcacaggggagataaagcacctatctctctttcagtgaagagaagaaaataaatgtttctaccctttcagattttactggaatgttattataaactaaaaagtaggtcagcaagactgagttgttttattaagaacagcagtacaaatatcatctgaagaagatgactgtacaattgcctattattaaaacaaaggtagggaaaattgttagtgattcattccctaagctgttccagtccttaagtatgatgctaattatcctgggtattaatttgatttctacttttttagctgatctcctttatctcagtgataacatttttataattataattttgtaaataaccagtaagcccatttttaaagctctgcttagtcaaatcagttattagttgtgtagtgaaaagattttcaaaacattctccagagttggttgatcaatcccttattttttaagaagacgagttagaagtgcctcaattatgaaattggctctaagagagtcaaatttggaaatctaagcttttagaaacatatttttgactgaaacatgtatacatatacttgtaataataaagttaaaatggggtaaatgttacctttatcttaaatttaacatcaagaattgatctaatgaagaaattcatccagaatttaaaatattcttctataaaacaatagggcatacttacagccctttaatatacaaatcatcagaagtctctaaataatagagaaatcaatgtctacttcatgcagcacaacagcaaaacagagctgctcccttattacaaacagtacataatagtttaattttcatgggactagtaacgcatttgttatatcgtggtttttagtgaggaatattgtatatgtcttcagttaaaaatatattctcagcttggacaggtggtacttaaagagtctggagtgagaaatggtttggcaggataacaaggcatattacaagtgcctgccttgaaaggtaagaaagagagttagacattttccattactacctactgttaaggtgctcgcattatcccctaaacaacctcatgcttgtggcaataatcatgcactgtcggttttttgtactaatatgaaagtgcggttcaatctttttgacaaatactgcatcatttctggcttggtgaatttttgtcactcaaacctagttgatgtgtaagtaggttgtgacatgctggctgaaatgactttggatccactgtattgaagaaagtaaaattttacttgaagtgtttcttctttccatttctcactcttctctctactccacctagacctcactccttccctgagtttagattcatcctacttcctttgtaaggtacatcattatacattatatgggagaattatcttatagtgaaactgaaggaagcttttcatggaaatgtgtaattcgtttattattttctaaactgtgtatttgcacgtgtatccatatgcatcactgcacaatctaagtgttaacagtttttttttttttgctttcttactagggcttatgtctaaaaatgctagtttgcaatatctataacactagcattttaaagtcattcataatctgtcaattgatatgaaatataaacattctgcctttttactttcattattttagtgataaattttgtactgcttaaatgttctctgcaagtctgtgtggtttggaaggaattgtcgttttaatttcttcttctttagtgacaacatgtgcatctattatggaaaaaaatgaaaggtaacaacagttgttaatttaagagatgaccatgaattctcagtgctagctcccaaggtggcactcctaagaaagaggtcatttctcaagtaaataatatgccaggtaagatctgtttgcattttaaataaagtgattgatttaggaaatattacctttagaaagtgcaagttcaaatgaatagttttctttaaccccccaaataagattataaaggaattacccatgtcatgagttttttgttgttcttgttgttttaatcattgtctcctagtaaagtaggctttgctgagtaaaaacatagaaatagacttatctattgatggataagtataatggataggtataaattaagcgtagatgtagagacaaagatgtagctatcttccctgtcacttatttgtggcctgcaggggagttttaactcatccccaacactcgggctcccacaggcagtattcaggatctgccttggtctgttttgtggtgtttgtttcatgaagtttcttattaggctttgtgttattcaaaattaaaattttacatacgatagtccaactaataatttaggaaatcatattgccattattaaaacttgctcacagtctaatttaaataaaatctgagtaaaaacaaaaggaagatgcctactataatttgaagatattcattcactaacgtttcaacatttattttgtcaccattaatttattttgtttttcaaataaaaagtaaactgtattatcccatatagttctggaaagtgcctggtgtttatcataaaattatatatattatttgtctccattgtaatagtggccttaaaataatacacacacacacacacacacacacacacacacacacattaaaaaaataacatatttaagtgggaattggaaagaaatgcttaacaataacaagatggttttataaattatgttatgtctatgtattaagcattttttagccattaaagttatttgtgtaacgtcttaatccaataatgaacataatacaatgttaaatgagagaatcaaggtatgatgaaataacaataaaaaataccctatgtgatacttgtggagatcaggaaataattgtatgggtaattttctcatctattaactttatttcaagtcatttcattggtaaaaataaatacttttaaaagagaaaatttaccagaaagaaaataaagagattgatctatagcaataagcatgaatttaactaacacatggcttacttaagcttctttgttttttttcttttaaaaataggtttttctaacttaggcttgggtctgtttattttttattgtatatgttaaaatatacaatgtgttttgacatacatgtagatgctgaaataattactatagttaaacaaatttacatatagctcaccttccatagttatccttttgtagggtgtcagagcacctgaaatctactctttttgcagtgctttcagtttacaataggatattattaactatagtcttcatgctgtacatttttgtctgtctacttaatgttcctaacctgactgcaaatgtatagcctgtaaccgattctccagatattctccccctccctgctctctgtttctcatttgacttcaagaaaaaaagattccacatttaagtgaggtcacagtattttctgcctgtgtctggcttatttcacttagcatagtgtcctccaggtttacccacgatgtcacaaatgtcaggattgccttttttagggaagaattatgtagatatatgtcacaatttctttatccatttatccactgatgggcatttagcttgttttcatatcttggctattgtgaataatgctgtagtgcagcggtccccaaccttattggcaccagggaccagtttcatggaagacagtatttccatggactgaggaggtggcaggggatggtttcagggtgcaacgctgctacctcagatcatcaggcattagttagattctcataaggagcacacaacctatttaaaacattatgcacagttcacaatagggtttacgctcccatgagaatctaatgccgccacttatatggcaggaggtggtgctcgggtggtgattctcccttgccttccgctcacctcctgctgtgcaacccagtttctaacaggctgtggaccagtaccagtgtgtcactaggggtttggggacctctgctgtagtgaacatgggagtacagatatctccacaaggtgccaattgctgagtcatatgatagttatccttttcattttttgtagcacctcaatgctgtttttataatggttgttcaactttcatttccacctgcaaaagagaacaagggttccttttctctaccacctcaccaacacttagggctgtttatattttgagcaaagtcctttttcactttcatttcaatcaaaatgcaagaaagaattaaattgagctgccgcttatttgggagatgtcacaagatttacttcctaagagtttgtgagaagaacacattttctggcatttgctgttgatccagaagcattttcattgcagtgactttgtttggagattttaacttctaagtactactcttattttgctctgcttttaggataatgttttaaataagatttttaaagtttctcaaaactgaaaacattttacctcagagtagaactcagttaaatttttatttaaaagtaggtttttggtaacagtaaatgttttgacaagtttttacttaatggttaataaaatgctactaggtcaggtgcaggaagtaaaattagtcctaaattgaatttgaggaaggcatgtaagtagaagtaatattaagaaggtgaatcatcagttgtatgatagaactgttactaataaatacaacatgtggtaattgcaagaattaagttcatgaaatgtctattcaactttacaatcttgccctactagagtatttagtcatagggaaccttactgtggttggactctgcctggcaatgcagtttaacttaaaattatctaggaattatttttataggaaattttgctaaaatccacctagttatatgaagtatattactcttgagtagcaaccaagtaactcaaactgtaatttaaccctgttaatggagggaagtaatatggaaatactaaaattgacattttacaaagttgatcccagtatatctcagatgaaaaaaactagaataatatataagaaaacaattttatacattccttttgttcaatttagaaataagtcattacagatatcttgcatggcaaatattaatgcaattaacttttttaacttctgagattatttttaatttaaacttgtatgtttaagatttattttgtttgtttagagtgcttgccagcaaacgctgtgttaatgtaatcttaactattaaaattggattttttttctggctgtgtacatatttctgtcattttgctttctcatcaaccagttaaaatatttttttttctgttcatgtgagtttttcatttatatttatgtataaggcacagcacaggctgtgtttcaagtaaaatattggactgattttgagggagttttttttgtttctatcatttttagtctttttgaggaagttgaatatttttccagaagtgctatactttattcctagtactttccagatgatattgataactccaggaacactaggaaacagaaaacgtaatatcaatgttaattttatagaatataaaatgttattcaactggcctttattttatttacatatttacatagggatatatgtgtaatttacatcattcctaatttcaagaataattctaagttatttactaaagcacaaaaagatttaacagaagaatactaagttgataagtaattttgggaaaaatagtgatactaaaggtaaaataaatgaacttgggggataatgagagtaaacaaaaatttatgtttatagagttttgttactagaggagagtcttatgttattagaagacaccatagatttgatgctaaatgtactagtaataaaagcaaaatctgtatcaattactacagtatttattatttataatatagcagctaatgcttaccagccactcataacattctaaaaactttgtccagcatttgatacgattatcttatttaattattgcaatgaccctgaggagtcctgatgtwgttatattttacatttgcagaaacagaatctcaaagaagttaagtgcctttcctgagatcacacagctattagctggttgagctgggaagtctgagtccaaaatctatgctcttattcacagaataaacatttttaaggggataaaatattaataaatcagaaaagcataccttgtcttaattctaaagataagaaaaaaaaattttctgttgggattatgcttggttcaaggataaagtggagcctatctaggggaatgtccgtaatgcataaccttcaggcaatccttgtgaatatctctttgctctttgttgttaccaaattattttgtcttaaggctatgagaaaattgactttctaaaagctgtgtctccgatgaacagttaatactaaagccaaggggaagacgtactggtcagaattatagtaactttatccttacatatatctagaagaaatactcttgtaactgagagctaaatctagaaattcttctgtcatgcagaattttgataaatgtccaatgctatttttagttttaaatgttttttacgtatatgttttatttttgtatcatctttcacttaactattgaactacagttgttctgtgatataaactcttacaaacaatatagatttggctttagtttcattaatttttcataaatgcttgagtattcatagtaccttatgaatttatgataaatttattacagatttattcaggcagagacatatttgaaaatttgtaatgaggaaaaaaaatcatcttatgaacagctccataattttactttcctaattgtgtgtaccttttgggtctattttatatttatttaagtttatattggtatttatatattcatataaatacttattacatatttatataggaataatgcgaagccatggttaacttcataatccagggatgcaggcttaccaaaagactgagacctcatcataggatagaatgattttccttctcacaatataaaaagtaaagaaaaataaattaaccaaaacctctctcatgcaaaaagaaaacattattaacttttggtgaaattcagacatctcttcctgtgtgcatactgtatgtaaagaggaaaaaggggaagaattaatggttggataaaataaatgtacacaatatactttatatgtattacttcctaataaaaattatttcttttttatataacaaaattggaaactaaggtaaaactgaaataattactgttgattagggaaaactttcccatcacatgtgtttctgtcatttcttttgtttctcccttgatttargttttttttaatgcggtaggccaaagtcttaggtgatttgatattagttttagcataatttgcacacatagaattcacagaagatataatttcatgcaaacatgtaaactttcaactgtaaaatttgtatgaaggactgttatgtttgctatgatatggggagaccatttagtcaatgaggtctttgtacttccattgtgataatttagatagcttttattttctgaaatgtgtttgaaaatgtggaaaatattttaatatttccctggtttttttggctttcatgctaatatatacatacattctaatgtatattatattccatataatgtatattttctgccatttttcaagtgttcttttcccctggcctttcttctaccctccaataatttattaaatgtttttaatctccccccccagcctgtaatttagttttgtgcattttaaagcagtattggttatatgcacttcagcaaaccagtttatgccagctaaagattgaaaaggagaaattaatttaagatttagttctgtgttttttaaaacctttttaaagatgaagatattgatcttgtattactagtattgaagcaaactcatattgtttagttccttatcataagttagaggcgttggagggttaaagttttaccaaagtaaatcataatagaactggacaatttaatagtgatgtcatatacaaaagctcaattaataatcctatacaaccagtaggtgaagattttattttattaataaagcatctgaaaatgagcctagggtcataacttttaagaactaggattatagggtcatgctttattcatgaatagtagacatgctttctctatagtgagctaagctatacttctgaacttgaatgattgtctcagtgttacctttatctcagattcatcattcatattccttttgaaatatctttatcttggtatagatatttatgtgtaaacacaatagttgctatgtaatagtttctgtttagccattaattggagatacgtaattagagttggtgctggggtatcttctagaagaaaatgagaaggagtgagggatttgggtgtgtcaaaggaagataatggagaggacttgaaagaattcttctaaaatgagaattcttactatgcatgtccatgaattgtatttaggccataggagaacttgtacaagaaaataaaatatgtcccacttcactactctctaatttagcatttcctttaattgcaaatagtccacaaactacaatagtgttagtagcaacaatgacttcatctccaacaaacattgcagatattcttatatcacattacagatgtttcagatagcttggaatatgatttattgttcactactttgaaattacaatatttattagacttccctctattaaatgcgttggtaaagtaatatagttatgtattatagtttctgttggaattctctgcattttattttaagcattttttaaccttattctcacaaacggactaagcttcagtagactgccaaagggatccatagcataaaaaatataaaaccctagctctaagaagtaagctaattcagctttttattaacctttattctattccaaatgtgataacatttctccattttatctgccaccatgcataaagttataagggaaattgcaaaatatttttctaccaagctacctattttatattcagattattttagtattaagttcatcttgtaacatgttttaggctttggaagattagccttaatgtttttatttgtcaatataaatttatattaaaatacatattattaatacttatttctaacatattatttattattttcagtgcactgtgctaaggattcacctccattattgcattcaattcagcaacctcatgagcttaggtttaatcatgcatttgtatttttatagaataaatctacccaagagaatggggaaaatgaaaaattgttaactaatttaagcccatcccagtccaaaaccagtcgaaacatctcaatgaagtaaaggtagaatgataactgcatttacaaatatttcttggtaggaaaaaagtattttattctaataaatagaaacatgttaagcataatgttattcatattaataatgaatattaaacattaacattaagtattatatataaaacattaacatattaaacataaataagtagaaagttaggtttcattttgatcttaataatttaagagtaacaactggcacagtgttcaaataagtagcacctagaattgtgctaatcacatagaaaaacagaaaacccgaaggcacaaaagcctatcagtgttgatgtccacattgctgttttccaagtatttgactaccgtctctgagcaagattctctacagatcttatcaatatttgtagcttcctgcaatttgttttactactcaaagtttacgattaatggacctctccctaatagatttaactaagtatgtctgctctttctttcattaattgagcacatgaagtatgtgactcattcttaagttgaaatactgccttcagcaaggatttgacaatcaattcaatcaattatttctaaatatatttggatttattgctttcatctcaggctctttctgtatatatgaaaagtgttaagacagttttaaggagtgcatgagctatacccacattctggctttcccaacacatgcagacatgggaaggcccaaaaagaggtcagtgtcctctcattttctctttcatgcacaaatgtataaacacacgcaaagacacagaggacaaaacaagataaaatggagtaaatttagattttaaaaaatgtaagattcagttcactggtagctgtattatatatcatacatttttagcaacacatgtaagatttatgtcttgaataatataaaaaaaggttcatctgcttgtaaaatgtaagtcttatagttcaacataatagataaacatcaaaactagtatcctcattaggttgtataatggtatattgccacttactgttatttaaatgtcatccccatttcctttttgtagtgctgatgttaaccttgtaagctctaaattgtctggaagttaatggtctgttatatgagtttcatagttcttagtgaaagaatattagattatattatgcagtttgaaatgtaacttgatctctacctcataatcataagtaatgacatagtcttggttgaaattagggacgtttgctttttctgctgatgctgtccatagtataaatgataatttttatttttttgttttaaattgacaaatatgtttatttgtccattcattacacccaagtttatgagggttagaaaagagaacaaatataagcatataagagtacagtgtacttcttgaaaatcaaactttgaaatttatcttattaaagttggtaaattcagaagcattatattctgtcagcacccacatatacccttgtctggctttgagagagttttatttttttaattttataagagttaaatttgaattggagctaatgtaactgacaagagggaaatagaagcaattggcttgcactaaacaagtttgaatggttgttaatgtgaatgactttcaggcagtgaatgtcagagaacagtagattactttctttacctcgggcattttaaaccatctcctgtggtaggattaacataatttctctctctctttcttgaatctaggaagcaaagtaattggagtctggtaattttggcctgtgggtgatgaagataaatcataacaagctatggaatacacattgacaattcacatagggctactagaacatgaactttcagtaatgcattaaacaaatattgtttctttctgatttatattcaagaaagccacagaactgttaattatgaatgcagttatcgtttgttatttttgactaaattcacatgcaaaacaaattgtttcaaaatataagctattgtgttcttaaacatgggctaagaagttgtatcttttatatgattttgagtgatcatatttgtttaaccgaaattatttgagattttaaaagaatagaggtggaagagaatacaagaccatctggtctagcccctctccttaaggcttataaatgtatacatcatcttgagcagatggaggtgtactcacctaaaattttatacaaatataggttctacagttccattcaatatcttattcttgaatttggtcactaaagcattaaaggatcctattttatattcagattattttagtattaagttcatcttgtaacatgttttaggctttggaagattagccttaatgtttttatttgtcaatataaatttatattaaaatacatattattaatacttatttctaacatattatttattatttgcagtgcactgtgctaaggattcacctccattattacattcaatttagcaacctcatgagcttaggttttgttgtctccattacagatttaggaaagcaagagtaaggaaagttaagtaatgtggccaagcacatggctaatgaaaagagttgctataacttaaatttctggactaaactttttcctactgatctacctcctcagtgttaagagtgcaaactccttctctcttasggcaaaatttctgtcactttgttgttcatccactttgtatcatcttatagtcctcttttctcagctaatgggagtatatctcgtgtttttgaaacttttgttcattatcatccataccagccattttagaatttgtttcctaatgtcttctgatgaaatttttaataccacaaatatgctgtgtatctgtttatgtatgtgtataaaaagagtagtattttttgtcccctctaagaatcagtttcccccttggtactgatattgctcccttttagaatgaatgtagttatcactattactgtacatttttgattgcataagtacataattatttttacttaatatgaaatgttaatttgttagagtatgaaaatattaaaatatcaacagtaattgtcctctttttaagttacgtgagctttccaatgccctgaaatgagaataattttgaagaagaatatagatatcaagatataaatgaagtttaattcttttataacaatatgtaatttgtgctactaaagaaacctcaggatgtaagtaaacataatcctgcccattttacctgtttttagaccttttgctaaattttttgtttatccaaatatatgccatcttaccataaatctgtattcctctctgttttgacatcacaatctattgccatggaagtgattgatagcttacatttatcttcatgtcttcagagcaggttcataaggagactgtctggaagaaatagactttattggtaccagcacaagcagacttttagaggtcctgtacaagtttacgtccatctgtattttttttttaaatacaagagttgcaaattggtactttagaaagtgtgaagactttgcttttcattctgtaatttccattcaaaaaccatatttgattatgattctttctaaaatattcaaataatgggttttccacaactttcatactttaaatataaaatgagcttacaacccgtgagtaggaaactgtggtaatggaacatattcagctttatcatgttatgcagaaatacagcagttaggaatgaaacctcattgataggttcttttactgggaaataaaccagaaggtgatgaaaatcacttggcatttttatatgtagtttgtagaaagttcctagtctggggctttgatctacttcattggatcaaaaacataataaattgaatcttgaaacttgctatatccttttggaattacacctaatattgaattattcatgtagatgaaactgatcatttaggtttcagaatttctttttttctgtaatggttccagttcttttttgcatgaagttttttgttgttgttgttttatactgaattttacaacccttcagatataaaagaggcatttctgtactgtctcttgtcactcaaaactaattttgatttcattgactaccccatatatgttcagaaactaaaataatttcaatatagtcaattaattaagtgaaggatttttgacccctacaatgattttgatctgtattagtcttgaggaggtaagaacttcaaaaattattacctgtgagggagcccatgacaaccatcacattttcatgtacatacagaaaagaatgatactgtatataggagtaaagtagaggaattaaacaagcttcctattcaaatgaagattttttaaaaagctataactattaactgtttgatgaaggttttgaaaggaaacgtgaagtggccactgtgcagatatggtttgagtgacttaacgggtcaagtatttgacaacagtaatgcttcctgtggtttttatatgaaggaaaaaatgaaaaataggaaacagaaaccagaagtttatgtaaacctacataaattaactcttaaatgatttattttattttgaagtgtctgtgtattgtggatgaaccaaacgttcagactttcttccagtgctcttggccctcctctattaaatgtgtgtcttgttccctttccagcgtacatacagctcagtcagtaggaactagacagagaagctgttcacttaaaaagttgtcatttccttatagatactttcttttctttattattatactttaagttctagggtacatgtgcacaacgcgcaggtttgttacatatgtatacatgtgccatgttggtgttctgcacccattaactcrtcatttacattaggtatttctcctaatgccttcactcccccctgcccccaccccacgacaggccccagtgtgtgatgttcctctccctgtgtccaagtgttctcattgttcgattcccacctatgagtgagaacttgcagcgtttggttttctgtccttgtgatgtagaaagctgaaactggatcccttccttacaccttatacaaaaattaattcaagatggattaaagacttaaatgttagacctaaaaccataaaaaccctaggagaaaacctaggcaataccattcaggacataggcatgggcaaggacttcatgtctaaaacaccaaaagcaatggcaacaaaagccaaaattgacaaatgggatctaattaaactaaagagcttctgcacagctaaagaaactaccatcaaagtgaacaggcaacccacagaatgggagaaaatttttgcaatstacccatctgacaaagggmtaatatccagaatctacaaagaacttaaacagatttacaagaaaaaatcaaccccatcaaaaagtgggtgaaggatatgaacagacgcttctcaaaagaagacatttatgcagccagtagacacatgaaaaaatgttcatcatcactggccatcagagaaatgcaaatcaaaaccaaaatgagataccatctcacaccagttagaatggcaatccttatagatactttaaatattatttttcttgagtatttatatttaatgcaactggaaaagaaataaacttagaaatttaaatgactgtggaatgtttttaaccattcacaagctgtataataatccataataatccaaaacaaatatcaagtcactttagttttagagaaatgttattctttataggtttgtggtttatttagtcaactgtgatgtgcttcataatactgatataaatatatgtttaaaaagatagttaaaaataatctcatgtatatgttttaagaaatgagataatcctgagagtcttaaagtatctttcccatttaagaaaaaagtagaagcaagtattaaaaggatgcagtagtgttgaaagacagtttatgaaaaatcaatagcctatgctcagacatgaaagcttattaattctctagtggagtctggaacaacttcctgtgatcagacacattagtctccctgaagcaaaagcaagagggattattaaatactataaactgcctcatcatagttcagaatttgaataaacttttggttttcagagcttttattcctgatgttggacaaatcatgatggatctgtagtaattcatttgcattcttacgataagttattattatacccattttaaaggcatagaaacygaaagaaaaaggagttgggtaacttcttttgggtcacacagttattaaaaggactcaggcagtctgactttacaaatcgtgttcttaaacatgatgctatactgccagtgtgacagacatgcatgtatatatacatacasacacatgtataaataagcatttagaactatttagaagtggatcccaaaacttctatacatttatataattgctttaaataaaggttattttcttaaataacgattgtatattcctctcatctttttgttgccagtatgatatggtttggctctgtgtcctcactgaaatctcattgtgaattgtaatcccctcatgtaggaggaagggcctggtgggagttgattgaatcatgggggtggacttccccattgctgttcttgtgatagtaagttcttacaagatctggttgcttgtaagcacatggcacttccaccttcactgtctctctctctctcttgctccaccatggttaaatgtgcttacttccccttcaccttctgccatgattataagtttcctgaggcctccaagccatgcttcctgttaagcctatgcaactgtgagtccattaaacctctttccttgattaaattactgagtctcaggtagttctttatagcaatgtgagaatggacaaatacctagtatgtattatgctttttattctccagattattatcaaagcttgtatttaggtggatatttaagaaattccatattttttgtttttatttcaggtctaatttataaaatattagcttatattgggaatttcaactttatgacatatagtttaaagaatacatagatgaccaaacacaaacactcatggtaaatcatgagaaaaaaatgtagtcaaaactataaaatttaagttgtaagaaacttgcaataattgctacatcagcacagaacttacgtttcttaaacttggtgtttgtaccctggaatggataggtggacagcagaattatgtttactggtgttcaccacataagttaggaatgcttcccaatatttttattactgatcttgcactttttaatttatccaaacttttgtgactctttggagcaatgactgataccacatttgaaccaggtatatactagagcttgaaacatctcataacactagaaaataaggaaggtatcaaagcttactaaagttctgtcacaagaattgaggagccagcttgaaatcactaccactagccagtctgaggtaaaataaaaagattgaaacaaaggaagtaactgtaatggactgaatcacataaaatatattttaaaattcttaatattaggttggtgcaaaagtaattgcaggttttgccattaatttcaatggcaaaacctgcagttacttttacaccaatctatagattataaaattgatatcgctgataatctttggatgatagtaggaaaccaacatattctgaaacctatagggaaagaaatatttaacacgcctttcctaaattaaccgtaactcaagataactaaatagctgaagagtgaagcctccctgtatttattccaactaatgaataaagacaaaatggtagaattataatatttccactgtgcaaaacttaataaaatggatttaggtgatgattttaatggctgttaatattccaaaaaatggagcactgaatattctgagcctcctaatagaagtatacgacacctacgaaatatttttgccaaaaatattcaagtctgaatcttatcaaacttctagtataactaccagtttacaggatattctgggcactgagagatgtgtgaataatactaagcaaagaaatctagaatgtaggactttctattatataatgtataaatattgctaggatgtactaatactctagtactaatattcaggtttctttaatcacccaagtgctgtgtgagaatgggagaggagagaaaggacttacagattaaagagacttaaaaggcttatcaaccaaaacacaatgtgtggacattattcagatccaaatttgaacaaatcaactaatatagttaatgaatctaggtacatgtgggtttgttacattcttctatctacttttctgtatgtttaatattttccaaagtaaacataaaaatggaatataggtttgtacctctacctgtattttcatctttcatcactatgtaagtaacaaattatgagaatttataaaagctggaaattgggttatcattttcattatttttgaaattatctgtaattgcattttatttcctctttgatgaagtaattccttaggcgagccattaaaaaaaatctcccattggttttgactgttgtattacatgtgatcaaaaatgaggtagtgtaatttgtgcgtttttgaaaatttttagtcctcactatccaggttaatgttgatttttttgttgttgtttacaaagatatatagactattaaagaagaaatttttatctaaaatatggtagtttaccatcattaaaccttctttgtcattatattgctaaagtcagcgagatcattttaggtcgcagtgatttttttacagatactaatggctgacaccaataaaactgaattttgctcaatttttttcctaatttttttgctattgccattctgatgctatatgcttcagtagagattcatatttgttatgccttcattatgaattggattttctcttttgtcaatatacaaattctcaattttaattattaatatatatcaattatttattaacagataagatgtgacatgcaactgagatcactacattattcataacaattatgactcttaatgttaagtcttaggaaataaacctgtcttagctttttctatccttcttctttaatttttctgtcacaatcatggcctgctctaatcagaaatcaattcttagctaaagaatacatgcttctgaattcctaagcttccatcattattattgacagtatttgtggagttttacttttttcttgggaccatggagagtgaagcacattttgataaatggaggtcygaactatacctttatactggatagtataaaagcctttttagctattttaatatttcaggggaaaagaccattttgtcttgggaaaattgaatgaacgaattttccataaaatgaaatgattaacaaaatcttgcygaatttcatgtttttatttagcaggtattgtatctaaaacgttgtcattgtctgtcagaacagtgttataatgcctttatcttaaattctttataaactagctgattcttgaaggggagggcagtatatttgcttacattcattgttaatttgaaagatggatttcaaactgtagagctgccgtgaaaaatataatgctaattgtagtttgaaaagcccagacaccttctgatagtacagttttacacccaagtaatttaaatcaaaatctggaaaacacttttttttcttttgatagcatatatgtaatatgccttaattaataggaaaatccacatgctggagaatggtgaacatgattaaatagattaaattacttttcttatactatgcattaatagctttctcaaccatgtcccagcggctgcagcacattgtgctataccttactgaggaaatcgcctgatttttttttttaatcagtcttcactatcttgccattttttaccattatcattctaacttagtgaaatcctggttttctcaagtgtctagtctttctttgattttgatttcacatatcatacacatcagttatttatattttatcttgttaatcaactaatttcttcacatattttatttttcttcccaaacacatttttgttcaacttgaaggcaaaaagtatccttggttctggatcattttcctcatggttctcagttgtagagaggtggaagacacatgacaaattctagtttaactggattctgtaatttaaaaaaagaggtgttacagagtcagtcctgcagatgtttgagttccagacccttccaggcaggtcaccaggtactgcctctagacttagatgatgtcccctgataattctgtcactcttcttccgcaagttgctccccctttgtgagtcacatcatataaatgatattattttaatactttctctgtcacgatctgtccactctaagcagaccttatttatttttaatcacccttttgccacgtgggtctgctttttctcattccttttcactttatcaccgtcttaggggacttaactagccaaatggataacccatttccttgtttttctgtttccatgagcacccacacactgctcagaccctttgatttctagcattaaacttatcaattcaacctcttcctcctcactacattgattttttttttttcctacccagcctcattgcaaaacccaattcctcagtctctctaagtttttctcctttccctaccctgtcaggatctgttcttggactatttcaccagtgtactcactccagctagggtgcctctcccctgatatccctcgttttgtcagacttcattgaataaatcccacaatcaatgtgacctgaagtcctgtcactgtgctcattggttctagtagacatctagtttaccatcagtactttggattcatctctttccacttcttatttctgagagcagctggtggctctgacgacgtcccattctttaaaacatctaaccattctcttaactctcagctacaaatcttccctttgattttagtgagaaaaatcaacggcatttaatgttaactccacgattactgtttctttcctcaacaaaacattttttagaatgtcctcccttctaccttcttcctgaccttgtggcacttacatcctatgccttttcagagataatagccccttcctaggtctccttaatctttggtgctctggtctctgcagggaccttttccatcaaacaattcatcttgaaatttttatcttcattaaagcagccacaaatattcatattcttaaatctcatcaagaaaaaaaaaccctttaatttgaccccagtttccctgattatactctattttattttttcttcattagtgaaagtttcaaagaattgcctttttatcattcttgcctctatagtatttactcattaatcatctgttattctgtttccttgatcactccattcaaacttcttttttagaagtttgtaataaccttctagtagttaaatctaattttcctaagataccacgttctctacagtggaagcctttgtgtaacgtaaaagaagcatagatttatagaatctttatttgaatgttacttatatttatgctaccttctgacaaataggtgtgtatatgtgtgtgtgcacacttttttttttaaataactatctgatctgcagttttcatctatgaagaatttatggtctttcctactacttcttacagttgtatgtttaactatgtatgggatctcttaccatttttagtgcctcatatttagtaataatctactaaagagatgtttaaagctatatagataaagattaaggactgtctttaagaatgccttaatttttctccccctttctctcctacccttgacttaattttttgtggcaatatacattcataaagtaaaatctgatagagcaatcatatgggattttaaaaatatagttccaagtacattactaatggacaaaaggaaagctgaaatccataaaatggggtaaaaaaaactcctcctcccttttttgaatttttaaattttttatttatcttgaaattctggtttaatttgcaacagatctagaaattcaagtcaatttaacaaacatttgttgaattcagtaaggcttcacagcctgaaatatcaatcaaaattacttttttttaccttatattcctttaatattttgttttagtcctacaatccccttgtaacatgatatgctatatttgagttattgtcagtaataataactgacattttaaaccataattgtctttgccaaatactatgcatgctaatcaccttacatactttgactaatcttttataaaaacatgaaacccaaaaaagaacattttcatcctcctataatgatgagtaacacagaatgtgtaaataaatttccccaggtcygtagatagagccaggatttgacattaaatctgtctttttcatagcgttgcccttcccttcttcagtagttttatacttagacacttgggacacctcaaggaaaatgcgatatccaggaggaaagggataaacagatgtttatataatattataacagggcacattttcaaagcatgaatagcagtcagctgtttgaaagtgtcaaggaagcagagaagtcttgacagaaggcgtaacatttggaatgcctctaaaaagatgagcagggaaggccggggagggaaatgatggcatattcccgagtgagggaacagtgagttcaaagtgtgggcccttcagggtctgctgaggctagaatgtaggacatataccaatttattaggttttacttgtttgtttcataaacaatggtagagttatatacctcctctcttgaatccagttttgttggaactgttcatttatttagcctattgaccactatgtatttgtgtgagtcaaaaggaataaaatcagaaatgattttatgtgatattaaaagctttaaaaagcaatactaagcccagtgcagtaattatagatctgtgaccccacccccactcttacccctggagttttgagtctggtttactgctatattgattgtagctaaaatcacaaccagatccgctaaacttcttggcattccttttaacccaaattgatactaatgaatgtcttaagactacattgtgcctccagctcatgagcaaacattatgtctgtttcatcatccagtagaatgataagattcatttagggttattgaggaagattctgtaattgtaatgaaatcctggcatgttgtaactctcagaacactgttccccatagtgaacatctacaattagttggaagtaatctcagttctaaaggccttcagcagtgactacctcttctcttacctatcatttgcatgcacataaatccaatgctgatttagtttggcaggaacaaggaggaagagaggagtgatgagagcaatatgaatgggcttccatatatcaaaatagaaagttatattacaaacattatatacagcttccatttattgagaccttaccaagtgctaggttctttaccaagtactctgcatgcagaccttatctattttaattctcacaactaccctgtgatgtatgtattattaagcccattgaaaataaatcaagaaataaccttagcaagattaggtgtcacacagtgactactagattagaactggactatatgcctatctaattccaaagctgtctaatgcatgttagcaacattacattgtgactgcaatataacaactattcaaaagttaaaatatttttaagtcagacaaatctaaaacaccattttagtacatttcaggtttaatatatttattctgttttagaattatcaatattattattatttcattaaccatgatatgccatattttctttattattattattattatactttaagttctagggtacatgtgcacaatgtgcaggtttgttacatatgtatacatgtgccatgttggtgtgctgtacctgttaactggtcatttacattagggctatccctcccccctccccccaccccacgacaggcccccgtgtgtgatgttccccaccctgtgtccaagtatttccgtaaagattttcttattcaatggcagtctacaccattatatcaagcagactgatttggttcatggttctctttgattaaaatgtatcagtcatttatgtaagatatcgtcaatgaattccccttgaaatcatggaaacaggtaattaaattctgtcattttcccaaactttggctttgttcttttcctggaaaggcataatatgatcctagaataaaccaagtctcattcccccaaggctaattaacatgcaaataaattttctatacactagtgtttttactaagtaaatcattgtagctggacatatcatttttaagcagaaattttttttatttttgtattttgataactctaaaatgttttaaaagtttgcaaaggtaagaaatgaaaggctaatgtattctttttgtgcaatcagccagtccttggtttctgctcggattggtatattgaagaaatgctaatagtatatctgtaacctgttaaggaatatcaagtctcttcaggaaaggaataataaaatgctaatgatcagcattaactgtctgaattggaagggattatagaggaacatttctgtccttttcctgtcaaaagaggatcaccttctacaataatcccaacccagccattacttataccttccaaattcatgctgtagtagacattctttgagggaagaagtatatattattattattactatctggaatttcataatgctttgcatagcattttacataatatatgctaagtacatttttcaatgaatattttaaaattccaataatcaggaattctctacctcacaaagcaaccctttttatttttaggcagcatctacctacttaagtaaaatgtattctcctcatccttctggtaccaaatagcaaaactctgattcttctaccatgatggccagcacatactcatcattcaaataagttcatcagtgcccctcttaatatatgacatagacaagtgaacttcacatgctgtggttcaaccaaatatgggctgtgattgtttttcacctccctttttctggtcactaagattatattcttggcagccttatcttagctcaagtttagcagtcaactcaaattcttctgtggtttttttttctccatcacattactatcatacaaatttaccttttaaccttctccacaataagaaagaatctgtacattttaagattactgaaacaggggagaaaatagagcaggcagaaaagcctttgctttattggttggagagaaggaaaggagacacttgtaaacttatattaatcatttttggtccatcagatactttattttgcagagcacttcctcacttctcagtttttattgttttgttttatcctgtgttgttttcgtatgatctattgttgagccagggtatcctcatatgtacttgtgtgatagagttttaaaaacatttgcagcaatctgtggccaaccctcacatcaatgacatgctgctgataggaagaagtctctgtatgagtattgaaaacactgagatttacttattggatgcattttatttatatggtttgattcttatttttaatgattttttttctattttacaattttaagggtaaaaaatgtataaatatttggaaatagctacatccatggaagagagacactgatgaatgagtttgaatatgaaaatctgatggtctatcctgaaagaagaattaaagttttgctatttagtaccaaaggatgattaatagtttttctgaaaccataaaatgctcctggtatcttctaattccaagttaaaaaaactctgtaaaatgttattgtagctatttagctttaagcagattattattttaccagaatatttaaacatttctaaatattgtcatctttattcataaatgtttccaatatctgttcatataatctctgtataaatttcacatactatacagcatgcatttatatatggtaactaataatatttactacttagaacacagttagaaatgaatgcaatattcattttgtacaaagacaatatctcagaagataacaggagagcaaactgaggtagaagaatgagctaattagattggaataagagaaatgttcccactttagttctccagtgtctgttttacagactattcatttatattaaaacatgtttctaagtgaagcaattatatgatacttacagattttgcaaacaagatgtgaaattgttgagtattatacactgctccacagaatgattttaaagtattaattttgtaccttgacatggtgtcttatgtgatatttgcagattagaatgcaaataataaagttttgccaaattggtatgtatatatatataaacagttttaaaacagtatcgtaggctgggcacggtggctcatgcctgtaatcccagcactttgggaggttgaggtgggcggatcacgaggtcaggaaatcaaacatggtgaaaccccatgtctactaaaactacaaaaattagctgggcgtggtggtgtgtgcctgaaatcccagctactcggaaggctgaggcaggagaatcgcttgaacccaggaggcagaggttgcagtgaaccaagatcatgccacagcactccagcctggtgacagagcgagactccatcacaaaacacacacacacacacacacacacacacacacacataaacacacacacacataaacacacacacaaacagtatggtaaaatacaataccaacaagcaacaaattaggtaaagaagtacattggagttttgaattttaaaatcaggtttattgaaatatataaagtaaaattgatcatgttagtataaatgagttttcataaatacagaacatttttattaccccaaaaaatattccttcatgcccctttgtagtcaaatatcaatgtcactagcctttttctctcccatcctgcagtgccactgccagaaagggattgaaccactaaccctggatctgctggaaggccctgatttggcttatctagggaaagggctgcttctagacccttcaaccccacttagctgtctagggtactacacctgacccagatgtaagtgagattgcatttgtacagagaaagatggagctgccatcaaaccaaatggaggaagaagcattttccagaatatagctgctgttccctaagcagagacttggagtcctgggaacatgaagtaatgggtgcccacattatagtaatttgataaaaatcagttaataactttcagtgagatagttaaaaatcattttttaagatagaaatgacttcttaatatgctaactgtaagatacgtatgttgtaagataatagaatacacattatacctaatgtaatagaaaatattcaaggcataaatataatctgaaaaagcttatggttaatttttttagtaagtaatcttttttgatcatttttaactcctcaaaacaatacacttggcactgttgtttttaaatctcaagaataaggactcaattatttcttcaatttgttttcttcatattctgaatttcacctatatatatttattttttcatgggggagtacacaataattcagttttgaaataaattaaaataaactcagatccctttgtaaatgaaggagcattaatgtctttattaaaccacattattgaagcaagattgacatgtaaaagctgtacattttaatatacacaactttatgagtttggacataagaatatactcatgtacccatcaccacaatctataccataaatctctccatcagctccacaagttttctctcaccatctacattattattattattattacgtgtgtgtctgtgtgtgtgtgcgtgtgataggaacacaagaactaccctcttaacaaatttttaaggaacagtagtattacaaattcacctctagctttcttgaaaggcagtgccttttaattgtttatgccttcatttcattaggagtttcttctgtctaaaagcttattctgattgattttcccctaagcagcctaaaacaattgaaaaatcttgttattgtgtagctgttggaaagtcaactttgttttaaacaccacatctgacagttaaaatttactgtcaccacagtattgcccttcctgagagagatttgttgttgatttcctccctaattttgggtcacatggtagagaagcattgaacatatgttattgtgacaaaatccacacatggatatttatgaaactatagaaaccttttgcagttctccagaaacctgtgatgataacattctagttatctttggttatatttttggtgcaatatatgcatttattcagtactattaaatacctactttgtggcaagtataatttaaatactgagaactcagtagtaaacaaagtccttgtcttcacagaattgtatattggagaacaagcactacacaataattatataagaatgccatgtgaattttaagtgctattgaaaaaaacagtgctaggtgagggaatggaaaatgatggcaagatcttgttttgagaaagaagataaagtggtcagaaacatcagtcctctctgaggtgattactgaagtgaaaaagataagaaagaagccatgtgactctctgggggaggaatgttccagcagagtaaacaacatgcattagacctgccatgggcaatatttgatgcagtagggcaaggcaactcgaagtgtgctcaccatgttgatcatttattacaaatatacaacaagatttaaagcaatgtaatgtaatatttgaatacattgaactggcaattgatatgagttgcatgtcttttttatttcattatttggtaagttatttttattgtattttacaaaagtttaggctcacactcaattcagggaaggggcttgtccttcactatagataatctgagaagcatcatgtttgaggaagggaagagggccacctgggtgagttaggaaagagaagaccttggttcacttagctgtggtgggacaatgaggatattctcttctgaatgcaaaaagaatcaagctgggctgctaaaagtgagaatgggatgaaaagtaattaagagaggagatataaaatagagtaaatagttcaaggaagtagagtttcctgactgtggggagcacacacctcaggtttgtagtcaaaaattgaatgtgaactagtcattatagttatacgtttgtcattgttgttaaatccagccactttcagctgttttattacaagtgcagagtaggcagaggataaaatttaactcagatttgggtttctccagcaaaatattaagaggggaaaaaatagctgagagtttataaaaggatgagattagaatgattcacttggaatctaagctggataaagagtgaagtgaggacaggggatggccaatgaaaggccagcagactagaagtgccaatgaggccagtgaatccctgaatgggagcactagagcccatgagctgaaaggtaagggcaataactctgtgaaagggatgcccaaattggtgtttggaaatggtgcaattattggtaatgactggggtggaaaagaagtcatctcattgtggtaatattctaaaacactaatagaaagcctcattttcagacttaatgcaggtcacagtagtattattatagtaccatgttttagatgaaattagttaccaccagaaataaaacattcatgtattatgatatttagcatttcaaatcggataattacaaaggttttcaagtgtttttcttaagtgaatgtatagttcccttccttttctatatatggtgagaggtgaacttctttggagaggaatatgtgggatgagtcaaagtactgggagaatggaaagggtggggagttgctgagttattatattagtgtctgctatcttgtagttcaatgtcaatcttttgctgttgcctttagcctctcttctgcctggaaggtgaaaagaaggcatttatggagagatctacattatagaagagaaaggggagaagtgttataagtttcaggaccaatcaattttagacaaactgttgaatatttcaattcctttaacatggatgaattttgaagagtatttgagaaataagtcaatattttagatcaaaggccataaatatcttagttatattacaataatttgtaattatgtgaagaaacaatgtaccaaattgtctctacttggttttggtttaaaatatagcatgccctatatatgatagtaccaaagctttcttttgtgtgtagaaatgcattttatatgcatgacaccaggatacttagatgataaggcattgcatgaatagaaggacagtcactccttattaaaattaatctttatttttgttgaaatgtaagacttactggtatttttttctttacacattctaattttcttgagtccacttctttatttaaaaaacttcacatttttgctttaaatttttatctgtaagaaatatgtttgcatttggaggagacatgtctgtgaaaacyacacgtgtgtgtgtgtatatatatattatgtatatattttatatatacccatatattttacacacacacacacacatgggagaatttgttttcttaacttccaatggaatgctatacggtgcttccaatgtttgacttgtctagctgaaagctatgatggatttcttcatcctagatgatatgtattccctttacttcattacacttaatctatctgtgcaagatcttatggcctgtggtagactttatactctaccagacagcttatcagtttctttgcaggcctctcaatttgaattttaagtaaaaatgaataaatttgtgttgcttgttgagactttgttctgaaaggcttctgctctctgattctagggtgataactagagaaaggaaggtcatagattgtcatttacaatagctgtattgtatctatgtggtctatgtatatatacacatacatatgcatatacttgacatatgcatatatgtatgtatatgcacatagtgaatatataactaaatgcacatatacattaatgtataatatgtgtttaaggagtaagagaggagagctggttgttgattatcagaaataatttgatatttggaaggaagaaagatttatcttaatttagatggggcaatatattgtaccatctgctgtttaaaaacgaacagtcttataaaattgaaagcaaaaccagaaaataatttaaatattcttctggcttctatatgatgtgaggattgaacacattgctaaattcatcccagtgggtcaaaaagggcagtttgagaaacccaagcccaagaggaaatggaacaattttataaacaaagtaaataaatataaaatgctcttgctatcaaaattgagttaatacatctctagctgctcaaaacagttgctttaacacataatgaagctgtttaaaagatagtcaaaatgctatacctcaggtttgcactcagatcattttttttttatattgcttttgctgttggaggactccatactccaaatctcaacaggattttaggtgaggagttttgttttgtttatgcttttgtttttctttccaagttatatgtgaatgactaaagtattctaaaatctcctcacatatttatgtcttttagaagagcttatttcacaatgttctttgtaacttttatgaaggtaaagatataatgattcgttccgtgttaatctataatatatattttttctagtgtttgttaaaatatattattatttgtcaataatttgtactgaaattttatgtttcttggtcaagactgttcccctgacctttaaggaaatttgtattactatagcagaatacatttttagttatacattttcaaggtttcatttacagtacaataattttgaacactatttaataaaatatcaagcaaaataaaataatccagatcttcctttgtactttagttccatcaagaatcaactcttcctgtgcataaatttttctcaccaatgaagaaatcaagttgtgtttaataggtagtcaaaattcattatgtgtaaaggtgcaagttattaggtttactagaagaaaagagggatacagagatagtcttgaagccatagaaataattctcccttatacatggtactgaacaaagtcttctacttttgtgtaaaagcaaaatactgtagtcctccttcatctttggataatgaatcctccacatttaagggatattagatcattcctaccaataaaaaactatttatttaaaatgaaaactaagcctttgtgtgaatttaaaagtattgtctagtgtgaaaactgaggaaaaattaagtctgaaaagtcaactgcttatatctaccttctttattttgatctggccttttcttctgaaaatgtttatctgtaaaatggacatcctgatgacgacaatgatgatgataattctgagcataaatccagtagttcaaataattcactctttcttgaaaaaaaatttttctataaatttttgggaaattacctacgtacagatcagtagtcaatgtattcaaatcaattttgttgcaagaatcagggaactaaagacactataacaattcaagctagggatggacctggtaaagtagaggtgttgtagacaagctcctgacatttattatgagatatttgactactaaaaagcattccttgaggtatttatttgaaaggtaatgcttcagattaaaggaaaaaattaatgtttatatatttttttaattttcaaaggccacttgtacaaattctcttttacccttataggattttaaatacattctccttaatttgttgatctgactgtaagtaatgccttatgcttagggttattcttcagagtaatgtaaaataacatgttcagctgtcataaatgttattcatgtaggttgccaggtatagaatgaattctaaataatgtgagtgctaaggagtctggaagcaatgttgcaacttgtgtatctggatgcaagataggggtgcaatagcattttatacaggagatgggaaaacatctttctccattgcagaggaggagatggaatgacagtgtctgagtagtccaagagtgttcccagcatttgttggcaccctgctttctggtgtctcaattttctttttaattaatcaacaccagtgatttggattaaaaaaaaaatgttgctagtgaaataaaagcaaaaccttggcactgttaagtatagaattgaaaccaagttattagtatctgacrgcatttagattgggagaagtagaacagagtctattctcatggactcttcagtactgcgtgatttactcagagctcctggatgttgattctgaagtccagatgactcatcagaaactggcaatgaagggcaacctggatttagatatgtttgtacattcagattagtgttagaaagagagaggcagagattgatggagagaaaaggggaaaggagaaaagagatttattgacttcattgactgtaattaaaaggaactctgatcattcaaaagaccttcctcaaagtttcacacttctttgttcatgttaaaacctgtttttgtatctaggttctcagtagggtacctttaagcaaaaagaagagaggagccctttaaactatagtttcatgaaatttcactcattttatattagtgactttgtgtgtgtgacattttattcttaaaatgtctgagatagcttttacctatcgggctctcatcacttcacagatggactattgcagctacttttttaatactgtttttaacattcttgattcctgtactcagaacctgcagaggtttaccactgcttgcaggaagttcaaattcttcatccaatgttctccataatgttgttcgttctccataatgttgttgttctctgtccatctaattttgcctcccactgttttctgaccagatcataaactcctgctagacatattctctttcattcctcgctgtcctctgacttcatgctatttttctctaggctgctttagctcacattattctcccctactctgaactttcactgatagattccactgtgtgtattccttaattgcctatacaccatacttcattttattcacccctcttgggggtgcatagaccttgtcattttcctttgtatgtcccatgtgacttgtttgatgatgagtagtgctgtctgcagagagagcactcaagtgattatagaacatgtccattaagtttcccaaatagaagactctttatctcctattctgccactctgaaaactaaacagaggctgtgaaaggctcagtattgctgatgctgtaaagacaggacacctagttgcttgaagtcccagatgattgatagaaatagtttttgtataaaaaagtgaaattgattagcaaattaaataggaataaagacaagtgagggtgatttaacttaattgaagaagagattagaaaaatcagagctgtttttaaaaaataagaataaaaaaatcagtgtggtgaacacaccaaggagactttcagaggaaggtttagataagtccataggacaataatctttaaggtatagcagaaacattggaccttcttgaataaggaatgaaattgtcacatacataaatcagagttcaagaggattaccccatccttgttgatcagtgctcagtaagccaggttgcacatctattttttcccgttgtgagacaggaaataattaaaaagggaaataatcagatttgtaacttaataatatggtttgtaaaactattttatattcatctggggctggccagaaagccatctctactaggcatgatgaaattattctgaccattctccagtatttatagtgaaaatacatgttcagtatctcttttgtttcataatatctaaacaagaacacgtggattatttccatctttaatttcgggaccaggtatatattagctcttttaaggaagtgtcatgtggcacaggtccaaatacacatccttccttgataataataagtctttatttttataaagctgtatattttgtaagtcaaatatctgtgtctttctaaatatgtgccggatgtttacatttcaaatgggcaagaaaaatacctgatgtgggatataccagttttgtggggtgagcttcatttatttatttatttgtattattacttgccattatttgaaataattcataagagctatataagctcttcctttactgcctggaatgtttcatatgacctactaaattttgcattactgtattattttagctagtgggaacatttagtataattactttggctattctttattagattatgagcctcccattacttctaaaagactatcttggatgctgtttgggttcagtaaataactatgtattactgcaaaggtatactgagatttctattttaagtggtgtctggctagcagccctggacacaaccttccaaaaatttccagtaaattgactatgaagacacacaaagagatatctgttcgtagtatggataatatagactgattgtcgcttactgccagaatttgagaggaattctggaattgttttcctacatttagttacataaaatttcaaaactatagcagttaagataattttctaatggacacttgcgtacccacctcctgtatgttactattaccattttatcctacatgcttatcccccactccattgatggaactagattttcaagtgcaattggtggcttacctatgtacacttttggaaatagagctaagtttgccctaaggcaataagtaaaaagctgcatggctcaaaataaaaggtttctttaaactgggaactggaagctactcatatattgtataaattttgcttttcaaacaaagcaaaccccttctgcaagtacctatctgttttagtatgtattcagaaagtaattaaatgagaaatagggaggaggggacatggttatattttgtcccctgcagagtatagctctcacaagtggaaccctacaagcaaaacagataggaagaggctagggtagtggtttatgcagcagtgtctagttttgtacacattccagcagttctgaacttagtgcactgggctattggagaacaataaggtccacttcagaactgtggaagatccctagaggatagattctggggtttggatagaaaccatgtacgtggactagccatccagctctgagcaatggattcggccattacagaagggcatatgaagtgggccaaagagtgaagaatgcattttctttgttggctatcacccaagttaagtatagctccacccttgtccacaaatacaaaaacagaaagaaataagatagtggttttaaaacaataaaaatacttcagaattatgctacaacagtaaaatcctaatgaaaatacaactgcatctacagtgttttgcagacaggtacctagccaagaattttataccagattaagtaagtcttcacatgagaaggcaacaaaaaggcattttttaaaaagctaaagttgaagaaatatacccttatacaacttcataaaaaaatatttgaatcaaaagtaagagcctaaggatgccattttattaaatgaattatgcatcttcccttacacattccgatcctagatcacgaaaatttagatgggatgtgtgtttgatcagtaaatagcgcagctcagggaagcaccttaatccctatatgtaatgcttttctcagatgttttatttcttcattttttgataccatatgtatttgtctgcctaggatgccataacaaattagtacaaactgggtggcttaaacaccatggttctggaggctgcaagtctgaaatcaaagtgtcaggaggtttggttcctcttaggcctctctccttggcttgcagatggccactttatcactgtgtcctcacagtgttctttcctaagtgtgttcacatcccagatatctctttctcttcttatgggacaccagagatactggaataggaccccaccctaaaaacctcatttaactttaatatctccaaatgaagtcacattcagaggtattaggagttaggttacggcttcaacgtacgaattttggggagacacagttcagctcataacatcttattcattggtatatctgacgacttcttaaaactctaccagatgctattcttttcttgtttttttttattatttttatttttatttttttttattttttgagtacttgatcacaatggccaacctctaaatgtaaacgtgattgtggcattcagggtaaacccagtgcacatctcatagacttagcttcactgttataaatcaacagcatwtggaattagcagcattttgaggctcagagggcatagggatatcctagtgcaggatttagctaagaaggccttgtttctaaaacagagtgaatggagcaaagtgcatgagaatgcagtggagcaggctggccatacacctttcaggctcactccctaggctgaatctcaaccacattgaaaaacagttctgggaatccccaagtttcatatacatgtgataacaaggcaaaagtgaacagacatttctgttgtacaggcagcataaagttgcttagacacaacaactccttatatctaagggagccaaagtgaaaggtggaccatggcacagtggctttaccaaaccaccagggaagagcaccactgctcttgggtccagccctctccttcaaccagtcctccagctggtcaagaaacatagttcaacagtagttcaaggaatagtgagagtggaaaaaaggaaaccccacatattttttgtgagcacacatcaatcatggttagaccttgccttatctaagactaaatagagaagaaaacaaaatgtggtgatatattagggtcctccagagaaatagaactaaattattaggagagtgtgtgtgtgtgtgtgtgtgtgtgtgtgtgtgtgtgattgaatgattaattttaaattggttcacaagattgtgaaagctgataagtctgaaatctgcagggcgtgccggaaattcttgcaatagtggatgttgcaatcttgagtctgaaggcagtctagagtcagatttcttcctctactagggacctttgtctttttctcttaaggccttcaacttattggatgaggttcacccacgttatggagggaaatctgttaactcaaagtctactgattaagtgattgatttgtttatttgttggttggttttaagatagggtcttactctgtcacccaggctggagtgcagtggtacaatcactgcagcctcgacctcttgggctcaagcactccacccacttcagcctctcgaatagctgggactataggtgtgcaccaccatgcctggctaatgttggtattttttgtagagatgggattttgtcacatcgcccaggctggtcttgaacccctgagctcaagtggtcagcctgcctcggcctccctaagtgctgggattacagacatggtgagccactgtgcctggctctgcttaagtgttaatcacatctgcaaaatgccttcactgcacacccagtctaatatttgaccaaaccctgggcaccatagcctagccaagctgaygcataaaactatcacaggtgactataaaatgttctraaatttaagttttgaaaaatacagttatcacaaggcagagtagaacaagatgtttaacaaatctctctagaaaagatcatttttatatcatcagtagaattcaaaaaatacgggctctgagacaagagataagacagaccaaggagcagttcaaactcaggaataatttttaaatatgcgcatgtcctaagaaaagctataaatacataagtatgtttgttttgtattatatagttgcatttgactatggaaatggaaatatatccttcctcacaaatatagtttattgctaattattggtaaatatatttatttgatattgcaataatagtattattagacccacttagggccaataaaagctcataggttgtcaaaactgttttgtcactttggttgcaaggggcagaatttgattcttaaaatattggaattttatattcttattataaatttgggggaaataaaagataaggagttgccataaatatgtgagggcccacaacatcagtgtatttcttgttgtttaaaatctttctttaggctaggtgtagtggctgatgcctgtaatcctagcacgttggaaggcaagacgagaagatcacttgagcccaagagttcgagaacagcctgagcaacatagcgagaccctgtctcaggggaaaaaaaaaaaaaagcctttctttagttattatttcattcagatagctatgaaagtatttttggtttttgcttgcttgtagcttttctgttttctaccacacaaaaaatccaattttaattttgggtttgtgaaatatgttttatcaaaatataagcctgatgtttcttatcttccaaaaaatttaaaaatattagctcagatgtaattttgatcataaatgattaacatgtaaacttaaattgaatgtaaccacttcatatggatatttcaaggtaaaaaatgaaatctaaaatatctgcacactacttttaaaattttgtccataaaaatgagaaataccgattccttatattctcaaatttatttcatcatttatatatgtcatatatgaaaatgtgttctttttgatatttactttagatatcaaaataatacaaattttaaacctgaaataaaccgtagatatccgttgtcaggattatatcttataagtcacatcattctattcatcttgtctaaactaatattgttatatagtatcacacaagaaaaaatcaaactataaattaaatgtcaaatttctgtttgtttttcaacatacagttttaaatagatgttattattctctttctgtataaataccctgagcagaaattgtcagcatgcacgtatcttttttatggtggaatttttgactaatgagtttttgttagaaatgtatcagttctacttcattttatagttgaggtgttcatatgagtcagtctcagtaatttttgagtgactttctgtagaaagttgttctctaactagaatggaagatgctgacacctagatgttcaaatggggctgatggaaaaaaatcaggacaattttgtatcttatatgggcaacaaagcattataaaaggacatgaaggatggtttgtcatatccattagtttttgccgttttatctattagacttgcagtagcatatgtagaacacaggttgtgtatggtgggaataattttgtggaggatattatgagtatgatattcacatgctaaatgaaagtcaagtatgccataaatttaactaatgtcacttatgttttgttcacatagtagtggtgtcatcagcgtaatacaggaaagatttacagtacagcccaacatgactgctgttctctagtgtgggccccggtggggaaagggagaatcagaggaagagactattactgatggcactagttttcatttttaaaacacacagcctgggctgggcgctgtggcttacgcctataagcccagcactttgggaggccgaggcgggcggatcacgaggtcaggagatcaaggccatcctggctaatggtgaaaccccatctctactaaaaatacaaaaaattagccgggcgaggtggcgggtgcctgtagtcccagctactcaggaggctgaggcaggagaatggcatgaacccggcaggcggagtttgcagtgagccaagatcgcgccactgcactccagcctgggtgacagtgagactccatctcaaaaaataaaaattaaaattaaaaaataaaacacacagcctgtaactatttgaccttttgtcttttatagtattttagtgtgcttttatttcattttatttcattttactgagcattttatttcatagctttaggtacaaatgtggaaattttaggagcaaagcagtttgtaattatttgtctcaaaaaattgatttgacctttaaagacatagtttttgtgcatcaatgggactaatttgtttaaatagtttataaacaaactattaaccagtatgatatttttcttaaagagatcagagccaagaacaataacaaaaaagtgatgactcatttttcaactttcaatttatgttacaagacattatcacagcattcattggctctaatttgacattaaataaacacagtgaaaaaacaatctttgaaaagttattcatgctttcgtataaacagagagatggtggtttggagataccccttttaaaactgagcctcgttaatttaaaacaagcacaatgatacaactgtacttgacttgaaggagggcatattgttctgcaggcgtcctaattttacttctggtcagagggacactggaagattttcagccagaactgcagtgagagatgaatttttattatatgctgagatgctcagatgcctggaaacagaaaagagctaattttactgttgaaaagtagttaataggctacctgtttccaaatatgcacctgccatcccccaccactaccatcccaagtagatgcagactagagcattcatagtggtcgttcatccgatgtggctccgcatagatttttattaagtcaggcatggtttgtgtagccctccccgctcctggaactgatcacccatgttttttgctaccagagaagtagtttttcaagcaacacacagcttgtatgtggaagatttccaaagtcacaattgcttctttatcttccagtgactttgaaagaaagccatggcatgaatagaatgctcaaagctctgtccctgcacaatctgtagtcctttatttcagctatgctttttactgcttcttgggaattgatttttctcttcaatgtaccacacccctttcaattctctctccttaaaatggaaaagagaaagaaaatggtgcacaaggtgtctgagaagtagagcaaaaagtagacatgtgtaaatccataaggatatgaaatggatggaaaatataagacacaagacaaacaatactcattcatgcaacaataaattatgtaattctggagtggaggagctagcccagaactttgcaacattcagaccaaatttcttagactataattcagttattcaatttttttttatatcggtacttccttattccttaatgtgtctgttttcagagccttgggtatctaaatcagaggtgaaatctctccgtttctatgccaaaaccattccattttctggtcaaatagtccctgagtgtttaatgtaattgccaaatgaattttcaaaatatgccttggagagttacaataaaacattttcaaggctcacaagtcttacggtgatcaggattagtttgtttaaccagcatttcctaaatgaaaccctttcactcgataatgactatttttatctcactaccttggattaatgtgtagatagtggactgtacagattcaaaagataaaggaaaaaaattttaggacttagtaagagaggaatatagggttaggtgagcaaggcttctagatttctagctcgtaactcagtgggaccattcactgaatgagacactggagtatttttttagggctttcatatatgcccgggcaacaaagtatgtctcgtattcttgatttgaagaaaggcaggctttctgttcattgcaagagttattattgagagcctatcctttgagaaaatataatgtttgcagaaatagatttgatattctagctatgtaaagaaatgaaactttaaaatgtgagatagaaaaattataaccagaataattagaacaaattacattccacatcaaggcaccttactgtttagacttaagcaattatttaatgtctgcagtattgtcatctgaaaacattctatgacttagagaaaatataccatatcataactctaactgtattattctatctttttgccaagcaatacaagcagagtagtacattcagaactggcaagatgattgtctgaatgtgacattatctgatgacactcagaaagcctttaaacataaaagatatagagaaatgcttcattgctttccttggatggcattttttcctttcagcctaagcaagattaatgttctcaactgacatgatgacacatctagctgtgaaatgacaataaagtatatacaaaatgggagtagggacatgcctaataaaatgcaataccttaattttttttctaaatactattagtttgagattgttctgaaggtaatgatgttcaacttgtaaatgtgttgcatatgccattatgtttatacattcgtctgtacacactgtttttattaggagtgatatatcacctcacttttgcttgactcctgtatctcagaaaagtgatggcatttcttattctcttcagttctatttagcagacatttactgagtattctgttgttgttgttgaaggtagtgtgcaatatgtttctaatatgaatgtaacaaaaagaacctgagaatatcaatgaaatttaggtgaatacttaattcctggtgatcaaagctaatgggtgttctaatgaaaaaaagtctagcactatcatggaataacagcagaatctggagcaataaggcaagaaataattttatttttcagacaagccacattattaatgaaaacatgcaccacacatgaataacattggaatattacctctttcttgaatagcagtgatgagatggcctactctgagaggtactgaaaaatcagttgaggagattattgagcttaagtgtgtaataatcagaatgaaaagaaatacatgtagtcagaattacaagccaacttaaacagataattgataaggcaaattgtataatattcaaagcaagaaagaagacctagaatacatcaagatctctatctgtacaaatcgtggttcacataagcagtatgtgcaattagtggaaatatgtcctgatgaaatcaataggcctgtttaggccttacttttcaaaatgggcactagtaacatctttgatagaaagaattcttgttgcagtacattgaagtattggttcatgtcatttctgtgcagcactcatttatcatctgtttcaaatgmatctttttggtacttcatattagcttgtgaacgtacaaaagtatccttcctatcaagtaactctagcattagaaaagaatgactgcctcttgagagttgagtgtatagcttgatttattcatctgcaacagaaaaattccttcaaaagtttttactgtatcttaaaattttgttggaattctgtattctttcttctggcatgttattgtgatttctaccttaactctttagaatccagaggaggttcaccagagttttcttgtggtttctcctttttcctgtgaatacacaagtactctcttttgagaagcacagtattgtgcagattttgctctcaatgaattggtcatgatgtgccaaaatgatgttcactcaaagtgttctgggaatcaagggaagagaattgacggctgtacctgtgtccatttgaagggcaatttggataggagtggttttggtaaaccaatgaggaaaaagaagagggtcttccaagctgaagcacagtgcctatgcttgtataagcagtgaggctgggagggtggggtgagattctaaagaagatggaaagatgactcgagatcaccttgtctgacttgctatgcaaactacagattttgatcctcatgtattacatgtattactgattctttaacattgaaagctactttaaaaaatgaaattagtgtgaaagttcaataaatactttataaagatataattatcttaaaactttataaaatttccttataagccagtaagtgaaagagtattttgataaaagcaaaaactaaacttcattggttttagatgatagcagccatcatatattggccttaacttctcattaatttctacattttgttttggtttcatggtgtctggaaaatccttattagtataaataatacacatcattttaaaagggtatattaatagtttattttgaaatcacaggacagtctcttagtaagctgatccacaggcttgaaagaggaataattggaaattattttaatgctgagtcattaagaaaatttaactgctgcttaccatgcttaccaggcaaagagtttagtttagatggagtacaccaatcattattgaaagataatattttgaagtaatctcagatatgtcaatattctgcttagtcagacattgagtttgtaaatagccatttttcctttagtttgcatgctgcgtctaaaaggcaagttctagtttcatcaaagacactctccctacaggtaacattgtgaccttgcatcaagaaagtgagcttgttcagctacataaaatcctaggtcataagcaggacaagacattgcatcgctgttgtaattgtttaggtataaagctaatacagtgcatatagggtctgtattgggaaaactataaaacactgatgaaagaaataaaaacacaataaatgaagaagagatattctgtgttcatggaatagaagattcaatattgttaagatgtcagttcttcctaacttgatcttaagattcaacaaaatctcaatctaagtcccagtgtctattttgtagataatcaataaaccaattctaaagtttatgtagaaaggcaaaagacctataatagcaaacatagtcgtactgaagaaggaaaacaaaaagttggagtactacagttaaccaatttcaggaataactgttaagctacagtagtcaagataatgtggtattggagaaatactagacatatagatcaatgaaatatatcagaaaacccagaatagacatatacaaatatagtttactgctctgtaacaaagacacaaagatgatccaatgaagaaagtagtgtcttttcaacactgcaaattagcaaaacatcatacccctctaaacctattagaatgactaatatccaccaaaaaaaaaaaatgaaagtaccagttgctaacatggatgtgacacaaacaggaattttcatttattgctagtggcaatgcaagttggtacagttactttgacatttcatacaaaattaagcatagtcttaagatactatccagcaatcacattcttacctaattgattcaaaatcttatttctgggctgagtgccatgggtcacccctataacctcagcactttgggaggccaagatgggagcgttgcttgagcccagaagtttgagaccagcttgggcaatataatgagacactgactctccagatttttttatttaattatccaagtgtggagctgcacacatatggttccagctacctgggaggctgaggtgggaagatcgcttgcacccgggcagttgaggctgcagtgagccatgatcatgccactgcactctagcctaggccacagagggagactccatatcaagaaaaacaaaaacaaaaacacttatttctgcagaaaagcctgcatacaaatatgtataagcagctttatataaaatcaccaaaaactggaagcaacccaaatgccctttggtaggcaaacgaataaagaaatggtggtatatgcacacagtggaatactattcaataataaaaaggaataaaaagaaatgagctgttgcttgtctcactcataaatgaacaatgaaaacacatggacacagggaggggaacatcacacgctggggcctgtcagagagttgggggcaagggaggggagagcattaggacaaatacctaatgcatgcggggcttaaaaacctagatgacgggttgataggtgcagccaaccaccatggtacatgtatacctatgtaacaaacctgcatgttctgcacatgtatcccagaactttaaaaaaaaaaagccttaaaatagcaaaaaaagaaattagctatcactttatacataaacatgcttgagtcttaaatatatattgctcagtgaaaggagtcagtctgaaaacgctaaatattgtatgattcaaataatataactattttttaaaaccccaaaggcgactgggcacagtggctcaggcctgtaatcccagcactttggaaggccgaactgggtggatcatgaggtcaggggttcgagaccagcctggccagcatggtgaaaccctgtctctactaaaaatacaaaaattagccaggtatggtggtgcatccctgtaatcacagctactcaggaggccgaggcagaagaattgcttgaacctgggaggcgggggttgcagtgagccaagattgagctactgcactccagcctaagggacacagcaagacttcatcgaaaaaaaaaaaaaaaaaaaaaaaaaagaaaagcccaaaggcaagtgtattagtctgttcttgcattgctataaagaaacactcaagactgggtaatttataacaaaagaaaggtttaattggctcccagttccacaggctgtactggaagtatagtggcttctgcttttggggaggcctcagaaagtttccaatcatggcagaaggcaaaagggaggcaggtgtcttacatggcaggagcaggagcaggatgggggaagatgctatacacttttaaacaaccagatctcatgagaactcactatcatgaggacagtatcacagggtatggtgctaaactattcctgagaaaccaccaccatgatccaatcccctcccaccaggtcccacctcctacattggggattaccatttaacatgagatttgggtggggacacagattcaagctatatcaccaagtctgaagaattacatgacattttttaaaaggcaaaactatagagacaatgtatgagttaggattgtacagaaaatttgaaacaatagaatgtgtctatttgtagaaagggattaattatagaaagcagctcatgaaattatgtctgctggtaaatccaaaatctgcagtttagcaggtttgagaacaggagagtcaatggtagttctagttagaaggctggcagcctggagactcaggagagctgatggtgcagtttcagttcaaagggcagcaggctcatgactcatggaggagccagtgttgcaaatgaatttttaagggcaaatgttgcagataaaatctgaaggcagtctgctggagaatttcttttttcctcccggaggctggtctttttgtctattcaggtctccagctgattggataaggcctacccacattatggagggcaaaatgattaagcatatattaaatgttaatatcatccacaaacaacttttaagttgacagaaaaaaaaaataataaccatcccagaagataaagggatcagtggttgcctgaggtttgtggaggagaagaggtttgaataggtgaggcactgagagttttttaagggccatgaaacaatgatactgtaattgtggtgtagtggattgactgatgaccccccaaaaggatgtgtccacatcctaattcctagataatgtgattacattacatggcagaaatgtgaatatcaccttatgtaatatctaatgtgttaaacagatatgtttatatgattaaggactaaggacaggtgtgattaagaattaatgaatagggcctctcatggtggctcacgcctgtaatcccagcactttgggaggccgtggtgggtgggtcacctgaggtagatcaggtgtttgagaccagcctggtcaacatggcgaaaccctgtctctactaaaaatacaaaaattagcttgttgtggtggtgcatgcctgtaatcccagctactggggaagctgacacaggagcattgcttgaacctgggaggcggaggttgcagtgagctgagatgttgccactgaacttcagcctgggtgacagactgagactctgtctcaaggaaaaaaaaaaaaaaacaagttttaatgaagggattatttggaactatctaggtgggctctaaaagactacttcagccaggtagtgaaggtcggcatccacagtgataagtcatgttgttagtatacgctcttgctgtggtatgatgtaaatggcactttacctctctggtttccctccccaaaactcatagactcagtttataatcatgaaaaaaaattcagacaaattccaatggagggacattctgcagaatacctaatgactatttcgtattaaaactgttaaggtcctataaacatgggaagtctggtaaactcacagaacttagaagatgaaggagatatgatgtaattaattttcttggttgggaacctggaacagaaagaggacattaagtaaaaactaagtaaatctaaataagtctgaataaaatgagtttagttagtaataatgtaccaatattggttcattaattttgacaaacataccatgttaatgtaaaatgctagtaagaggaaatgctatatggatatatgggaactttgtactatctttggaaatttcctgtaaatgcataactattctaaaaatttatttttacaagagcctgtgtacatgcaggcctgacctttaaaagaaaaaaaaagtacaaatttcctcctaagttgtgtattagtttcctacaactgtttatcaaagaaccacaaactgggtgaattgaaacaacctaagcttgttctatcaaagttctggagaccagaagctcaaaaatcaatgtgtctgcagtgccatgctctctctgaagtttctagggacaatgctcccttgcctttttcagcctctggtgactcctggctttccttagcatttttgggcttccagatgcatcactccaatctctgctttcatcttctcatgttcatctttcctatgtttctgttttctccttttcagattcttaaaaggatattcatcattgaatttagggcccacccaaatctaatatgatcttaagatccttaattacctctgcaaagagccttattccaaataaagttccattctgaagttccaggtgttgacatctgtttcgggacccactattccacccacttacaccatgccatatccataaagtgttcaaccatctgcatgaactgggcaaaagaagccttcagaaaaataatctacagtacaattgagtatattattagtctgccaagtgttagaattttcttaatgattataataataggtaataattattgaactcttactgtatggtattcactgataagcatgctctacatatattctcttttaattttcatactgcggttatccttcatttgtaggtgataaaaccaaagcactgagtagtgaagaaacttgcctaaagtcatacagctggtaaatttcctcccagtgttaacagcatttattgctattaaaactgctaataaaatgtgtatcaaacatttgcagaaattctgaatccttctatggaacctgaggattctactttaaggtttaaagtcatgagagagagaggtttacattgaaagagttttcagctccttggtaagaagttttatcagtctcttttgctgaggggttcttgtgatagaactcaatagtgctttttcaatttataggatttcaggtaagattccacctccgttatccagctatcttctaatatactcttatcttctctattaaatgtttctctctgaaaatgatttaccttcttattcaggcttcctcctcagtagaataaccccaaactcctccccacccctatacatgcacacatgtgctattttatccatttaacttgtgtcttcccccaaagacttaaaaattccttcttaataatgtaaaaacttataaactctgctacaagcatacgtaacatttctcgaggctattaaaaatatctagatgtcaggtaagtgtatatgatgaagtaagtgattcaaatagaacaattaacagatggcagcaacaattatatattcatattcctggccaacagcatttggtagatataattaccttacaggtgttaactgccctttatggaatgagacatctctgaacactagagaaacatggttaacgatggtcacaaatcagtaaaaattctatattgactcatttttttagacaagaatcagaaagctaaattcagtttttggagtatagtgctaagttcagaaaaagtgaaacttaaacaggagagcaggtgtggtgtaatcttcaagttgattgctgggatggggaaaaaaaaaccccgcacattaaaagacatttaaaattcactcaacatttggaaggtacagagtccaaaaaggcaatcatttagggagaaggaagcagctgttttgacttattcctttgagtttctttaaattaccttagtttcatatgcaaaatagtattaacatgcttttttcaaacaaaacttttctgtgcagataagtttgtacttatgtttctttatagcctttagattattatactagaatgaggataaaatataattttaatgttactgtttataatgtttcaatcatttgaccagaaatatttgaaaacctggatagcctcacacacacacacacaaattacatcattcaagtgttgtcattttacttttattttctcctgtgaacagtaaatatttgtcacttccatttaacatttgtatcacttgcagctatctgtccagggaaatattaaatgactatcagtccctactgggagtgatattgtctgattaaaactaaatttcctcccttctgttctacattggagtcatctctaaatctctgaatttaagctgtactcagcactataatttaaggctaatttattttacctttattttttaagttatgttttcaaagtttttgattttgtagttttacatagtaatagttttacaactattttgtaaagctcttgaagttcagcatgcctcttctcaactcttatttattgctgaataatagttattactcaataaatattttgattgattaataaaaacctatttcaaataactattttctaaaattatttttttctcttccaattctgaaggaaaaaaaggtaatatacagaagtgggttgttatggggaaacatgtttattgtgctatagtcctcttttcccctgtaatgaaaagttaggtttttagtagtagaaatgtcattttagtgaaatatgccataattttactttagcgttatattccctataacaattgaaattaagtacatgttgaaatacttccttaaaaaaatttaaactggagtttaagttttgacttctttgtctaagatattctccaacacacctgatgtttcattttcttctttttcttgtgcagttaagaatattatacttttctgcctttatcatgattaatattcaataagtaaagaaatttttccataagcaatacatacataaaatacaaccataaggaaacacttttaatcttccctggtttctggcttatgagtttggtaattccttagcatttaacctttgtcacaaattgccatgtggcagtgtgtatgctgtcwttttgatagatttccagtagtgggattactatattcaaaataaagagcctcaaatagagataaacatttatgtttcatgatactctcgttttagattggaaacattcagaagtttctgaggtgagaattgttaaaagaagaaagctgtcctacatagaatacctttaagaatacaatttttacatattatttgaaacaccaaaattattagtagtaatataatatcaattctaatcatgtctataagaatagatttgcataggaaaaactagaattgacatgcaaaaaattaatattagtcgtgcttgaaagtaggattaagtttaaaattatataatgataacaaaatattatcaaattgaaaagttacagggaaattagttaacaacatttctttcagttaactttttttcagatttcattggattacaatggaatactgaagaatcagacttcttcctgaaacactgagactggaaaaaacatttaaccttatttttaatacaaagagaaggataggaactattttgtgtggttgttgtaggaaccaaagaaaatgacacataaagcacctaaataattgcctggtatatagctattgctgaatacatccaaactttccttaatttttaaaatatgtccatcggttcatttgaaaatagagaatatctagcataaatatttttgaagctattctcctaagcattgcagttactggttttccattatacttaaccttatcatgatatcctggagttaatgtgaaaggagaagtaaccatgattgagaaacctgtatacaacagaagtctttctcttttgagacaaagccaatttggtccttgagtaaatttatttttttagctattattttatcagagacaactgtagcttattcctggaaataactggcaaagtcagcagcactattagaaataaatcctttgagaaaatattttcaaacttctattatataattttgaatttttcattacacctaaagaagtttgtgaaatatgttttagcaagaatgtcaatattcaaaaccttttatattttaggagatgtttgcattcttcattggagagtaaaattgggacttaagtaacaatatctaatacaattcattttgatctttgaaatttaatgtaaagaaacaggaatcaaaggaatgtaaatttaaaaaaaaaaccaaaaaacacatccatggcttgtgttgtttgttatttgtttagttatgtttaagtttttttaacttatgtttttaggtatgtttttattactggagagaatcaagaccctgtaaatatactttactagcttagattccatttaattactagattatatgttatttagccaataggtgaaatttaaatttacgcatgtcacttagtatcttcacctggcttttcagaaacagctgatttatgctattagagcatttaaataatgtttctcactgttcttttcaagactaaatggaagctcacctgagagaaatgcagtaaatgaagtcaactggcagatgttctatgggaaagaaagtgctattgcagtttagacttccagtgttcagaacttccgaaaaagttttttacaagataaacctaaggaaagtgaatgaccaaggattaagaggaaaattttcttctcagattaaaaccatagaataaataggaagcagctgagaaatgtgtggcagatttctcaagtggaaaaaggttaatgttggggttgccctcaggatcaattttaatactggtagcatgaaatctattaatgagtcagaaggcaagctggagatattttgctgatgtcatcattttgtctcataccagtaacaagaatagattaagaacatagctaaaagaaaaaccacatttttaaaaaaattcagaggtcattataaacaccaaactcaaaacagtcctttccaaacatgtggctttcctgtgttcatggttcaaaggaaattgttaagggaaaacttctttagttttattgttaatgtaaaaagtggtgtgtaaaattcagcattcttcctgcttttctgaattctacgtcctgtatttgtcagcagaagtggccatattagagaaaaaatatgtgcatgcatagtttcttccaaaattgggattggatggctaaggcaggtgccagggtatttgtgcaacacagacacgccaccatgtaagtccacggtgacctagctttgttcccattaggtgcaaatcatgctatagatcccttcaccaaaaactctgatggatagaagagcaaatgaagttatttgagtcataggtcactatgactattatgtattggtattattgttgtttgcctatgagcatttcataatcaaagaatctttgcatgatgagtgggtttcttgtgttttccataatgaggacgacttcttgttgagtttgtgcatttattggttcttggatcatgtttatcctgtcacaaaaaaatgaattataaaatacaagcatttttaacataacatggtccaggcacagtggctgaagcctgtaaccccaacactttggccgacgtgggtggattgcctgaggtcaggagttcgagaccagtctggccaacatggtaaaaccccatctctactaaaaattcaaaacttagctgggcatggtggtgggcgcctgtaatcctagctacttgggaggctgaggcaggagaatcacttgaacccagaaggcagaggttgcagtgagctgagatcatgccactgtactccagcctgggcgacagagtaagactccatctcataaatacataaataatatgaatatttatatcctgaaaactaggttgcataaaagaaaagctgtgcaaatcttaattgataaaaatgaattaagctggagactaaaaaatacagaaaactgcagcatttaaatacagcagattataaaatgttatattaggggaacaactatttttgttgccaatggattcaaacttactaatttcagattcttctaaagtttatgtcgtgcgattgtaaatgttatactccttgcggaagcattacctaatcaatttgatttgccccattgttattgaagatatattgcttagcactccaaattacaatctctctaacactaacataggaaaatgcttttcaaactgggttttacagaacttatttcttcctagaggagctttagggggtattgaacgctgtaatccataaatctggaattgacatatccttgttcatcaacatagatttgctattcccattaattagtttattttttatttttattttttattttttatttttttgacagagtcttgttctgtctcccaggctggagtgcagtggtatgatctcggctcactgcaacctccgcctcccgggttcatgccattctcctgcctccgcctcccgagcagctgggactacaggcacccgccaccatgccctgctaattttttgtatttttagtagagacagggtttcaccatattagccaggatggtcttgatctcctgacctcgtgatccacacgcctcggcctcccaaagtgctgggattacaggcgtgagccaccatgcccagcctattagtttatatattaatgggaatattttgaaattaggtttcagtaatgacaattttgtctcttcataaatgattgctcaacacaagatcttttctctacctgcattttacagatgaatgaattgaggcttagaaagattacataccttgccaatgttcacctggttattcgtggatccagattggaatataacaaattccacaactctcctctaatccactgcaccatattgttgattgctgatataggtatagggatgtggatttcctttgcagtcttagaaagaatagattatttttacccaagctttggattcttgtctctttggttgcaccatgtcttatctgccaaatcttatctgtccctctttggttgtgacacatcttattgttgaaaaaattttgtgaagacatctgatttttccagagatatatagttatcaatatattcacatgtatctgtagcacgatgttttcataatccaagaataaatcaaatggcctgatatttcaaataagggtcagattatatctgtactacatttcaaatattaagtatagataaaactaattaattctaaattaaataaagataagaagcatagaaaattcatttctaagaggttgtaggtcctaaatctaaatttagataatactgtgtccctgttaaccttaatccatccctgaccagtaactgacattgtaaataaaaggcagattagaccatcaagtatagaagatataattaggagtatcaagtgtaacagaagtagaagaaatcttgtaaaatgtaacaaatgattgagataagctgtgattttcacatataagcaatagtctgtgagtagttttggggaggaatgttaaggagggctttagtgaggattcagggtgaagtggagagggtgtttacttgtgaatgtataccgctctgtgtgttgattttgcagataaaaaacacattttcaagttagtgactagtatgcattaaatatgggagagtaaaagaaggatgtatttaataggaaattcacttattttccatctgtatctgattatcttaaaataagacttgttcactgtaataccatgtgaacattaacattcaggttttaattataagttataaactaataataaaatgtatatcatatattactttttgaaatcccttttatatctgttattctaagtcatttaaaccttgaaagcttgtaatatagggattagcattcccattttaatgatggaaaaaagcatctataaaactttagtgtgaaatttatctcttcactcccttaattactcttatatggcttttattatataccacttgcttcctaattttatttttatgatcagctttttataataaaatcattactcttgtggctgtatacctgtctatatgtttttgacattctgtacatttttacataagtgtctgtttcagttgtaccaaggagacatgtgtgggaaagtggagaaagggtgagcacttccaattttatatgtggctatagaaggtacatttcctagaacacttgctacagaagtgggacattgcttctgaatgtcctacatgtatgagccagaggatcctaggggacatatgtgtttgacttagaaaccaagagtaaatgactgtgtccagtcaggtatgctgagctgttcaggctggctggagacctgtatgattttggggtatggtgctgggtgcagtccagtagctggaagttggccagaatgccaagtgcttgatatatgtcctgggatgattggcattaccttgaatgtgacagagagtagaggagtgacataatgggattgcattttaggaatatcaccctgggggactgtgttttggtttaattttttttttaatcgcagaataagacacatgtataaacaaaagaatggctgaagaaaaacaaagtctgtgatacttacatatatagcacaagttgacataaatgccacttatacctgcctttctttttgctcctggcatgcctttatttcagtggcccctctgggtctgctctgtctctgggtctttactctgagctgtatacctgtaatatgttttgctctgtgtccccacccaaatctcatcttgaatcataatccacataagttgaggcagggacctggtgggaggtgattagttcttgggggtcgtttcctccaggctgttcttgtgatagtgagttcttgctagagctttttttttttttttttgagactgagtcttactctgtcacccaggctggagtgcagtggcgcgaccttggctcattgcaacctccacctcctccctggttcaagcaattctcttgcctcattcttccaagtagctgggattacaagtgcatgccaacatgtttggctaattgttttgtatttttactagatacaggatttcaccatgttggctaggctggttttgaactcctgaccttaggtgatccgcccacctccgcctctgaaagtgctgagattacaggcatgagccaccacgcctggccaagctgatgcttttaaagtgtggcacttccccgctcacttgctctctctctcctgccgtcatgtaatacatgccttgcctcctcttcaccttctgccataattgtaagtttcctgaggcattcccacccatgcagcactgtgagtcagttaaaccttttttcttcataaactacctagtctaaggtagttctttacagctgtgtgaaaaagcactaatacaatctggaatacaccccacaaacctctaagtaatcaactcctgcctcttagccttcaaaatgcaactcaaatggtctttcttcaaggaagccttacttgatgccttattatcaatcaaggctttcttgttatatgttgtcatagttctttacagttttcttttataacattaatcacagttttactcaaacactgttggataccataaagatacattctgtwattaaggatagtatatatatgtgtgtgcacttatgtatacatgtgtccgtgtgtgtatactttgtatgtatttagaggactgtgacttcttccttgtgaggtgttttttaagtacacagaagcatttgtttactgggatttgaaaatgatcttgccaaggcaggagaattggtgtttatatttacaactgtctttcaatatacacaaggaattggttctgggacccccatggatcacaaaatctgcagatgctcaagtcccttacacaaaatggtgtaatattttcatgtaacctgagcatatcctcctatatactttaaattttctccacattatttataatacttataaaatgtaaatggtatgtaaatagttgttatactgtatttttatttgtattttttaatttttttccaaatattttcaacccatggttggttgaatctgtagatgcagaacctgcaggtattgagaactgactatatatatgttattttatatatataatttcttatatatatttatgtaatttataatacatgcttatattagaaattatgtatgtgcacaaagcaacaactaactgttaacactggtataattctttcaagtttttttcttctgtctgtgtacatatgtatattctatctgtatacagttacttggctcaataccatagatacattttgtgtctgtctttgtataactaatatactgagaattttctggtgtaattagaaacaaagggaaggctgatagaactggaggcgaagagattagttaggaggctatgtcattcctcttgatgaggtctcagaatcgtgaggatggataatttcagagtaacaaatggcaagatttggagttttatttgatgtaagtgtatggaagagaggaacaactatcatatgcaggatgactctcaggtttgagtaagtgagtagatgactgtagaaggaagaatcctttggaaaaagagataggaaagatgaattcagttaccgacatgagtttgagttgcctgtaagaaatcaaactgcatttacccagttaaccaggctattctaattcaccaacraagtgaaagcaaaagaatatggcctctgaactctatgtgctaaactatatttagcttccatgttcggaaagcttagtgaattattaagggggattakgactcctcttcccctagagatattttgtaagtacacacaagcatttgtctgttgtgttttgaaaatgaacttgccaaggcagggcaattgccagcccagacaacctgtcaagagctcttccagagctctgaaactgtgatacacttagatttatgtttcctctgtcacatgcttttattgtaccacagttttcctaagtgttttccctttgctgagcaaataagaattcattgtaatttactaaattgtgttctctccatcctaaaatcaaatgctgagatctcatattaacataaaaagtactgatgattcaataccttatttttctttttaatgtctttccatccaagaaagttataatattcacttaaagaaactgtatcatatgtactagccatgcatgcagtttttacatatttttacctatattttccattctctttactaaatttctctgcagtgtgattcaaactaagtactgaagtaaatgctagtgtcattaaaataaaatacacattaagaatgctatagtaaaaagtttggatactaagtaaaagtcagtttctaaaattaacatatttgttgagcaaatctgtaactagccctcacaaccagctctctgtcttatcaagatttagtttgctattcatgctcagacatggatagtaagagtggtaataacattagaagaataaattcatgaaagctgtaaaacctttttcagcaccctcccctccatcttcacaggtaaaattaagcattcattcaatcataagtcattcacagatacacctgttatgtgttagatatcatgttaggttctggaaatataaaaatagaaaagaaatgagaagtgccctcactccagtagtagagacaagcatataaactgatcatctaaaaatgcgagatccatacccatatcacaaagcattataaaggcatctaactgagcatggagaagatatggaatcaaataaagaatcctggagagcacctgagctgagtgatatcaaaggataattaagaagagttagccagatggggtggttgggtgagagagagtgactctcatggagggaggtgtgttcctataacttagaaaacccagttataggtacattttaagtaagcataaaactacatttccagataaaaatgatatttgtttcatatcagaaaaatgatgtaaaatagcaatttttactgtcatttgtatgcagatttaagaggaatattctgagatacagtttaagttctacagctagtctgttttttctcttattctttatttcctctaacttagtaaatacttccataattacaggtcaacaagaatgatctctrgcagatatttagttactggcagttctggatgtttggatctagggttaaaccagaaatagtgaagagatgttttactggaaagtactwttggcaaactgtcagcgtctaagttggcaagcatgtctgactgaaaagctagaaggttaaatgtattaacttaggatataatgataaatagatttttacatggtctttggttgcattcaggagttgaaatttgttttcatatttggttatagcagtggatgcatttttaaatatgcctaccgataggacatcacttgctttctcaaaaatatagaaaactattgtgatgttgttgtagattagagttaagcttgcaacaattgtgtcatttgaactgccgatcctcaccatcagacgtggtgatatgtaggtcctgacagtcagtaaattgaaaagattgctgaattggactatttgggcacaccacctgaaataattcaaatggtcttaaatagcatttgtgtcagcaaggaatgtgttaatctcaaccttcattttgaaaacccatgtgagcttgtttccccttgagagtcaacatacttcagtttggcaaggcagtcttgcattcattcctcattttttcactcaatacactgaaaatatatggttatattcactgtttttgatcattttcttcaacactgaatcaagctcagacagtactgtgcttgactcttggctcttctcaaatgaatgaaatatctatattgacattttttttttttacttctatcttcaaagtgccaactttcccttctgcataaatatctgtgctcctctagtgttgaatccacctgcatatgtagtcctagctctatggggtgactggtaccaaaagatatggagccttttgccctgaagctgattctgcacatctatcaagagcatatcctctgcacattaatggcttgttcagctgttaaatgaaacgtcggctactacttccaaaagacagggattgataacttttccacattgtatggctcctctaccttgacattagacaatgtctagcattgttcattgatgtagacattttgtaaatagggtgtcctgattctttgagtgcataatatttatcattaattttatcaggggccaactcaaaagtagtgttgataggttgggcatggtggctcacacctgtaatcctagcatttttggagaccaagatgggaggactgctcgaggccagaagtttaagaccagtctggacaagatagtgagaccctgtctccacaaaaataaaaataagtagccccaaaaaataaaacaaatcaacatggtggtgcatacctgtagtattagacactcaggagactgaggcaggaggattgcttaagcccagtatttccagattaaggtgagctatgattgagccattgatttccagctagggcaacagagcaagagcctgtctctcctcctccccccccaaaaaagtagtgtgtatacacttgctttacttatgagagaatcaattgaagtctctgttttttcatcctttctcattttgggggaataaaattatcaattatatcatggaaaatgttttgttcttgttctataaacagttgtttgctttactacagaggttactgggcttgttttgaaaatggtgaaaaagtcaatagatttagcccactatttcaaaatattttattaccaacagttcactgagctctaggtatgaatggatcaccagtataagaaaatccaagttttcaagtatttaagttgtgcttcctttcttgtctttctatcactgcttgttctagcacaaagagattcacattatattttgacactggactctgtcgttatggtaaggagctagcttatgttcattaccatttttagtcttgatgaaccaattctgagacattgatacctttttaaattgttgtcatatagcaagaaaagagtattaagtttaaaaacacatttaacatatgtaaataatgaatacaacttaaaaataagrtagataagacaactgtatcagaacaatccttgtgcaggtgtgagccattaataatgtaacaattattaataatgtatgtgggttacattgaaaatcataattaattttacatttcaaacttttgaaacttgtaaaagggcaagtatgacaagcataggactcatttagaaggctgatgaggctgttcatttgcattttgctactctaatattgttttacaagctattgttttaacagtataaattaaatataatcattgacacatggtagttttttttaaatgttcttggaaattatcattctgttctgtgtattatgagctaaatgtttgtgttcccccaaaatccatatgttgaagccctctactccattgagatggcatttggaggtcagagtttggggaaacaattaggtttaaatgtagtataaggatgcaacacctgttatattagtgtccttatcagagaaagagatgtgaactagctcattctctgtcgtgtaaggacaaaaatagaaggcagctatctgtaatctggaagaggtacctcatcagaacctgcccttgctatcaccccaatctcagattcccagcctccagaactgtgagaaatatatttctgctctggaaaccacccagactatgatagtttatggaagcccaagcagaccacaacactgggaaattctttgtatatcattacttacaatttccagatttttaaatgtaaactctgtgcagtgttaaagagaatattgtttttgcatctgtcaaaactgaatttgaattctggccaggtgaagacaggttatggcaaggtacctcaccagaggtactatcaatacattattcaatcccctatcagtaagttagtcaatttcctcttttgtaaaatttagcaagggaaatctgccatttagagttcttatgggtactaaatgaaataatatatataaagctttttccatggcacatagtacgtaccttgttgcctctactctctttttctgcactaggtacaatcaacagtcaaattttttcttcttttgttattttattgcatttttattgataatgtcttagctattttttattcactaaaatgactgtattagcttgttattttagcgtcatatgagggaaacactaaacttagtacgatttttaaaaagtmaatacaaacactaaaacaatgttggcacttaaagaatgtgctttaggaataactaattctgagtgaaatttgtgtgtgtgtgtgtgtgtgtgtgtgtgtgtgtgtgtgtgtgtgttttgctatttagggatttggtttgtttttggcatggcctgggacataatcaaatggttgagagatcactttctgatccatgtaaaattaaaagcaaattgcaatgatgagatggttgacaaatgaaaagaaatatgattatgtcaaggagaaaatagaggcctctcgtgacacagtccttggcatgtgcccatgtaggggactgctgtcttgctcatcaggaggtgccatctcaattatacctctccatgtgaatccttgtccaatgatgcagatccactctgagagagtcaagttttctattagagacacttgaaaatcttcatctctcaaattgttacaagtattatgatttaatacagatatttttgttacatttttaaaagaagtttgatgacatagtatgtatgtaacttaaggcaaattgatatacaaacactttttctttattttaactttgatgaaataactgatcattcttttacttaaaattatatgttttttactcaaatacaaataattttaaagaccttgaagaaatacaatttatttctccatcactttttacattatacagctttgggctagaggaattaatacattattctgctttaggggaagtgtttcaaaatatttttaaaatatgtattcctggtatacattatgccttggtgcatcagagaattgaattatagttttccttagaaaatgtatacaaacaatgtgttctcaaagcatgtaaaagaagaaaaggaaaaggtgaaactgtcatactgtaattgctgagtaccacattttcatgattttcttaaggccttccatttatgctataaatttcttctaaaaacaaacaatttatatacttatatattatataatactatatgagataaacatgtactagcaagttatgagtagcatcagttgttgaagtataattacatggattgcttaattttggttatttatcagaatgtattagtaaatgtctagctatgttgtcttgtatttaagacaaatcattctaatttcagaacaatccaaaaattagccaagtggatatttctttaaacccagttttgaagaatttatagtaaagtacctctgttaggccctcagatcatttatacttaccaaattcttttttatttacctttacaaaaaaatactaaaatattccaagaaagaattaaagtatattggaatgttataaatagctacagtttgatcatgacatttgggtgctagaaatgtgcttgagctctcatttatattgaagataaataaacgactaaactttttaaacaattctccccatagttttacattcaaaagaattattgaaatattcagtactaatgttaaatgatatattgagaatttcacttgtagataaaaagacagtttgcattcatgtatgaaaatgagtgggtaggcccaagggatttggtttagaggaaaagctttgtgtttagcagcattgtctattcttttgtgtagttttctatatgtcacacttctattagattttagtgcttttttttttcaagttagttgtttttcctagcgctttacacacacattttttcaagcacctgaaaatgggcaaagtaatccagaaatcatgcttttttcccaaaattatttagcttgacattttgaaaatcaaaactcaatgcttttattttctacagagggagtagaagatggataaacagccaaacacttaattgggtttggggaaagaaaaagaaacaacaacaaaactaaacgattcttcccaaaactctcaagggttttatttttataagtgataatgctagtggaccactaatatacaactacaataaagttaataactacattttattcataaagtttgccaggtaattttctatgtactttctattatcgcatcttattttatccttaattcaactctataaggtagatactagttttttgtttttctcatttcatagatttgggaaggatgtctgtggatgttaagtaacttgcactaagttacctgtagtctgattccacagcctgttcactaaggcatttcatatacatgtatgaccttttcagcaatggagaaaaacacatagaagccaggaaatactcttgtgaaacttgttctaggctattatcataatcggagtggtaaaattaaaagcagtgtacaatgagacttgatctccagaatcatagaacataagtggcattaaactcaaggtaaatggtaatgacgcaggctgtaaaaactaactccttaggtctccatgtgaatgaaaaagatgtttaatgtgcattaaatggcagcatctgttctagagtgtaacctgaaaaaaatcagttgtttatgaattaaacttagttagtgcagggcatctgatttttaaatgggaatatcaagtaacctaagacaccaaagatctgttcttcctatgctatgaaagtaacatccattgatttcagtaattttctttctgtcttcatgagttttattttgatattttatgctcaaagcctttagatttcgtaacacctcctttagggtaaaattgtttaaagttaatatattcatcgctttcttactctacacttagcactgaataagaaataagtgaggtaaggccgggtgcggtggctcacgcctgtaatcccagcactttgggaggctgaggtgggcggatcacaaggtcaggagatcaagaccatcctggctaacacggtgaaaccccgtctctactaaaaatacaaaaaaatagcagggcgtggtggcgggcgcctgtagtcccagctactcsggaggctgaggcagcagaatggcgcgaacccgggaggcggagcttgcggtgagccgagatcgtgccactgcactccagcctgggygacagagcaagactccgtctcaaaagaaaaaaaaaaaaaaaagaaataagtgaggtaatacgtttcttgccctagagaaacttgctctctagttgagaaaacaagagaagtatttgaaagatcaagaaacaataaaaggcaattaaaaatgaatatcattaaactagtttgatattcatgatagataaaatgttttaagtactcttcagattttcatctttatgtttacactttcttctgtccaagacttttcacctttggaacatttcaaagtttcacaatgaccttttcctctcctctcagttgatttcaccaagtaatttgacatttttgttattctaattaatatttttactttgcttctttagcattaaaccatgttaagggtttttctagagcattaccctggtcagttgtttaaatctcattttataaagacattcagacataagctttcgttgatggcttttctgttaccgaagagtaaccttcaatcagtaaaaatgtgtaggtcacttatatgccaggaacttactgactaaagaatacacaatgatccattctatttattcagtcagttatttatcagctcaaatatgtattgagcaatgattacgtaccaagtattttagtatggaaagacagaatataggccgggcgtggtggcttatgcctataatcccagaactttgggaggccgaggcaggcggatcacgaggttaggagttcgagaccgtcctggctaacacagtgaaaccctgtctctactaaaaatacaaaaagcccggcgtagtggccagtgcctgtagtcccagcaactcgggaggctgaggcaggagaatggcgagaacctgggaggtggagcttgcagtgagccgagatcgcaccactgtactccagcctgggtgacagagtgagactccgtctcaaaaaaagaaaaggaaagacagaatgtaatgaagttaagtaaaatataaatgattttagatggcaataattgcttgggagaaaaatgaagaagtaaatggatatcaaggaaagcttcattaagaaggtgacatttgaataaagccttacaggaggcgaggaaaggagacacatgaatatctggtagaataacattctaggcagagagaaaagcaggtacaaaggccctgcttgggacaagaagcgtagctggcatgtttgaacggagcaagcaaggctgagtagtaggtgctgaggtcagtgcaggtgagatggtgtggggagacaccatctgcaggacctggccttccactcctactgtgattcagatgggaagtcactgggggctttttcaggatccctgtaacaaactgtgggaagacaggtcaaagaggaagcagggttcatttgatatggtatggagagtttcactgattgcagccccaggtgataatggctaaaatgaaataaatagcattggtggaagtcatggtcaagtggacagattctaatctaaacatcatgcagggggaaaaaaagaattgtctgatgaaaaggatgtgatgtgtcagattgaagtgggagagttctgtgacccctatcgcaggatgttcaacaggggtgtggctcacctgttcagctgaaaccccttacaggagggggaacatgcagatgggcaggtgcaggaaccagggtgagcacttttgggctctagccccacagtagcaactaggggtgggtgcctgtgactcctgaagccccagtgggtatgttacagtgctccttatctctgccatctgcagatggcttaagtgttaatcagctcagtgccttcttggtacccgggtctttgtctggtgtccaggaagaatcaggtcacacaaagacttgaaggatggtgaatgagggggttttattgagtggtagtggctctcagcgggatgtatggggacccggaaagggggtggagtgggaagatgatcttcccctggagtttggctgtttcacggctgatctcctctccagccttccccagccaagctcctcaacatttagacactccttgtcttctctccttctctgccgctccactcttctgttcctctgttcttctgctcatctgctcaaggaacctggggtttggtgttaatatgggaagaggatagggcagcatggcaggccaaaaggcaacatttgggtgcaaaaacaggaatacctgtttccatttagggccacgtgtttccaggcttgagggtggggcctttgctggggaactgccctcttctacccagcatttccctgcctcttgtctatatcaagatgaaggaaggcctttggatgattctcaggtttttgaactgaactggagtgactttactgagataggaaagcttggccagggaacatgctatggaatcacattagctcggatttggagattttgtttgagatactcattagaaaattaagttgaaatatttggtaggtaattgaatacatgagtctggagttcaggaagaggtttagctggagattaacattcaaaagtattttccttccccatgcacactttcttccacctgggatgaatggatatagtagtagataaatacggcaatttgaatagaagttctttcctgtctaaaatggcagggaagattttctgcaaccctattatttctgaaggtccttcataccccctcactttacaatgaaagcatgtagtcatgttttggaaaagaccacatttgtaactcctgtggggacacgccctatttttcctgtcttaagacttttaaaattttatttacctcttttttccaacagtgctttgactttattacattaaaataaatttacctgcctgtgggccttcacttttatcacacagtgagttatataagaaaaggagtcatgtcttattcacctttgaattctaagcaagtgatctggcctctgtaatttcttgctaattatttgataaagatacttgttcttgacatttaaatggctactaggcaactgatcttggagtttattctatatttttaaaatctgctatatattgcaaacatattagttgcttgttttaacatttattgagctccatttcttcaagactcagtttacataaaccatttatctctagagagggcatacgtgttaatataggaggcccaaacacccaaatgaatggaagacatgatgcattaaatgctttaataaaggtacagattaaaacattatttatcacattgttactttgtcagacttcctgaccaagctgtcactgaaagaatagtatattccaactctacattgaagtgtttcaatagggagatcaatagtggggaatgtattctgattagatggaatgaaatagataatggtacatatgttggacagtgctacattagttttggtagcagatgaatacattggcaggagtatagggcattgggagaatacatgagataaagtggcactatgtgttagaagatctttgggctctagggcaaaggcattttactgtattttgttcatcctaggaaatctctaacaattatttggatgtgaacaggttatgtaattagaactgtactttcaaaggtctagatgaaaaatacactatgaatattaatggtagcaagatttcctaatagttcaggtgagagaaagttaggacctgaatgaaagaaaaagacatagaattgctagctattatattaaatgatgtattaagtagatgtggtaacagatgaggtactatgtgggaaacagaagagccaatgatgtctttaaggttttagtctggaaactaacatccttaatagaagcaggaaggttagaatgaggtgcttgtggaaaatgatgatgaatcttgttttaaacattatattagcatccagatggaaatccacaggcagtttgaaattcagagccagaattcaagagctaggttggaactggtaatttagatttggatgtagaaaaaaatgtgaatactaagttagtatattcacagaacaaacatgaaataatctcccagttcttttacacttttacacacttctttgtttactattcttctgtgaatatttatacagattagaaccttctacataatacttcaaaatgtagccctaccaggacatatttatggaaacaaaggaaaccagtcttctaggttgtcgtttctatgtgttgttaacattttgtgatttcctgtggaatggaaccctttgaaaatagtagtagattttaatagaaaatatcttaattaaataccttgcataaagtatttgagacataaattacttttttacttatacaatttaaggagattttattttcttctaaggccactataaaacacactggaacatttgactaaccctgtagactggctcgagccagttcatgctctaacacttacttttgaataccttttcaaaagtaaagaaatgaattatttaggtatatatcaagaggaatttccttttatttatttatattctatgtgtcttcatatataggagttattcagctctgagatataatcaattagaatattgaaagagatttcatargaaacaaagatcaactaatgttcaaaaaattacaaacatgaaaagagaaaggtgagattttgacactggaaaatattaggctcccctaatgtttcagtgtatggatgtttattaaaatttttctggacaacctcagtccttaaaattactggacataaaatatatagcagcactatgaaagcttttaaagtgagaatattcataaggctgagtttgctatgattttaatagtccctaagttatttcctaactttcaaatgaccatatttattctagtaatttaaaaaaatttgtcttcattccattatctcaaaaaagatcatgactcttccattttaatatgttctcagattttccaggtagaagtgaaggagttcattattcttatctttgtcaatttcctaatttacaaatgagctgaagcaattaatccttgcaagtcgcctgtattaattatagtctaaggcaggtttatttgcagttttgtaattctttttgtcacattttcactgtgtttactatctcagcttgatgcttgttgacatgctgattcatgttttggtgcactagataggttttattcatctagaggaatgagtataaagaggtcacaccttataatcacactagcatttctagtatgtgcaggccatatatctccttttaatttaatctctgaaaaatgtacagggatttctgcagctaagctgtacaaatcaataaaatttataatcaaggctgtctaatctctaaacctaatataagacttcacaactattgattatatgtgaaggatctgcaagctgttaatcatgcatgaaggcataaaataaatggtggcttcagaaaaggaaatggacaaataatcatcaaccctgcagtccttatctgtctctctattccctgaagcaagcatgttaccagacacttacattttataaaatcaaatgaggtgttaaagtgtgtatcaatagtcatgctgacttttgtatattatatcctgtttctattataatgtagaattgttctctttatcttccagatgtgtgatgaaaagcaaattagtctctctaataagtttctagaaggaaagaaggacctaagttgatgtgttaaaatcataatctttctaaggaacaaaatgagaagaacatacttggaatatcattataatgtaattgtaatgatttatttgggggaggggagaagagctccatgtcacgagatagtctcacttaaaactgggccctcttagcattttattaactagtatacttcatgatgattttactagactgaattgactgaccaattcaaggggagatataaaatatttacaagggagttatgtagttgagaaaaacatgtactatttatgcacctaagcagtattagagggatttggataaaaaagaaaaaatatatatatatatatataaatgtattattttctgtcctattcagtcaagagtaaagaaattccaactaacagattctcttatatatacctacaaaatcatattgacataaaaaagttaaatttaatcaatgttatattgcagtgctggaggggtaagttactggtaacctactacagtttgtaataaagtattgatatgtcttattatttatagaattattattccaatatttagtttattattctctgtgggagtgtagtgaagaaattaacccctcctcaaagagcatacagcaagcgaagacaaaaatatatccattaaaagtcgttttaaggcatataccatactaccgtggtatctgggacatttaagcacttaataagtgttttctattattaaaaacaggatgctatttaagttcagcacaacagattagtatagaaatgcaattcttaaattactgtactattttagtgtagatatcactgatagaatcttcacataaatattaaggtaatttaccgaatgaagatattagaaataatgcctgtttcaaaatgctgagtaacaactaaccacaaactctcatcagtggcacagagcaggcacgtattaattatacttgtgggatggttgactagtagcctctgatgatcttggctgacttacatatccactgatggactggctataggttggcttctgctggtacgactcgggtaacttggctctgttccacatgtatctcatattctagaagaggtatgagcaagcaggagaacagaggactttttgagatataggctgacaactagcacacccacacttttgccttattctgctgaccaaaacaagtcacacagcaaggccaaaatcaaagcatggggaagcagaccccatttggtgtgagcagttgcaaagtcacatggcaaacagtgtgacaacaagaagaaatgaataattggaattatttcaactgccacagagaactgggtttttaggtttcattttcattagcttttaagcttgaaacatattgaaactacctgctttattgttcagaaaataaaaatttccaaccatatactatggatcaaccactgtacttggcatgcaaaatattacctcatttttcagaacaacataagaggtaggtaatttatcttcttttagggataaaggaggcattgaaaatcccccttagaattttgtctttgctatgtacagctcctctaaagtcaccttactttttacactgtatattatgaagcagtgttttccatattacatttttttagggttgtacacaaatcactctacctttttgtgtctatgatttatactgttgctaaaaaattttatgaaaaataaagcttgatcctacagaagtagattattctcttcttattttcttctataaattaagaaaatatatttttccaagtatagacagttacctatttttaagttttatttaaataacatgtgaatgtgatgtgcaatatcagagatgaatcgaagtggattcattgattgtagttacatatttttcaacagtctaataacattaccaaaaaatgttaagtgaaagacattaaagggtctccaaattttcagtcaccgtcattttgggaattaggtctgatgataagacatttagtgggctttatctatctattggtaaaagaattatctttgcctttttttccatgtcacttgggtagtactgtcctttaaaatcaaacaatttccttggcattaatgcagagaggatccaagtgttaattttattaaaattatctgataaacttcagtaagagtgttgagagcagtggtgatgacttgttttgtttttaattgatgatgtgcttagtgtggttctgatggcactgggtaaatattactgtgattctgcaggagagctgagtgagccatccaccctctgtcactttatatccctcgagtccaagcatgtcatttcagcaacacagccagaaagcctaaagagctgacagttggcttgtgattattcctggacctgaggctccctcacgttacagtactaatcaagtcatctcaccgacttatcattaactcaatttgacccatgggagcagagatgaaatctttttggcaagactaatgatgctgtaacattgaaaagaagtgaaatgtaaaaccttgattatcctcaaccctttccatgaggaaaagaataaaaattacaaagcacctaaaggtaagagtaaaagacaatgtctttcaaagaccttaagttttccttccccaaggtgcagcactgttttctttgcttttatttttatttttttatttcacctttgtccagaaatttcatctcaattcttttttatttacactaacaaatattttctctggcagtcagaaaattcacttttcttgtatttgttttgataaatggaatgaaagttctgttttgcagtcagcttctaagatttctgatgaaaaggcagccaggagcacgaagctcctgtcatgcttcagcgttcttagtttgtgtacatctttgacaagaactttcttttttttatttttccttggcacgagctttgggacatcttctatttttctctgactgacagctgcataataagttttatcattaaaaactgattctagggaaatatgatccctgccttccattctcttatagatgctaaagcttttgttttcacaactctttcagaataactagaaattatcgctacaaaaagacagggatattgacctgtcatgtcctgagttgtttagcaagtgccaaaaacaaaattaaattcccttttatctgttatctagaaccacgtgttaaatcatcttgctcttgagaggtgactcaaagtcaacaggttctttttgttcatgttgtctttacttttattaacctttagagaattattaagtacttcttcattttagcctatcaagttgggttaaacatttaacacataagttattacaggcataaataccatacttgatctatttagaatttaagtgggggcagtgatatgttacttctttatttacctgctaattatgtaatactgaagatttaatatataaattttctgacatttctttatatttcatcctgatttcatgtagcctttctcactgtaacaattaagaattaggtgcacaataaaaggcaaaaaagaagtaggaaaagttagtaaaacttgctgatcaacatttgacagggaagataaagaaaaccaggtaatgttaacagttcctattgaatatatgtatttttaatttaacagttaactgttttccttggacttactggaaatgaaataatggaagagagctttatgcctttgtttgtagataagagcgtataataaaataagtcaagattcatcagctaaagagtagaatggaagagcactggattttacttctggttccagtccttttaccagcttcttaatgttctatctgcactccccctagcccctgactttgttcttcaagtatatgaaaacacacaggaccttcagccttcttaattcctctgcttagtcctatgtcatagctttttcccagtctgaactccctgattgatggggtgtccaagggaaataaacagtcatgtcatgggttcttagtttctgtttctggttgggccaatgaaccccttcctcatccctcttttccacttatcactagaaacagaaactaaaaaccatggcttcaggctgctaaaagcctaaagcaaaacaacagaacaacaacaaaatggggtaggttggacaagcttgagtacactaaacacaaatttcaaaaaagaaaagtagaatgacctgagaaagtgacatcatggtgtttctaaagttataagttgacaatttataaatgtataaatgtatgggatacaaagtgtgttataatttatgaatacaacagggaatagtgaagtgaagctacttatccatcacctcaaacacttaatattttgtgttttgagatctggtttctggtactgacctctgcttttgacttagtgggtctttttagaaaagtcagctttctttcattcaattctttttttttttatctgaaaaatggggcagacactagattttatgcaattctctttggcctctcttgtgaatgaatttgtaacatatgtgcttaacaccaccttcccttcaaactcacctgccccctgtcatgctcactaacacatgctcatctctgtttctgttccgtttccctctttctccctctctctcagagcatcctcttctctccatttctcttttgccctctcctttttcttcttctctcttttctcttaccctatccttatctattaccttctctctttttctttctcttatctctgaaaggatgggagtaccccaactcctgacttaggtagactgatgcctccacttagacctctttctcttcttaatgctctccaagttatctaaaacacagaaatcagttcaagtattgctcgtatgccttgcttcccagctagggacattgtcaaattgatctttgcctccttagtttctagtatactttttggccaacagaaagcaataaataagcagtaagaaattattggatcattttaccccccaatctgtgtctcttcttgaactttctctgttcatttaagagcaccttaattttctttgtcatttggtattaacacattagctatattgtatccattcacataactcaaatccaagtaaccaccaagtttttcagttttccttccacatcagtagcccctatcctgcgtgttcctgctgtccccctccttacttagccctaatctctctgctaacacatcacattcttttgatttctctacattcaatgtctccacaattgacacagcctccaaattaatcttattaatgttattttactatgttaacttcctgctcagaaaccctcaatgacttctcatggcctatcaggtaagttcagcctcttaccatgacatctaaagtttgcctcatcttttcccaaccaacctttcctgtattatctcctatatgatacttgtacagcaaccaagtgggattgcaaattttctccaactgtgttctacgtttttattcaactcgtttcttccattttttgtattatttatctaaatgaggtctaaagatcttgcttctatccattgagacctaacacaaatgtctactccatttgaaaggtggaagttatttctccctcttgaattcctatagcatttttttctacttatataccacttgtaaatatattgtttattttttttcttagcttaacatctttgataaacaaatggaagctccttgaggtctaagattatgctttattcactttagtaccttctagaatacttaggatagtacactgtatatagtaataaaatttctttatgtttcattatagatggatgacttgatctaaacattgaaatataaccactcattgcatgaagatcactcgattactgtgtttcttttttccttttttgttttttgttttgttttgtttttttgttttttcgtttttttttttttttttttttttttttgagagagagtctcttgctctgtcacccaggctggagtgcagtggtgcgatctcggctcactgcaaactctgcctccagggttcaagtgattcttctgccccagcctccccagtaaccaggactacaggcatccaccactacacctggctaattttttgtatttttagtagagatggggtttcaccatgttgctcatgctggtctcgagctcctgagctcaggccatctgcccaccatggcctcccaaactgctaggattatgggggtgagccaccatgcccagcatcactttgtttccttccaagtttctgataaaatttttgactacagccttttccaattctttctttttactagaaatgcaaaaaacaacaaaaaaagaaatgttatataaaattacaatatatggaatacccaataaagatttgaaaaaagaaaatcggaaattgaggaggagcaagaacatatatcatattccaaaacgattgacagataatgaattcatgaatgtgttctccattgtttcaccaccattatggttttttatttgttataaatacgatttactatcatacctctgagtcactgaccctgtaggttatatcttgaagttatttaatacttatagtagctcttatggccagctcataaatatcagtggtttccaaacaatatctttttgctttcggttattctatggcaattcaagtaattattttgattttaaatgttaaatttttatttatgtatttatacctcagaaatacaatgcagttgttggttaggtatgagaaataatggattaaggtcaataatttaggcaactttattgttggaatctttgagaaaaatttctttgaatggattttatagtagtagaaccatctcaaatcactgctgtttataaatattctaatataaaaatgcatgtgcatatagttatcagcccatgtctaagtgaatagtattcagagaagtttgtatgctatagcacctttcacatgtatgtgtatatacacacatatagatgtacatgtatgtactgcatatgtgtatatgtatatgtgtgtatctatacacacaaccctgagaagttcccacctcagtaaaaactgaaaaaatttaaggtgcatgccaattaagaaaaaaatacagttatacagtaactccctctgagttattaattccacgcagctcaaaacaatcaagttttgatttttagtctgtgtgtgtgtgtttactttggttgttcatatgtttctgagtactatcctaaagtgagtgcaaaattatgtctaagtcactattttatcaacatcagggccctttaaagcatacattcaaactgtggaaaaaaatgtcaatttcaaataacatattgactttgtcaattcttagaaagctatttctttccacaactctttgtttttccatatcagttaataaagtattggtcactgaaattatgattgtgctttatatacattgtgtaggactaataaagctactctatcccaattttaaatgagtttttaatacaatgagtgccaaagtaagcagcatttaaagacaccaaaacaaaattatcacttaaagtaaatcctatccattttctgcataacagataataaataaatcatttgcccactcttagatatgtaagaattgaggatgcagagctactctgtcttctttacagtgtgtaagatgtctaggtatgctttcaaaatagtgttaaaatgcagagtaagtgcggactaaatagacaaaatgaaaagaactggcgtgagagagtgatgacttagaaatagagaaatttatacaaggggaaaatgtcagatttaaaatgaggggtgtgttaaaacaagtgtataagtgctagacctaaaaaaaataaaaaattaaagaattagcgggttaaatatttgtggtgtttctctcattgctgtataggcattgtttgctcatatactctaggtattttcatgggaaatcttactttctcattctgtataattttagaacaagatatggctgaatcttgccatggctaccaaacagtatccagttgctacctaggaggcagcaaaatcacagtttatctgggaatttttaggatgatcctagttctcattgcctggttagctggtgggcagtcatagcaaagactgtgttttcggtctaactggactaaattgaaagtatcatcactttactcttgtgtctggtggggaaaatcttagcatagagctaaacatataaaacgatttttaaaataattagaaagcctcgtctttcttccaacctgtggacttcaggtaacgtctgaaatgaaagtggtgaagttgggagtctggatgctgtgaatagtcataagactggcaaataacatttaaaacctaagcattagattctaccgaagataaatttgcacatatgtagatttttgtaatctaagattttaaattaaatggccaccagagttcatttcagattgcacattaaatatattgaactagaatcccagtttgggcttgccatctgtttagcatgctgattgtttttacagaactgtgattttaatctcaaaaacaaaaatttatgaaagcccccaagtcagactttttgtattattttccctactgatttccatttagcaagaatttgactatctttaatgagttaagagaggcatcggaaatcccttgacttttttctttttatcaaatcaatgaattaaagtttttgttgtgtgttagtttttttactctgtagatgttgccatggccatgagtttcatagagtagttacgttgattaagttagatgattcaagttagtcttgaatgaggaaagaatacacttgggaagcagtgaaggatggattctagtctttggagtctttagttctgccagtattttccagttgaatggaaaattcacctcccagtttggtttgggtgacaatgaaaggattgttagacctgaatgttttctagaaaaagacagagatcaataaggaaagaagacaatgtgaatatctacatatgttcttgtaatttttctccattgttttttgctttgatgaacaacatcattatagaaataattaatgttaattaatatctgtgtcatttcttgtaaatggtagtatattattgttacaattagaataattcgtatacagcatagcttagtgacatgataaatgacagagtagaatatgttgagtcttatccattttgatatattagctgattcacttgctcaataaagacaaaagaaaggcagagaattgggcagtaacaacagcaacaactataaatgcatggcggctacattttcaggtttttatttttctgccaagttcctgagtaccgtgggttgttgacattttatatttcttttcttttcctgttgttaaatcttagtccctgattgaaaccttcaagaataggatcatgaataaataaagcaaaggaaaataaaacatgacttccacattttctagatttgcatatgctatattatacttggtgttttatttttccaggattattcatgatataatagacagctgtctacaactctgatttatttttcagaacctatgagaaccccaaagacattaaagattgctgaaatacaggcaagacggattgctgtggactgggaatccttgggttacaacattacgcgttgccacacttttaatgtcactatctgctaccattacttccgtggtcacaacgagagcaaggcagactgtttggacatggaccccaaagcccctcagcatgttgtgaaccatctgccaccttatacaaatgtcagcctcaagatgatcctaaccaatccagagggaaggaaggagagtgaagagacaattattcaaactgatgaagatggtatgctcatactttgctgtttaaaaggggggaattctctaacaagaaaaatgtgattactttaagattttcctaagattgtccaatactgaattggattctgaaatcatctaaatgttattaatgagattaactttggaaaaaaattgccttttacaaaacctaatattcttcagacaagcatccaaatactaaatgaaatgtgcttctgttgtcctctcttcttacacagaagtggcaactacactaaaaacttaaatgaaggggttttttaaatcaaatgttcaaaaataatttttactctccatggcactatatcaattgcctattggtaaaatgcacttgataaaaaacttagggtttttgtattttataaaccaatagtagctgtttttatttttctcacatttgaaaacaacactgttgggccgggtgtagtggttcatgcctgtaatcccagcactttgggaggccgaggcaggtggatcacctgaggtcaagagttcaagaccagcctggccaacgtgatgaaaccctgtctctattaaaaattccaaaaattaactgggtgtggtggcgggtgcctgccaatctcagctattcgggaggtcaaggcaggagaatcacttgaacccagggacagaggttacagagagctgagatcgcaccattgcactccagcctgggcaacaagagcaaaactccgtctcaaggaaaaaaggaaacaacactgtttatactgcttaccctttctattcattttagatggttttatgtgagtctaaatataaaagcaagcaacagttcatatctgtaagtctaatataatggcctttattagacattagcaagctgttctttatgtatcttgttgccatccaagtaactaaactgtactttgtctaatttctgtgtgttacttcttgataaataatatgaacaaatatttatattagtattttaatgttcacatacctgttatagcactacagtatattataatttgattgataatatatttcctaatttagcaaaaacatataaaaatatctgcaaatgataatctaataacaataagtcactctttggatgtaagatatttcctttcaaaatttccttttatgaattaaggcatgtagaaaaaaagtgtgccatatggtgaactgaggcaaagctaaattaggagtcagttcttatctttcaatgaagggcttaaattaagtgatctctgaggttccacccccttctaaacttcttcttaagtagcttgacagtagggctacattttttttcttttcttttcttttttttttttgaaacagtcttactctgtcatacaggctggagtgcagtggctcgactcggctcactgcagcctccacctcccaggttcaagcgattctcctgcctcagcctcccaagtagctgggattacaggcacctgccaccatgccctgctaacttttgtatttttaatagagatggggtttccccatcttagccaggctgctcttgaactcctgacatcgagtgatccacccgcctccgcctcccaaagtgctagggttacaggcgtgagccactgtgcccagcggggctacatttttatttgagtttcataaaacagaatgttttttataaccacgtattcccaagttcccttaagttctgaattttagatcaggtgtgtcttttggtgcctaccttctattagcttgccataaaagaggttattatgccatagtttttacaaatacttataatttcaaactctcccactctgaaagtggaaatgaccatcatttcatgtgccttgctgtttttgttgtaataagagaagtgagagccctttaaccacatttagctcaaaatttgaaggaagcaatatagttcggaaactatacatggagttactcatgttcctaaaatttctgagaataaacctaagacttatttaagacttatttatgatgaatgtgcttttgtcatgtttgaggtaaccaaacatgattactttagctatcatgtttgaactggcacctaattgaagtagcaacaacatttaaacaacaccccctttcctaattaataaacacacaaatatccttatatcttacccctgccacacacacacacaactcaatgcatatttatgcaagaaagaatgattaggggtaattgtttcataggcacataataaaaatgagaagtctaactacagattcaatagctccaaaaaatttctatcttttcttttaaaatgggataaatgttataaggtctgtgtcacactaggcactttgtagcccatgtgttcagttattaaagtatattcacatgttttattgcctacccttaaaaaaaaaatcatgtcctaattggtaatggtagactcagttacatagttttgtgctgctttagccagtcactctctagtaatagaattcattttgatggtatttttggatatggtttgttagtttgcccttctttcccacaaacaaaagaatgcagccaggcttatataatctttttcatattgcattaaatttttaaatgcatttttcagtataaatatgactagactaataatcaaggaatgagttgctttggaattttaaattatgccctacattgatcaaactcatgactgtactatttatcttatctaaaatagttttgtaaaaatacaatgacattaactattttttgaaatattttaaattctaattttaatatcattttcaatcctagttttattttaatctctgttttgaataatttttccagttttaattatattaagtttcgtattattatttcatagtattgtcacaaactaatcccttctactatgagcgtaattttttctttttgtttaatatataatatttaatgattgatacgtaaactcttccatgaagtatttgcaagtaactctgtcttcaaatcagcatgtgagcttcactttgtacatagaatacttgatgtgtcttaatgttcctgagcagggaaagaatatctaaatcataatctgttgttggaaagatcgatggattatgatgatctgattaagtcagtgttactaaattattgctgccctgtatacatagaaaaagaataaattatcagccacctaataaaaggacataattttataaaaagaattctgggacatccataaatcatgagagcaaagctagaaccatttcccgccagaaccctaaggtagaatttctatttaatttattgcatacactttttaatggacgaacagaattttctgtatgaggttttgttttcattttttattccagcattcaaaaaatcaatattataaagttagctcagcagaaaagcctggtttggggacatatttttgagactacaaagctatttttgaaagtacatttattacattttaaaggctataatgcttatctaatataatcttgccccacccatattttatttccactctcttttccattttgagagttatattataaaggactttcaaaaaaagtagctgaaatagctgtcatataagtctcaggcaagggaacaaaagtcagcattctgtttccattaaaagttgttgatgtggaaatgtgaagtgacattccctgcaatcagtagactgccatgataatggttttagtaacttcatatagtatttacacaaatcataggtacagagagacattttctgtctataattgtacacatgatcttccttcaaatgtagaaagttattgaatctactttgtttgtgctcacacctcacctcacctgtttgtgtgtgtcttttagttcatctaagtatagttccttctctcatctatgatcatccaagtacacgacaagtagtatgacactctcttgtccacaactttgccacaaacttttgtcttacaaatgcaatctataggtacttgtagtgaattctattgtcaaaacagaaaaactgtaagagcatagaaatacaaaacttctagggaaggtacttcccaattctactcctttttcaatgtagaattatacaaatattttaaaccatccctattattgaacgatgttcgataaaataaatctatgccattttatggtatttgtaggctaaattgtgttaggtaaacataggcagttattataattacaatgccatcaaatcaacatttattcattaattggatattttgctccctttttcccccattagccaccttctatgagagatacgtaaggatgaagaaatatcttttccttcaatataatcataagtgtatgtcatttgcatataatggaaacaacaggtactcttgcaagacaaaccaatgcccatggcagccttagcaatagacacagatgtgcagaggggctctcactggccctctgtctggatcagctgcacagccttgctggtactgtggagcagggagagagcggatgcattcagttaacttctctcatagtcttcggctgacaatggcttgaacatatcttctaaagtttagtgctggcatattttctgtttattgtgggtttctttcctcaatgtatcaaattatgttgcctgtctcagaggtcatagtatcattcatagtctccttgtagattgaaataaatcctgctctcgtgagatatcattcagaatttcttgatgctcctagccacaatgcaatgtatttcccttgatccagtgatttttaatttatttcaatcctcacaaaattgctatatactttgaaactacatttctggataatgtcatgtgtgaagttcactgaaacgttagattaagggaaaatattaattaaaaactatgcttgcccaatattcagttgatattttcaaaaagaaacacattttttagccaagtaggatagatactatatattttaaaatattatcagaactagaaattggatattcatgtgaataaatagcagctaagtatttaaataaaatatataaaaggaaaatacacgatagcgaaagaattttttatctggtattttgtcaatagaagctggtgcatcattcagtgttgycattgtgtatgaccagttatatgacatttgcaaataaggactgaagcaaaggctcttcaaatatggtcatagctgaggacacttccaaagtagttgtgcagatcgttgagttctaaacaagtctgacattataaactagtttgattcttacctttgaataagtgaatttcctttaaaaggctgaagcagtgacatttgaacctatccatctgtaataactctttaaatatggtaataatcaacactgcctttttaaaattacagaacatttaatacatatagctataaaagtaaggttggctattaatggacatttcaattcattttgctatgtgattcggctttccagaccaaagagtgttaattattatcgtaatttattatttatcaactttgtttatggagactctttgggggatttgcataatcttcaaaaaaatctttggggaaatacagctctgttcttgaaacaaattacaaataagatcctcacgttattagaggtatacaacagaggaaactagactacataatttatgcatctctctaaggtgatagaatattcttttgaataaaaataactttgcatttctacattttctgcatcagaaccttatagacttgctttaaattctcatatatcgaagtaaaatcagagaactagtcatatagtttattttgtttttaaggacacatttttatttatttttctttatatttatttttaatcctgtttatctagcttatctgatttactttttctgtttctaatgtaagcattttcataacaaaaaattcatgtgttttgtagtgcctggtcccgtaccagtaaaatctcttcaaggaacatcctttgaaaataagatcttcttgaactggaaagaacctttggatccaaatggaatyatcactcaatatgaggtattgggagaacaaggaagttaattgaaatgtggattgaaggactaaaaggaagaagaaaggaaaagttagagggaaatatggaaaagacgtaaatgaggattaggggattaaaatcattctcctttgttttaatttacagattctttgattccaaaattaagcgtcaaaataaatattttgtatggcatctagaattttcaaattcttaaaaaatgcatgttttttgttgctgttttgttgatttagggaagcaggatagtcattatcagatttacgatggttatagtaataatcacatattaaaaaaccctcattttcctttttataaatttaagaaactcctatcatactgtgatttaggagaagccattgaatttcagttgtttcagagtaaggaataatacccaaaaagcaaaatagattataaagctgacttttctagagcttcatttcaactttgaatataaaacattatcttttcaaatatgagaaactaaaaaagaagaaatgaaagaatcatttaagttacacaaatgtgtagttctgttcctacatagcgttgattagatcataaatgcttaaatttctaatggctacagagtgaattatggaaatgagaatcactagtacaatgttatattttgaaactgtgttcacatatttgaatactatttacatgaaatttgttatataacttgaacaaagtacagaatatgttaataataataaaaatttgttgaaacactttctgtgtttcatatgcattaaagtatatggctataagattttttatgtacgcataatttattgtggtttttttgatggaagaaaatagatgtatattgatttggtcagctataactccggtgtatctgtagatagatgattgattgacatatagacagaacttcagaatgacagaaataacaatatcaacatgagaaagaaaagaagaaaaaaattaccattgactccacatggatgcccttgcatactaccttatttatacagagtttatttacagtttcttatgatggatactagatatgtaataaatgtatttcttaaaacagatcagctatagcagtataagatcatttgatcctgcagttccagtggctggacctccccagactgtatcaaatttatggaacagtacacaccatgtctttatgcatctccaccctggaaccacgtaccagtttttcataagagccagcacggtcaaaggctttggtccagccacagccatcaatgtcaccaccaatatctcaggtatgcaaatgaataaattacaaataggattgattatgccattggtttgtaatggcacatcctggagaatcacatataaaccaagtgtagttcatcttgcttgttgaacctttaatatagttatgcataaatgaaagcactttaaataattatttgaatatgaattatatgtccaaaccaaaacacatctgaaatagtcacttttgattgacagtggtcttaaaaaaattatactaaatctttattaaaaatctttcaaaattcattataaatcctaatagatcttatgatacttttgaagagttgataattattatggtgtcagacctttactctaaatgaatgttatcaaaaaaatggtagaagatcctttctctagtattatagtactacataccttgtttctgtttcattttccctgacattatgataattttaaacaaagatgggcttttctttcacacttaaaaatcttatataaatacatataagttttaaaatgggaacgtacagaagaattttaggttgataaagaaattaaactttacattctattgtagtcacagttgcacagtttgtatttgactagattgtttacagagcttatttctccttcagtcagatcatcagttaaacctgattaaattcttgcaaggagttagctttgtagtatgccctaaatctactaaagtttatataatgttttttcttatttaagattactaaaataaatacatattgtatatgtaaatgaagagttaaatttgaaaaataaattatttaaaggtcaaccacacaatgtagtaaagcacaaattttgactttgttaattctttttgttcatttgtgttcatttttattatagttccacatggcaaatattaatgatacatcattaatacccataaaatatgtctttcatttttttaatctataccatttgcattaaaaggaagacatgtactttccaaattattttgagtctaaaatgttacttgcaaacgtgttgagtataatacaaactttaaaaatttgtatcatgaataaaattagctattccattatgagctataattccttggaagagcatttgatttatcttaatattccaataaaaaattaaagtatcatccattatattataaaataacaatgttttaaaattgcagttttctttcctgagaacaattacaaatcatgaatttaaaatatgtattgaatcactttaccagaaaataagacttggtgatgttacgatgcactgagataggttttctaccctctggaattagcagcagtgctataattgagtaagatctttcaatagagacagctacaaaatttatataaactaacaaaactgagaacattgaacaaatgtaaatttttgagagccataaatgtttgtgtgtgtgtgtgtgtatgtctctcaaggctcagatactgtgtttgtgttgaacataaagtttataaaaaagaccagaacatccatctgattttttcttttaattattcaacttcacttttacttgtattaacctaagtgcaatgagtacttgattgtactttaaaaacttggttgcaatcactttatgttaagaacaattattaatcacatctaagattaataaatttatggttagtgtggttctcatcattacttgaacttttcagataatttattgtcaaatttattccctgagtccggtaattacatttctcagcatttaaaaaaataatttaaataacagtgaaatcaagttattgcaggcataactgttgggggaattatttatacatacacatacattcacatacacacatatacacacatacatactacatattgtgcatgtattaaattaatatttgttgtttctgcttcctaaaaaactctcagataataattaatcttctaatgtcactgctccttttcttccatctagacagtattttaaacagattattgaaatatctttctaagtggtatccctaccttcagacttacccatcttcactgcatttctatatctatctttaatccacagatatttccttcttaaatattttcgcaatcttgtatcttataatcagcgggatgaagtctaaagatccacttggtgttggcattcagggtccttctttgcatgactcctcccatcctctacttctccccatgagcccaaagttcccggcacagccaacggcttatagctgttaaaacgtaccatgccctttcatattttgttatcttcagatattctgcttcctttctcagaattttagttcatcctttctcttcctgatgagtttttaccctttttttaatatttggcttaaacatcattagacaccctgagccttctggtttcatccccccactgccaatactaatgaaaaaagtgtgaccccccacccccagaccatcatcaccaacatcacctgagaactgtctagaaataaacattgtcaggtccctccccagaaatactgaatcagaaactctagggtagaggggctataatctgtgtgttagaaagccctccaggtgattctgatcttacaagtttgagaaccactgttttggcaaatggtcttccacttttggccactaacattttgctataattttttgtttgtaagactcttacttttcataaaatgtgaattcctacttttaattctaaatatcagagaccatgctttgtctttatattcatagcatttctcataaaacttggcacatagtatatattcagtaaatgttcaacgaatggatagagataatgcacacatttcattgagtatatactccttaaacagctttctacatgaaagtcatccaaagctatttgaggtaactctttttccccctcaagatcctagtccctaattaagcattatcaaatatttaaaaaaattataaatttattctttttaagaatctggcaactaatgtccctgatgaacaaaagctaagatgtccattatcatttaccacacttcttggtatgtttctcttgtgaccagagttgtgaaaaacacattagcataagagtactgtgtctttctacactataagatcataaacgacactgtttcaccaggtagcccttgacctcagctcttgctgttcatagctcctgatcgccatatgtgactccataagcactactgcccagtcttctcagttactaccttccctccctcccatcattactcacttgaaggtctcaggaaactaaaaggaaagcatcttcacaaaatatttggaatgtgtgtcataaattgccagacgattatttaaatttccacagcaaatcttggttttctagcttttgatattttaagttcccagagttgaaattcatttggagatgttatgctataaaacaaaatacgttgtagataattaggtgaatttttttttcctaacttaagattgtctgttcattctgacctgtgatatattactgtaaattaattgaaccttttttatctcattaatcactcatcagctccaactttacctgactatgaaggagttgatgcctctctcaatgaaactgccaccacaataactgtattgttgagaccagcacaagccaaaggtgctcctatcaggtaagaggagaaaactacagtagttctgccttatccacaggtatgtacatcccaagatgcccaagtatgcctaaaaccagagatgataacaaaccctatacagactgtactatgtttttttctatatatgcaaacctatgataaagtttaatttataaattaggcacagtaagagattcacaacaatcaataactaataataaaatagaacaactatgtattttaataaaaggtgattatgttctctctcaaaataccttattatactgtacttacctatttttggacgagtttgatggtgggtaattgaaacacgggtaactgaaactgagatatgagaaactaggtaggcagggttggggggtagtttttcttttactgtaagagttaaagaaaaaggagccagaaggttgcttagcagctaataaagtggttcatttcaaagatacattcattggagaatttctgtcaggagagttttatttttgtttagtttagtttggtttcctttggtttgttagtttttcatttggacaaagcctgcagatagacttgtagttaagagcaaaattctaagggcatttttgagatattcatgcactgaaccattcacctctctgtgcagtttgacttaagagcattggcctttttcccccctctagtcccatttcatttcacgtcctctcttggtatctatgttataagagctttgaagatatttgtcagaaataggatgagaaaataactcctgtccaatgcagtaaatcagttatgaataatttcatatgaatgattgaaaaataagaagctttgatgaaataaaagcagaatagttagaacacatgaagcctttttgaccttttaattcccgaattgttccttatcaagtattccagagtaaattgaatgttcagtttgccattttctttatcttttcaacagtaaagtctcatattatctaacatccccatctttcagaaaattgtgagccatgtgatttttaggaactaagtcaaattgttacaaccattttaatttctgcacatttgtaatcagatgaatatccaaaacttaaacaagtttccatttgaaacgtgattttgtggacattttgttatcaaacttctaatgagaaataaatgaaggcacagaaatccacrtaggcacttcataattggtttatatcaagtcgtttacatattcagttaaaaataaaactaatgtttgttctttgtgtaaaaggaatacatttgacttcgtgagcacgtattagccatccaaataaccaaaaataatcctagatcactggaaatgaagaaatattttttcttaatttaagaaatgtattgacaaaagaatacaaatcataaagggaactcttgagtcttgtctggctaaaaatcatgagaacactataccagagaaaaagagttggctgagggtgtacttgtaatataaacacttatgaaacactggctacttgaaaattcaaagtacgtatatagtgctgttcatgaatcaatgatctgtgagtgaatctgattgctgatccaaagtagaaagagaaaatgcctgcactcaacatcttttcctattgacaagtaatcagggtcattcacatgttcctacctgtgataaaatttactttttaggtgttcacttctgttactggtgcttaaatcagctaccagctacttgcatttatcttttaagagttagatatttgggtgaattcaactttattttacgtaagttgcaaacacagcatatttttattatttttgcatcactgtactatataatgtaacttacattaactctttattcacttaatcaattttttccacaaacattgattgatcatttattatgccagtcactgtgcaaggtattgtaaatcaaagataaaatgaccacaacaaaacacagaatctttgcccaggtttgtcatagaccatcagagatgcctgcagccttgtaaatcatttgctcatagctggtgttcaggaattttgttaactcagtatgttattgatacacgtttttaaatttaaagtcttttactttattacctttatataatttctaaagaccaattagaaacactcatctttgtatttgttggcaagatttttgaccttttctagaattgagccagaggctgagaacttcaaattatacattgttggagattagtgctcagaaaaataaatttaaatcctggaatattacaagaagaagtaatttaataataatataaacaacagattttttttgaagtgaatgttactaccaggaaaataaaatctgctttctaactgatatgctaatcccaccaagtccatctttagtttttgtaatgacttacccagttcacctacaggtgggtgccaggtggtgggaccagamtggtctagtcaagtaatctggcttcagatgagccctgcctcctttaccctctgaatcctttgtgctgtctttctttcctctgaccacattcctactttcagtctccctaccagcaactgtagccttatcgtgaggcttatctgatccagtgccttaattttttgaaaatgaagattcaatttaatgtaatcatttttccttaccattgaatttatggtctggtatctcaaatctttgattggattcccatcactcacttcaaatgtacttgaagcaattttactttccactcaattttttctttgtttatgtcagtctgtcaaaatctcttctctgctaatgcttgatgctattctactctgtgacccttccccctgccacccctgtcaccttcccaaataaaccagaactacatattatccaactaaatctgagagcatccaggagttagcttgctggctgtcatagaccctaaatactgggttctgtccttccctaattatagcattactagcctctgccattttgcatttcaccatctrttcatcccacctccagtggaaatatgtattctttctgcctggtcttcctaatatcaaacaaactccagttctacagtcctctgtcataccaactagaaaatcttgttatatagagttttcgtgtttagttttattaggaaagctaaaatcgccaatggattctataaatttgttgactcaataacattctatatgtgccaagagctgagctgcatacttgaaatagaaatctacttaaggcaattagtatgtgcacccgtgtgagtggtagactcctaaattaatgactggtaacaatgctgtgtgataagtgcaataataacagctagaaaatgtggtactaaagctgaatttgtgaggagaggtagaaatgagcatggccaaaggtcacaatgatgcatttacgaattgcagatagcctaggtcatggagagtgaagggtctgtgggagaattgacagcagctgaagctggagagacaaaacagggagcaaagggagaggttgtttagtgccagccccacaactgaaggtgggcacaagaaggactgtaagcagaagttaccatgggcagttttacgtttttagaaagatcactctgatagaaacatagagaatggactggggataatccagaaggctggagtagtccctgtgagaagtgctaatgggccatwttaagaaagtagcaatggaaatgcaggtaagactgtggctcctacataaggttttagatcagtaggatgtgtaaagcttcatgggaagggagtttgagtggagactttaggtgagagaagatggtagcttttatatttgaagtggtagcagagcaaaaagacatctcagaattcaaggttttgttttttgaggttattaagtgataaatattttcagtattgctaccccaaatcaaaaaagtaatgctctctctatgaaaagaggagttattttatatattttgcctaccttaccaatattttcaccaagttttaatctctaagagatcatggtgttgtgcttacataagaagtaatgaccacagtgaaaaatcccattctgcataatgcagcactaagtttcaccaaccacattktccttctgttacccattactgcttccctatgctaatgtagaacatgtgcgatgcagtgctggcaagtgtggttctttgacgaaattaatttttgattttataatcattctaaaaactgaacattgttgcctgacttaagtagaactttgaatctccttaccaactttttgagatctatccttacaactgtcatcacttgacaatcattactgtrttcaaaatgaatattgtctacatttagaatcaattccctagaatacataattccttttcttttctttctaaaaggtttcttcrtaaatgaattaaaactctaacctgggaaaatataattacaaattataatgcatagaacgtcccatttattaaaagattgacccaatatagctgtgttttcaaagaatgaaaataacagcagcatgttgtaaaaacacaaaatagtttctctgtggtgagactgtttattgtaaagttaataaatgaatatatattttatttcagcattttccaaatagaaactctacccattttgcgctgcaggaagctacccattctaaggttactttgttttgtggagaacatctaatttgcatttcataacattaagcaccacctatttagtttgataattaaaatatagtcatgaaataaagtcaaaaccaccatttcttccacagttaaattaggaaaagaaattgtctgatgttctaagttcactgatagcttaacagacaaatgtatgttagggttgcatagctttaaaatctggggctatcctcatccacctgcagaatagtctgtttcattacataaatttaaagatatcaaatagttctaattttcctaaccactatcctgacctagagcttacttgaattccaaataaaaccatcttgaaatttaactagagatggaaataatctttttgccctcttttatgggcataaaggtcatatggtccaattagatcaaatagatgttactttaattttatgtttattctctagaatcatagtaggtagaatcrttataatttttctaatcaaaaataggaggaagtatgcccttcttgttaaatcttctttctggcctctagaatcccagtccacagcttgcttatgaccttgtgagaagccctgagccagacctgtcttagcttagcaactctggaattcctgacccactgaagctgtgagataatgtttgttgctttgagctacagaatttcagggtaatatgttatgcaggaagagattatacatgtacccaagtagtataaatcttctctttcttcagatttctgcccaacggatacttttatcacataaggatttcttgaccaacccatataaaatagcactctgcattcccatcattccctctttcccttagcctgctttatctttctctagagcacttatcccttcttaatatgtgttggttttctgaatttatttttttatttgtgtctccccactagaatgtaaacttcatgagaacagagacttttgctactatcttcattattttaacctcagtacttaaaataattcatgatatgtaacagatactcaataaatatttggtgaacaaatgaactggatctaaaaatataacagccacattctgtagtaagcttatcatctgctaaaggaaagacatatacctaaaaaactatttttaacagtataatatcaaatcatatttgtaatgtaccatgttggtgcatgtaatgtgctacggccacatactgatgtatcatataagcaataaatattagacagcaatgctaggtcttttgttttttccaccctagagtttttgagaataccatttatggttctgataaatggatctttggcattataattgtcagtgggttaggaactagattaaacatgcatccctgtgattgtgacttctacccccatgtcatccttcagtcatcctcatcttaaaaattactccattgcctttagaagacagagtactgaggaatgaagatagttcaagaagccttcatggcagaagtagaaaaactagacaagaaaggcagaaattcttgactgtatgtttagtatatttgggtaacaatggtcataccagcttcgaatggaaaataaatatcaggagataaaacaagaatggagatataaggtaaggaatgtggtaatttatcaaccccagcgtaaaaagtacagagtttgactttgaatttgactgtacttcaaattttaatgttgctattatcctgggctagtgatatgtaatacatgagatattaaacactttattataaaacaggttttgtattagctgattttgccaactataagctaatgtaaatgttctgagcacatttaagttaggctaggctaagctatgctgttcagtgggttagatgtattatattcatttcaatttacaatattttcaacttgtaatgggtttattgggacataaccccatcataagttgagaaacctccatataatgtagtaaaatatgtcattttaattttttaaaaaataaggaagtcacattttgtgtattgaatgattaatgataccaatatattgatttaacctaattacagaaatatttttgaagtttattaaaaggaatggggaatatattaactatgggtagagtgattaaaaatattatgatgactttggaatagttttaattactaaagtactgagctcacctaatatttagatctagctagagtttagttccattaggtaattagacaaccagaagaatgaagaagcacaatcccatttcatgtaattagtcaactcacttctaatgcgatttcttatttcttatttcatcttttaattaatttgtattgataaataagaaaataacaaggacagaaacagatttaaaaattggaaatgtggttagagaacagcctttcagattgaacaatgaaggaaagatagtttcttttaaacatggactagtgtgactttttgttatttttatagctgtttttcactaaatgtaaatacttcttaaagactcaccatgattacaattgatttctgtgtgagttataaaaaygcctcttcaatgggcatgaaaaaaggtagaaatagatgcacaaagtgatgcatccagaaagacactgactaaagactgagcccaactaaggagagtaaaatgccactagagaattttgagggatactggtacaaggaaagatacttttcatattttcagtatcttgaaaaggtagcatgctgcrgaggtccagaacagaaagacagcagtacagcagacaggtgtatatcaagattttaaactgaaacgggtatttctgggtgatgttatagaaaagtagtacaatttcagtttcgtttgggtgtaaaagcaaaagggagtatgagagatgactttaaaagactctgaagatctacttctgggtagctgtcccagtcactttaaatgcttaccatggacagtcacaggttcctaagtgaacagagttgaaaagaaagtatacattttagttttgttgtcgttttaaactgtatcaaacttgagaggggcagaaagcattctaaagatggtagaacactagaagtttcagtaaataaaagtgaatataaggtccgtgaaagscaggtgttttttttttaacctctctatcctcagagcctgcatgatacctgttaaatatataattgttgaatgaaaatgagttaatggatacaatgtcacaggaagaaaggtaaatgagaaaattcttactcttcaaataatgctcgggatttttcaggtgaaaaatgtactttcatggagaaagaaaaagagtatcttagatatgtcctaagcaaaaatatcaacagaaaaggcaaaagcaatgtattcatttcataaacacttaaacgtccattatcctatttgaaaccacatattccagtgtggtttcaaataggataatgggcgtttaagtaagtataatatgtgaaaatgtaatggctattgtatcagcttttggagttaaacatatttgggattaaaaatatctagaaactggggtgaatgttatatcatgaagacatttctcctggtatgagtggtggtagagtgggagggttatagagtgcggtgaccaggttatctccaactagckttccatctaatgttactcattgcacaaagaatgttttagaaagtatgcttggaagccagttctcagaagtctttttgtatttatgtgtcttagtttgctcaggctgctattacaaaatactaggtggcttaaacaagaaatatttctcacagttctggagactgggaagtccaagatccaggtgctctcggatttggttcttggtgagggcccctcttctaaacctaattattttccaaaggccccctctccaaatactatcactttgagaattagggttttaacatgaattttgggggagggggcacaaatattcagttggtaacactgtagtataaagtagagaatgaacaaagtgaggttcctggtttaagttttaaggggagctctattcttctgcctcagtttcaatagtaacagaaatrtaatacttcatttctgtaatgaccattcaaagaataaatgaataatattggtagagaaaagatatataagattaaagtgcatggcactgtaatttatatttgtatataaattatgtggaaatcattttcttaattctttatgaaacaagcatgttacttgtattttagaacttataaaattgaaataatttatctttcattttaattgagagtagggccaaatctgaaagttcaacccaaggcattgatttttattttctatgggaccatacttaaggctctttcccaaagagcctattgcaccttttcttcctttactcttctccaacactggcaatttactttgctcctcacagatctagatagacaagctgtcttgcatgaagtatccttaatttgtaatgtagaatctctgtcaatgtaatagaattagttaagattgaatgttcactagattttgtgtttttttttctagaggtatgggataattaatgaagaatctatttttaaggattagattaatgattaacaaggataggtaattattattattctttagggcaagaatataaggttacatttgtttggagagcatgtatgagggagtttatatgcatatgtggatgtatccacaggacatgcaaatgtataatatacaaatatgaattataaatttaaaataaaacatagcatatgtcagctatgatcattctcgtctttctccagggctatgcgtatgtattttctatatcttaaaattgacaaatgcctgctccatggatgcctcagagaccatgcatcttgtcagtagcattcttagaagcttagcaaccaacttggcagaggtatagggaatgatgcagcacatataatttgaaataacatagacttctgccttgcttgctcaaatcacaatttctaacattaatacaagttctgttatctttttagaggaaacaagatggatatgaacctactgatttattagcaatattttaatggaaaatgggagcttaaataactaggaagaaaagaaaatctgtaatttatcaattaaattatgatttaactctttcttttgatgtccttttgtttaatctatgaagatcttttatttgtaggcataagagtttatattaaattagaattttatgccagagtctaaactgttttaattttcatagatgcatgttcagtgtatctctctctctcctctctctctctgtctctctttctccctccccctctcctccccactcccctctacctacccacctctttctttttcatggaagtcttttaaagaatgtattctgttcctcctggagatccattgaatatcaatatgcagccctgcatacaatttatgttcaacttacctaagataccacatatatttttccagaatttttaggaattttaaaacattttaaaatatatttataatgtataaaatatattataataataatgtcaactttcatggtaatattttacctgaaaaaattttaacktaaagaattttctactaaaaaagaatattgttaatataccagcttcagagttgttaaaaaatattgttagatatccgggggatctttattttaaatttgccttgtttttctttttgtttttttctctcctttgtaaagtaattgcaattatagaaaagttttaagacttaaagatatcagaaggtttaggttagagctttaataggccaaatgccatctgtttctacaatttgtaacattttattattaacaactccagaagaaggaggcggtctatttcggttgtgaggacagatttctgtccatctgtgcccgtattgccgcatgtcacttgtattttagatctacatagctctgagccagtgtagatgccatggcaaggtcaagaggtggagaagcctgtcagtacattctgtctctgaggctgtgacaaccacaaatgggtgcttctagcaccgccctgaggcagtcattctgttagaccttggagctggactttctgtaatatcatttcaagggaaaatgttaactttaaacatttaaaaatatcagacaaagarctgaatctatgatgtgtctttggttaatgtcagaatccttattagggtggctcattcctcaacatttaaaaatgttgaaagtcctacggtgattgttcttctttttatcagtttctttgtaactacagtgatgttagggacagcagcatctatatggatttttcattttattgcgaaatagctgaaaagagtrtaccaggttaagactaactttaaatactttgaaatgtggtgtgttaatagtcaaccccttaaaaaaaatcttagtatcttaaayctctaaatatgtgtgtatatatatgtgtgttctttttttcttttccccaaagtgcttatcagattgttgtggaagaactgcacccacaccgaaccaagagagaagccggagccatggaatgctaccaggtkcctgtcacataccaaaatgccatgagtgggggtgcaccgtattactttgctgcagaactmcccccgggaaacctacctgagcctgccccgttcactgtgggtgacaatcggacctaccaaggcttttggaacccwcctttggctccgcgcaaaggatacaacatctatttccaggcgatgagcagtgtggagaaggtgagcttcctccaggatttgctttttccctgctttgaagaaaagctgaagtcaaattttatgaatactcagtagcatccgtcaagaaaaaaaaaaagaaaaagaaaatttgcatgtagggggttctgttctcaacagtgtgcgcagttttggggctacagtagggctgaggccgcacgccagttccatttcacagggttcctgtttcctagtaactgcttctactcgagccttcctcaggaaagcccacaatagcaattgagagtaaaatgatttgaaaacgtgggtgtgctgctgctgggactccaccctcagtaacgatcaggcattgttctgtcttccttgctcagtggtggcacacttcaagagattaaatttactgcaggataaacagaatgcgtgttccacagcaggctaataaaaccttataaacttttcagggttttcaagccaaatagtaaataacatgtaacaatcctctgattacaaagtaatagggcgcctgtggtatatctgactgaacctaaacaaaaggcagcctggcgatgactggctgctgagccattacagaaggctgctctctgtttccctggttgcccctccttttcccattttggacacagttgtttttgaacactgctgctgatcccaaatgaatattgaagaggaaaacacaacaggacattagaaacgaccggcagttccgtatgtgrgaaaacaacctggcctttcatgcctcatgctgttctctttggaagattttctttcctaaaacttatttttatttatttatttatttatttatttatttatttattggcagacagagatagagggaagacaaatgttgaggatagaaattttcacaatttaaaatccaatagaatgatgacattttaatagacttgaagccgtataggaaattgctgggtttatgtaattgagtccctaaggtgagcacctgggagtgatacatgatatacaattacatcagtcatattatatcttaaagagtttaattggaagacataacaatccttttgcatttctgcaggggccgtgagagctttgggtattgattggctgcttttgaatcaaagctttgttgtttgcttgcctgtatgcttggcttgtaggtagcaaagaaaaaggccacagcatcttctaagatgtgctccagagtcagaggctgctcatggttgaagatgctcttctcgtttacctttaaagaactgaggtctttagagagtagtccagtgtccactttctgcctacatatcattccataccactgttacaactgggctactataaaaacagaacactatggaagttattagtccattctgggtataatatagcattgagtaggaagcatagttttgtgtgagggttttgatctttagagaggttccaaattaactttggttatttggtctattataccagaggagtgttaatgaatgtctgttacttataaaggattttctctgcattctttaaagctttttgatatgaattttctcttccaattgttaatatatctgcactgtggtttaatcaaagtacagaatagcaacaatatatttcacagttatcttggcaaagagttttaaagttgatgtgacttctacaagtagagattggtaatgccattagaaagttaaacagcaattgcttttaagaaatgaaaatcctttggggcctttatgggaatgtgaaataatctcttgcaggttaccatgaaggtctcaggccacaagtaatagaagtgcaacattttatttttaattactaattcccccctcactgctttattttaatttaaaaataaaaaaataaaaaatgcttaagtggaaattgtaaactcttttataaattatcaacatatagaactactcaagatagagttataaatgcatcttgcaaacagatcgcctctggtttgttcactggctttgataccttttctcacctcttgtgtattcagggatgtacgctgactcaattaagtcctagaggaggaagagtggggccaaaagtagctggcagggacatgtgtctcctactgccacctgacagcgttaaaaataatcatattttttcttgtcctttcctactgcttctactttgtatacccgctctgtctagcaagaggaggaaaattatgtatgctgagaaacatttaactcctaatagctaaattaaaagaaagaaagaacagataaattacaccataactatgatgtaatgttttgatgatctttctaactgctatcatttagctttttagtcatgctaggatccagatgaaagtatgtaatgttcagctttggtctcagtctacagttctcagatgaaaattaaatttatatttggaactgtttttattagctttgcaagtacatttttctgatagtttacgaagcactatacatgaaaatagaatgctatactacttgtcacaaactaacctgtttcattgcaaggtaaaaacaaatatttacatctctataaaaactaaaatatttttcaaagttcttactttagatttttaagtatccctaggggggcatattttttaaagttttcttaatattaaaattctgttgtttataatccctttttatgaccccagatggatcttcataataattatagtttacgaaacaggaaacattatctgtacattgactcttttttttttcatttttactctatcaggaaactaaaacccagtgcgtacgcattgctacaaaaggtaagaggtttgctttttttgcttgttttaactactctcaccccctttctaaaatggaaggactttgttccctgcttcagggctaaatatgacatttctgttatagttagttctgtgactcatgtgggtgtctttaacaactaatggggtgctacttcccatcctctagtacttgactgaaggaatcttgttatgataacaggaaagatctagaaaaccttagaagggcttatttctgccatttagtgtctgaaaaatcttgtgctgctgatcaaccaatatcttaggaaagcgtcagcaatagcagatgaaaatagcaagttgcttgtttaaaaacctctattactttccattgtagacaatcaaacataaaaagaaccaagctaattcatgtttacataagattatagggatagagattagtccatatcttcatcagtagtgcagttagcttgaagatcatttactttttttaaaacttattctgagaaaccagatctgtgatggctagctcataaccagggcaattcctgctgacctggcatattatggcttagctgcctagtttctttgacaagagaaaacatttgcatctttgaatgagtatttagagttccaagtgggggaaagtctcctacattctctgtgtttttaattcttcatttaagagttacttgattgtgccaacaaagaataaattgctacttggtgtattctagcaagagaaacatgaaaaagctgtctgcatgcagacgtgggcctcctcaaagggttggttcttggggtggtttgctgccggaattagtagcagacccacatttgtgtccagtagttgattcatttggggtaaaaatgaatggccatattctgtttgtactggcatctttcctttcatcagttttctccatctaatcatcagtctgctcaatcagcatttgtgctttactcctgatttgtaaggcaataaagaaagactttctctttgacgcttgtgaataataaagaagctttatggaagagaaaaaaatatactttttcaattcacttatgaagattccttttggtagtttttatttaaaaaagcaattcttaaagagaaaatatacacagatacatacgatgtataaggattttattttaaaaatttagcttactgatcaggaacgagagttgaaatttttaaaagataatagaagaaagcatttaggtctatatcacctgtgtttttccagatttaaagtagaaccaaaattgtaaaagtgtcccacattgacctctgaagttctttagatatgtcatgctatgtttctgtaactgagaaatggtagctatatattaccctaacataacttttttattcagttatttcattatttgctcttgcctgagatgtttgtgtccttttatcgctctctcgatacaaatttaaaaaaatgacaaatatcacatgatatttaaactataggaggattgagatcctggaaacagtcttaccatgtggcatagaataattgacagaaactttgaagtggtaaaaaatagtccattatttgtctaataatccagctctgctacacttctggatctcaggaatgcagtgtggtgtggtgtagtgagtaagagaaaggactctggccttacactatctgagttcaaatattgactgtgtcccttaggaattttttagtattgagaaacttatgtaaaccctcattccaaaaattaaataatagagtacctacaccttcttattgttgtgaggattaaaataacatatataggccagacacggtggctcctggcactttgcaacgccaaagtgggaggatagcttgaggccaagagtttgatatcagcttgggcaaaatagcaagaccctgtttctactgaaaatttaaaaaaaaaaaaaatgttagccaggcttgatggagctcacctgtggtcccaggtacttgggaggctgaagcgagagcatcgcttaagcccagaagttccagtttacgttgagctatgatcgtgccactgtactcctgggtgacagagtgagaccctgtctctaaaataataaaataaaatatatatgaagtgcttaaatagtgcttaacatattataaacagtacatgtgttaactatcttatcattatgctaataattttgtacttaagagggacataacttatgttagacagttatgaatgaaatatgtataaaaacaaatctaaattttcgtgatcgagattgctaggacaggggagaaactaagggttttttgttcgcttgttttttaatgtttctgccctggtctaatatattttcttctctgaacctttagcattttttccacatatgaaaagctaaccctgtttctacaaaaactaaaaaaaatgagccaggcatggtgacttgtgcctgtagctccagctacttggaagatgggaagattgcttcagcctaggaatttgaggctgcagtgagctatgattgtaccactgcactccagcctgggtgacagagtgagactatgtctcaaaaggaaaaaaaaaagaaaagaaaagaaatgaaaaagaaaaactaccacatttgttaaagtaacatcaacttattgcctgactacattttaaactaacatgcaagtatggtcagctttggtgtgaaatttttcaatatgaaaataaaaagttttctgacagggcgttttgaagaaacatttaatagtcaaaatggcataatcatatgactgggaagaggcatgaaggaaccttctggtgaaggagtggttcagtatttcacaggtgcatatgtaggtaaaaatctgtccaactgtacatttaaaatgtgtgcactttactcttataaatttgtgtgtggatatataggtagataggtaaagtatttcccaatataaaaaaatgaattatacattaaaaattgcatggccagagttagaaacagcactgagaatattatagaggagtctctggagtttgaaaggctcaccttgctagcttcagtgaaggtttccttctatcagacgaggtgcatcttcagtacataagccactttcagtgagaaggacaaccctgcccaggaatccctgggctgaatgaaaagggtctagaaaggacctttcttggtcctggatgactcctatgggcaagtcttgtgtttcagctgccctacagtcagaccctcccctgccycccaacccccaccccctttccagtgtcagttgtgagtactgaagagctagaaccttgctagaaccttgctttcctaatatcctttgtatttagatcaattttgctgaaaagaacttagttctctggaaaatctggtgtccctccataagacattccagtttgcagtgtgtccttttaccacacaaattttctgttcaggccatatgcaacagtctgttgctttttttctcatttttttgaaaacttaaaacattccaaatgtagtctgggacaaagtaccttgaacaaagtgtgtgtttctctcactcactctctctctggaaattattttcacatcccctttattttagaaaaagttgtattttgtatggagaagccagagttcattgttacatgttagtatcatatttataatagaaaataaaacattttactaaaacaaaaaaaaattatttagccaaatttgaagctctgatttaatagtcttatacatcactatatgccagggacaaatacagagtgagagtcatattagatacaataaatatttgttgagttggtaattgaatttgaacaaaacgtaaggtagatgcttctgctttcacgtttaatcaaacaggttacagtactgtctgcaattatgaaaagtatcagagcaatatgtgagttaagacaaatttattaaataactagagttgtttttatttctttaactgtgcatttatattgtgatatatatttcatattctaatatagaatacttttgccaaagctaagactttattttagtaacaaagcagtcagttaaaaatataatctataaactaatgtgaattaaattaaatttaatcctagtctgtgtctatatcagttttattcaaatgagttttcttcagctgaattctgtgataggaagacagtttagctcaaattgtcttttcattgtaatcactgctattcttatgaccatattctatagcttctttgctttcctggtactcacatttcaatgtgaaggacctattcaaatgaattaaccagaatgaatgagttgatatattagagcacagagtccaaagagaatctagctattattacttcttataataagtcttaaattcgggatacaggacattataatgagagattaaaattctatcaagtgtcttaaggatggacataactaagtagcataagaatgtaccatgttttgctaatgagaaactctgacttcattggtggatgtctttaaattttacagtcaaagtagaaataatagctctgaatatttttatagttctcaagcataagatcagaactagaaattaaaaaggagtaacacatacaattttcaacattcatcttttcccagcattttgaattattcttaaagttggcgacagttcaccattactactgtatatctggaataccctgtgtctaactgatttcatcttaattcacttcacattggaccccggaacctctctctctgctctcattgctagtataagtagactcttctccaccatgttcctagagaaatagccaagtcaccgaaacagaaaagatatgagttgaggaccttcaagggtgcatgatcactgttttcatcccaaccccaagttagatggaagttaaatatttctttgctttaaaagtwacaaactattattgtttgcatatggagtattactagtctaataatttttgacagaatgataactgggatgctaggatatagagagaaatggaaaaaaatagaacggacctgaagatgattcaagcattttgcttttatggaaattaaactgttttatgagaagatttctgacctattaccctctctttcctgaggagcctgttgcaggtaccttacatttatggccacgtctrcgggagagaagtgatgacattcattcataaactgatcaaactgtcagtgttaactgtggaaaggatagagtttctaacctaatttgtaatgctgtaatcacatacttagaagagactggaaaaacataaattggtacaacctaagggaactaacttataatccatttcagcaaaaaattcaaaaggtaggtggttatatcatcaatattcaaaaatcaatagtgtagcagcaacaaaacagtattttaagatgttgtcatttataatgtatctctaaaaattagtgtaggaatatatctggtgaaagatagattacatctctacactgaacactacaaaatcttattgagagaaattaaacaatacctaaattaatgggatggcacaccatgttcatggattagaagattcaatattggtgaaatgtcagtgctcctacattaatgtgtagatttaaagcaatcaaaatcccaattttgttaaaaaaattaacaatctgattctaaagacaaaatggaaatgcaaaagaataagaatatgcaaggctactcttaaaatacagttcctggatgttatcaaggccaatataaagttagagtaattaagacagtgtggtaatagcacaagaataaaaattatgaccagtgaaagagaaactccagtaatagatgcacacacacgttcaccattttttatgacaaaggtaaaactgtagggaagaggggaaaaggtacccttttcaataaatgacagtttttccatatctatatggaagacattatatcttgacccctaactcacactatataaaaaaatacagctacatataagagttataacagtatagtttttagaagaatatagaacatattttatgatgttacaatagtcaaagattgactccaccatcctccaccagaaaaaaaaaatttaaacaattttttaaaaaaataataggcaaggattttttagacaggagatagaaatatgctaaacaaaaaggaataaatgataaattctacttaagacctctttcctgtcaaaagatgccattatgagagtaaaatagaatttacagaggagaaaagatacttgtaataaatatatctgaaataaggcatatcaaaaacatatttaaaaactattaaaactagtgaggagacaagagacaatccattagaaaatggagaaaacacttgagcacttaagagagaaggaaatacaaaatgatcaattaacctatgaaatggtgctcaacaggaaaatacaaattgaaaccacaatgtgattccactacacctataccaaaattagtaaaatgaaaaagtgtagaaaataccaagtcttaagaaggatgtaaaataactggaaatctcctaccatcctgctggtgggggtataaatttgcacaaccactttggaaaactgtctagcaacatggactgaaagtaaacccatgtcccaacaattccattcctgggatactcaccaaagaaatatgtatgttaatacacccaaaaacatgtagtacaaaatttatagcagcactgtttataaaagcaacaaactggaaataacccagcaacaaccagtagtagattggataagtaagttgggcatattcacataatgccatgctctaaagcaaagaatgcaaactatgactacacaaaataatatacataagtataaccaacattatttgagtaaaagscagacaacaaagaatatacactttattgtttaatttgtaaaaaagagrtaaaataactaataaaagttaaaaggtatgcagtacctatatagatgtattatgatttaaatattatattatctagatatgtatctgtctcrggggttcccgagactaccctcagattcggtgattcacaaggaggactcagtcatcctgtgagttgtcctgttctcatggctacgacttattacagtgaaaggatacaaagcagaataaggacagggagaagtcacatggacaaagttcagaggaagccaggtgcaagcttccaagagcctcttcctatggaatcacacaggacatgcttaatttctccaggatggaattgggacagcacatgtgaaatgctgtctatcaagaaagcttattagagactcrgttcctaaggtttttagtgggaactggtcacatggaccccttcttgctatcatctgccaagattcccttctcccagaaggaaactagacttttagcataaagcacattatttgcacartttaggcacaatgaaccactcttctcagggaatgatgggaamcctcccaaatccgagttcccggacatcagtccaaggtcaactttgcaagccgccctttccaagaatttcagtcttagtcctgctacgttaactcttttctgtacaatatctatatcaagtgtctcaagggctagttaaaagaatatttgaagaaattagagaaaattccaaaaattatacatacaattaaggaartagaaaattggatgtagaaaaataattagaaaattaatcattattgacactaagagagaaatctgagggataatttaaggacttcctttagataatgagttatgacataagataaagtcacccatagcctgtatctcccccaaatccttccctaagtagagaatatgggcctactttatttgaaacacttctgaaaagtatttcttgaaaacactctttagaaccttctaagaaatgacagctcatttagtcatttgccattcagattgtataccagcttatataataccttgattcattaattatttgctgaacaatcctaaaaattaygtttatccattacccattcatacttttactatctttctacacccaatatgtatgcagttcaggttttcaaactcttacttgagtaaaaagggagaacaggtatttaaaagcatatttctagccaggcgccgtggctcacacctgtaatcccagcacwttgggaggccgaggcaggtgtatcacaaggtcaggacttcgagaccagcctggccaacatagtgaaaccccatctctactaaaaatacaaaaaattagctgggtgtggtggcgggcacctgtaatcccagctacttgggaggctgagacaggagaagagcttgaacccgggaggcggaggttgcagtgggccaagatcacaccactgcactccagcccgggagatagtgagagactccatctcaaaaaaaaaaaaagaaaagcatatttcaggtatgttcaggtatggataaagaaaacaacagaaagattaaggaataaaaatacatgatgaygtgaggtctttgaattgtggtggtaagtagatatagcattgaacagaagtttaagtaagtatagaaatctgaccttaggccccttaaaaacctgaccttaggcccttctcattgactacttcttaaccgttagctatgtgctgaataaaagctggaaaaccagagaaattaaagaggaaagagggaggggaaaacaaagtggaagcttcacagaggcatccacaggtcattccaaaaccatagtattatgctcactattagcaacaatctaaatgaagaaaaggagaagaaaggaaaagaaaggccacattgccggggcttacacaagtctaattccaagatttaaaaaaaaaaaaaaaaagaaaagaaaaagaaaaaaaagcgcttatgttctgaataatggacacttctggtaagggagccagaaaaaatttaaagacactttaagcatggccagacatggtggctcatgcctgtaatcctagtgctttgggaagccaaggcaagagatcccttcaagccaggagtttgagatcaacctgtgcaacacagtgagacccaatctctacaaaataacttttaaaattagctgggcatggtggcacacacttatagtcacaattacttgggaggctgaagcagggtgatcatttgagcccaggagttcgaggcagcagtaagccatgatcactccactgcgctccagcttgggcaacagagcaagaccctgtctgtaaaacaaaacaaaacaaaacaaaaaacaataagcaatggaggaaatgtttaggcaataatcatggcgaatacaaagacattaagaaaatgaagaggagatagaaaaaaaatgtataaatgaaaaaggacactgctaaggaatttagtaaccccaaattcatgaatggttataatccaatagaaaaaatatatccaactctacaccattacttaggtcttaagcatatttaaattataaatatcaaaacaagtatcacagggccagttcatttatatacattggttgtagatcattttcaggttaaactacccctttttaatttttgctattattttagtatgtttttcttattctttgagtcctttagaaagtgctttgagggctgtttactggaaaaagtgaattcaaattgctctttgtcaaaataaactttgtaacttttcagttttctaaagataatgatcaaatttgactttttaatgaaatagtttcttaaaattgaaagtgccaaaaaactttcaaatatatggaaagagaaagatggatgtgataggatttttttaactctcttatgtttaaagttatttatttctttattaaatcaaacaactcaggggtttaatttggatagaaataaaagtcatacagtcaccaccacagccttttagaaacatggaatcctaggatcagggaagttaagggtctatttaaagtgtcatttcatatcctcatgacctgtggcaaagcaggattataagctggtcctcctgacccctagtccgtggttcattcttctctgtgctaagtgttctccatggtcaaggctctctgagggtagggatatgaaattaaacatgaatgaatctgtcttcaaggagtttgtattcttttaagtaatatgtgaaacttaagtaaagtatgatacaaatgtgctatgttcaaaggaaaaaagacaaagtggctggaaaagtgtagtgagcaatgcttgtgtcccactgcaaatagcattagccttggattcagactagattctagattcaaatcccccctctgctatttattggctattaggatttgaacaagtcatctgaactctctgtgctgatgttttcttactgtatataaaatggaattggagttgaaaattattaattttcagaactaacaaaagagcagaaataatagatgtgaaatttctagtaaagtacatgtgagacatttttaatacatacttataattcattgctattattactattactcataattgcttatggtggagaagctaagagaagaattttatggaggaagtaacattaaatcttactttccaagatggacattattttgacagttggaaatgaaagggaagatgatccaattagaagtaattaggtagaacaaaagctataggactggaaaacatgctttacatctaaagaataaaagttttctgtctcattcatatcaatgcagggaaataaaagctggaaagtttatgttggtattggacagcatcttgaattcaaactgcattgtaaaggcaacagcaaatcactgaaagtttttgaagtgaaagcaagttaatcccagctatatgtaacattttgggttaaaaaaaatctcaatagcatatatgttagattgatgcagttaaatagtagaggtgaagaaacaagctgaaagcctggtgtagctcttttttctcagccttttctcttttcttccctttttttccttaaaaattcatctcacaaccattggggtggggcagagcatggtaggacccacaccagtgagagatgaaagcagcagcagtggtcccacagaccttgtcagagcctgagtcggatggaggaggcagtctcacagagtatcagcctcgtgtggcatttcagaagtcagttagattcagaagcttgtcttcatggggacggtgggtggcacaaccccatgtgggaagtcagagcttgagcagggagtagagtgtccacatgtggaggtgaactgttggggttttggagcccaactagggtgagtagaacatcaacacagtaggcaatccaccttgggaaatcagagcccaagtgtggtgaaaaggggacttgtcagggacgcatagcatggtgtgaggtatcagaatccaaacaagatgaagagcttgggggtggggagtcagactctgagggaggttaagagggtgtccacgcaagagggtggcccatacagcatgtcagagccttatcagtctaggtgtgtgaacttccaggcagaggttgatcatgtgccggttgcctgagtctgcatggagtgaggagcacagccgcacagggaaggaggtgacagcagagatggcagagattacgtgtgtggcagggtgtgggggtgcagggagaaagttaaaaaacacaggtgaaactgtgtgtataggggtgtgtgtgtgtgtgtgtgtgtgtgtgtgtgttccatacacatagtccactgagacagcctgggagcaacaacatactgatggaaaatatgcctaatatccagatgttggtgtctaaataccattatccaataaaagtacctggggctctttggataaatggctcattccagggctggaacaaggaaagtacaacatgaaactagattattattattatttgccagaaagcgctaaaaaaataatgagggcatagcaagaggacacaattgccaacctcaagggggcccctcattggctgaactagaggcctattacttgagaatcaaaataaagatggtgattgattataacactgaataaaataggaaagcacaagtccttactgatataaatagagaaagatggatgagaaaccaggtatttacatagtttcaaagtagctcccaaaaacttaataattataaaagggtacagattaacctcacattggaagagcctagcagatgctttgaccaaatgatgaaggtgaacagtatccatgttgggaaagacattatggtttcccactaggatgcaagaaaagcacagcatcacttttgtgatattccaaccaaagatgtatatccttaatctaaacatttaaaatatcagacaaatccaaattgaggatattctacaacataactgagctataattttcaaaaacgtaaggccttgaaagtgaagggaaggctggactgcgcaggctgaaggggaccaaagagatatagcaactaaatataactaattagatcatttagatacaaagaacatcattaggacaattgggaattttgaatgggatctgaagtttagacagtagttaattttcttaagtttgaacgtcattttgtgatctataggaaaatgtccttgtttatgggaaatactaaagtattctggataatggaggcatcagggcagtcacttactcttcatgcttagtaaagtgaaaacaagggagtagtgtatttgcaaattttctgtaactttgtgtgtttttccaacatataagtgaattttaaagctgttatactaaaatatggggagcagatgagtgattacattaaagaataagaaataaggatatggaggatatgatggtggagtacaagttaacatgtcttggtgtgtatctgctgtgaacaaggaagctgaagacttaaatatgatgctgaacttctgtcctgagccaaccacactaggaagatgtgatgtcagtcacagagacagaaaacactagaaacaaaggctgagattaaaaaaaaaatgatttattccattttggaaaagccaagtgtagggtaccaaaaaatagctaacataaatgtaattggaaaaactagaaataaaagtgtggagaatgtctggaactagagaacttagaacttgggagtggtaaaaacatatgaacaagataatatagaaagatgaggagagctccttgcaggatacccatcttgagacagtaggaggaagaaagtgaggtaggagagaagctagaatagaagcaaccggatcgaaagatgcataaccagtggagtgccttgtcacaacactgacgaaaggaagatataccaagaaggggcttataaacgatagttaatattttaagcagcatggaaagctcaaataaaataggatgagaagaggcaactgggtttgcaaactgggatgtctatggttgagtttagaaaagggagcattcaattagagtgactgggcaaaaagatagcgaatagaagcaagactttagcatgaactggagctgagaaaataaagtggttggggagactttcttttccagaaatacattactgataaaaaggagattgctaggactttaatttaggaaagaattattaagcatggtagagactggagcatattttatttatcagaggaaacctaccaatggagcaaaaaatattgaatatatataagaaagaatacatttctagaggaagtaggcagtgatataattgaacaaatgcagaaacatatcttttaaaacaatagggaataattgaacctgtgagggcaaatggacaagtgacaccaacagaaaaaattgagaagtgtattagattatccatttaaacaaattaaatgaagtcctgtgcagagagtacaagtatcagatgtggaacaagagaccaggaaatttttaaaagtttgaaaattcttgaagaacaatgtgaaagaatttaaatctaagaacaattagcatacatactgaaataacatcattttgaaaatttttcagcgtgtaaaaatcattctaaaaaattcctagtatcggctgtatgccatgactcgtgcctgtaatcccaacactttgggaggcagaggaaggaggattgcttgagcccaggagttcaagatcagcctgggcaatataacaagacctatttctataaaaacttaaactaaaaattaaaaatgcttagtgtaatagtttgtttcctgccttgtatctctggtggcagccagcacataaagagaataaagaccttggcttgactattaaacatatgaattaaataatcagcatcataatgtttaaaataaatagtcatgtggttacatattatgatgcaagagaagagatatcctgggagttatgttcattgcagttgagacaaataaagtcactgagaagatatgcttcaagaatggagtggaagagtttatctcaattgtactagaaatcaagaaaggctttccatttataaaatagcctattcaaaaccagaattgttctaaaatatgaaacggaatttggttagctgtatatttgaaagcaaaaaggagaatacgtctcaaggaaggtgtctgtgatacattaagaacatggagcaacactagagagtcacttgtacaatgagacaggatcattgtgcaacttgcatgctcactgtctttaggttcagttctctctactgaaaaaatactgtttgagattgtttgatattgatttgctctatctatttttttttttcttgaggcggaatttcactgttgttgcccaggctggagttcaatggcgtgatctccgctcaccacaacctccacctcctgggttcaagcaattctcctgcctcggcctctgaagtagctgggattacaggcatgcgccaccatgccctgctaattttgtatttttagtagagatggcgtttctccaggttggtcaggctggtcttgaactcccgacctcaggtgctccacccgctttggcctcccaaagtgctgggattacaggcgtgagccaccgcacctggcctatctttgtatatgtaatttataaagtgccctaattcattataccctcatgcacgcacacaagtatttgtaaattagcagctaagaattttgtgccatgatgccatcaagaatttatactgcgattatttgtttcttaaggaaactatcgtaacaagtaacatttttatggttagatttaaatgtgctgaatcatgcaaatatataaattatattaaaatttacttaaagaatctttaaaagtatttcactagaaatatgctttatccatattaaactaacaaaagaggcatttcaattgaatttttattttatattatttaataatatttagcatattatgtcatttaaaattttctcaatatrtaaatagttatttgtggaaccatgtacttgtttacataaaattattcttaaagtaaagcaagcgggcattgataagaaatcaagatgctgaataatccttagactaaaactaagaaacaaaaccaatggtatgggaaattgcaagtattgtaatctgtttatgtaagtagtttatattttgaaactactttggttgtatctaattttcccawcctgtgaayttctggattttttagaacaaaccttgttacttagcatttagttttggcagaagtttgtatgttagtcaaatctatttcttaaaaaacctgacatttccatagataaaagctatgaaatctgatagaatggaaaaatttctaatataggtaaatttatttgaacatagtatttatggtgaaagaggttttttttaatttaataatgtttcttgtctattcatgagccattttttgatttctgatttcatttggatatcaatatttctatagcaaatatttattttatgtccatagtataccagacagtgttgtaggccctggggatagaaaagtgaatagagtaaagcctttgcttttatggaacttaaattctagttgaaggaaatagaccaaacacaaacaaataagtacagtcattccttagtatccaaggaggactggtcccgggaccccgaggataccaaaatcagttatgctcaagtccctgatatgaaaaggcatagtgtttgcctgtaacctatgtacatccttctgtatacttaatctctagattacttataataccaaatacagtgtaagtctgtggttgtttgactcttcggatgcagaacccatgaatgcagagggctgactgtatgtggcatggcaaatggtgataaatcctttgaagaaaaataaagggtctggggataggaaatactggaagaatgtgtctagggcattactactttatatacagttatcagagaaagtctcgctggtgaggtaatgtttcagcagaaacctgaagggaatgagggcatcacccatgtagggcaggagcattagaggcaragggaacatatgcggaaccttgaggagaatttttccttatctgctcagagaaggtgggtcaaatccaggggatgagctagaatgttctaaatcagctcttctcaaagttaagcttaagtcagaatcacttgggggcttgttaagcagattgctgggcctcaactccacagtttctaaatcactgggcctggaaagaggcccaagaatttgcatttctaatgagtttacccctgacactgctggtcaggtcaacaactggtctaagcaagtcccattcaccctctgccagtgattggtttagcgtcgtagatgtaatcctatcttggcatgagagatctaaggctacatcttcttagaacgtaggacttcaaagaaatgttttccttcctgatttataaacagagaggtgggaaggacaacccccaactcatcccttttacctaggggcattgttttatcaggatatggtgttcagaaagttgagccatattgtctaaacaaattagccaactcagagccctaacaaccatgaggttctcagatatccattgctggacttccttaattttagatatctgtatttgaaaaaaaaaaagtcattatggaaatcactactagtaggtaatctgttatttgcagcatatagtgtttgaactgatattaagtttttattttcccttaggaattttagtaaaaatagtggctagtttccaatatgtagtgtaaaggttcaggtatttcacaaatgattgcaagaaagcacttaaagttcatgtaacctaatcattaccatgatatttttaaaatagtgaatctctttcttggtgtcagtctaaaataccagaaaacactttgactgccttgccataggtactttggtggaacttatcttcactggcaccagatatagctggaaatcagtaacagacagtatccctagaagccatggaaagaaaaaaattccaaaagctaaggtatacatgtgggcattcatttttcatttgtttgataaacctaaagttgatgtataattactaaagattcatatagtctggagtttacctcttcattttgtatgtttatatcctgggaatgtctaagtcagattattatttactcagaatattacttatggtaagcaatgatgatataagtccttcctcactccctctaaaaatctttgacttcagtgctagcttgcactttaaacatgtattccaatattaagaaacaatcacttgttacaaaagagtagaagtacatgcaagattttatccaaaatccaaatrcataagacataccagcactgatcatgttttgtctaatttctccattcttctttcttttgtggtctattcactaattacttgatgaagaatttgtttttttaaaagcattttcttcataatcttaattttgtctgatgctgcctttgtcaaatctttcattggtgcccttttctctgtgcagatggatgaaatgcttttgtaagtgacagacattcaaaaataacaaacatgagaagaaaaagaacagtttatctgtcaagaagttacagtaaaactgtggaagctccatttggttgtactccatgcgtttagaaactttttgactgaattcatttccattagagtcaccactggtgaacttgaacaactccacaatctccactcttaaattgcactcttgtgtttcatccctcacagaatttacaaaagtggagggtggtttaaaagcaagggtttaaaaaaatctatatttaaatgggcttcagggcctgaaatcctagtcttaatttcttaaattgtactaagatgttttatttttaktctgctgcacgttgaaggaaataggaaaacattagcaataaattttcagatacttttttaccacttttttttaaagggatggaagttaggatcaactgtggtagattcgcctagccattcagaaactttgggcagggatgtggcttttcttggtccctaggrtggaattagcctggggaaagctgctagcccttctgaaaacttgtaatcagtgagcagaattttgtagtttttcctctgagtgcctgagcactcttgctgataatcacactcttttctcctgcaagggagcaagtgtgtatcattcttcctgcctgttggatctatgcacaagttgtcaaaaattaatctgatttaaggtttttcttttcctgaactcagaagggaggaaattacagaaaagtatattagtaatagagtaatagactatagcctgagggaaatgaaagcatatctaagcgaagccaagccaggaacaagtacaattttaatgaaaaatcaatgtttcatgacttagaactgacttttgttaggcactaatatttcctgcttttctgtcaacatccttatcattataaattcttttttgtttcaatataaaggtactaaaaaattaacagctaatagattattttcaacctgtttgcaaggctaaagtctctctttgcctttgaaaaactggagtagaataaaaatgttatattaccacaatggatttaaaggctaacgagtggtcaaattgttaattattcagaaatttcttattgaaatgaagaactgtctggatggactggactgtaaagttcatgagggtatgggtatcaacctccttataattgtgtgtgccygatatttaaaagatatgtattaatctctttggaatggctgaattaattaatattgttattcagaatattatttagtacaataattcataattattcttttcaatgccctgaagatgtatcagtgttttttcctgccatattttaattttattgacataatttagaaacaatgtggagtggtcatttttcttttaatctaatacagaaaaagataaaatgtttatgaatagaagttctgcctttgcttttgctcctgtccccacataccctcttagaatggacaaaatacaggaagaaaacttttacctgagttcttaattttattacatcttacattaattttcacctttttgtgagaaaaataggtttaaaaagtagttgattttttaaccttgcctccacctactagatggagagtattgtcattactgtaaatagaggaaagaaatgatatagaagcccatgacttcaagaagtttatggtccaactcatgacacataaacagatctgaaaaaagtaaagtctaggtaaaatacctcaaaaatgtgtgtgtgtaatataagtatgtatactatacgtaagtattctactaaagagataggaagttttcaagaacagcgatgatgacttgtggaaaatttctgagaagtcattaattctcatctacatcttaagaagtcagctgaactttcaactgggactgggtgtaagcagaggcagaaaagttgtaacagacaggctatatgaggattttccccaacaaatttattcatttattcaacaaaaaattttaaacactccctgtgtaccaggcatgattctagatgacagcattaaaatggtaaacaagacatatcacttcaaggagcttatatttcagatggggaaaccaactatatgtatactatatatatatacacacacacatatatacaaattaagtaatcaagatagttttgaagttttgatacataattcagtgaagaaaaaaagagcagtataatgtgattttgagtgagtttcctgagtaaaactaattttgaaaggatttcggataaatcctcactgagttgatgtttcagctgagacttaaatggaaaaaaaaaattagcctgtcttataagttgccagaagagcttaccaaggagaaggaacagcagatgcaaaggccttgatgttggaacaaactttagatattcaaggaatagaaaggatcatgaaggcctggtaaaccatggtagagaatttgtgttttaagtgtgaaggagagccactggagcatataaacagggaatcatgatttgatctgtgcttttaaggatcactctggatactccatggagaagagattgtaagctcctcagagtgtgtttagagcacatactgctrcaatggtggctaagactaagggagtggaagtggcatgagagagaaatgggtgtatttaatacttttagatacagatayatagtacttgttgatagattaaatgtaatgtaggaaggaaaataaaatgaagaatgataggtttttggcatgtgcgactaagtggatgagtttgctatttcatttggttttgtgacattgtgcaaaaaataagctctttgaaatctaagtaagttgaaatctatgacttctttcccagataggatgaggattgaaaatgttggatttgatatagtagaaaaatmtrttgttattagaaaatagaattatcaaattttccagtttgagttacttagcattatatattccaaatattttcctagtttcttttgtaggcattttagggatttcaaaagcatttgccctacttttgtaataaactatttttaaaattaaaaaacagtgcttaaatacacaaatgtgtcatatacagaatactaaaaaatatggtcccttaaattttgccataaagtttctttattcctgaacagatgtaaaaaaaaagttttcttctaattcttttatatgtataacttgaaattgcaatgttagttactgagatgatagtgtgtaataacattcagattctatatattgataacatgcaaacaaatagtacattaaatagtttctataatatcacatctatctttctcttttttttttgccccttcaagcaacaaaatgcattatttttaaccctatgcaaccatctttcttaacctttggyttcaaatttagaacacttcttttcactgattggctttatagtagatattggtcataagtgaatttaaacttataaagttattaataaaatagttatactccatttcatatttctttttcaaaatgatttcatactaaaaagtttggaatccttgacctaagtcaatgccctcttcctatggatgagaagactgatgtttattgatgatttgattttctgaggcagtacagacagttgaaagtgtgggaacagaaatcaattccctctacttttttcaatgcaccacatttatttcacactgtccatgtagaatcatcagttaaaatgatmatatatgttcaatccctattttcatatcaacaagaataatatgagtatataattaccagaggtctatcgtaataatttctctaatgtgtttaaagaacaagccagagatttttatttgatagagtatactgatagcatcaaactgaggatgccatttgtttattagggagaattttataatttagagtttttttcaaataatatcaacagtaaagtctaaattacttattgcctttaattctaggaatgtcgcattaagtgactaatgaaacggaaataactactgcccatgtaacttcataaatgcccttcatagacatttatgtcagagcaaagatggcaraatacttgataatgacattatctccccctcacaacctttattttaatgctgtcaatcaaaactgagccagttaacatttctagagaataatattttatcaaatagataagttatttgtaatcatgataattcttggttggggcctctgtgataggctgaataatgtccccccacaaagatgtctacatctaatccccagatgctgtaaagatgttaatttccttggaaaaagagaatttgcagttgtgattaagttaaggatcttgagatggaaaagttattctgcattttccaggtagatcgagtgtaatcacaagagtgctgatasatgtgaggtagcagaatcaaaggcagagaagggatgtgatgacagaagcaaaagtgggaatggcctgctttgaagaagactggggccatgagccaaggaattcaggcagcctctagaaactggaaaaatcaagaaaacagattmtctcccttgagtctgtagaaaaagaaagccctgccaacaccttgattttagtcccataagactcatttatgacttctgatctctcaaatatataaaatataaatttgtgttgttttaacccacaaatttgctataacttgttatagcacttatacctaatgaatacaaattctggcacctgcaagtgtggtcttactgtaattgatatctaaaaacatgaaaatgactttggaatcggacagtgggcagaagcttggaagaattttgaggcatatgatacacggcctaggttgccttcaacagactattagaaatacgaatgttaaagtgtgtgtggcaaaggtgcagaagaaaataaaggacatattggaaactggaggagaggggtttcttcttaggtggcagaaatttagctgaattgtgcagttctggggaaagccaaatttataagttatgaatttggatatgaggtaaggtgatttccaagcaatgttgaaggtgtagcctttccagacacacacacaaatgtatattatatatacacacttttataaaactatatatatagctatatatacacagacattaacacacaaatgtgtattacatatgtatacacttttataaaactatagatatataaaactgtatatctacacatacacagtcacacatatacacacatatatatacatatataatatataatttgttgrtattatcatctatatgtagtggcagttcaamcttcactttgattatgaagtagcaaatgctacagaaaagtcttaagtatttttatacttagcaattaaaaacagacctttatattgaawctctacatgaaaaggattacattagttttattgcagtattatggtratatgatttctgcctcttttttctatatttatccaattgcagggaaaaagtattaaaatccagtttggcctcattgaagcacatttgcagagtgttatagagcattggtttatgactattgccctattatagacaaacaaagtattctttatcctttatcagtgyagtgactgaaattatgaattccattcagtttttaatgaaatgtggattacttcaaagattatctatctgatttaataaatgcattagagtagaaagttaattggatctttcttgaatgaatggtgaccactatgtgtgattcataggagggaaagatagaatatgatattctttgagtttgttttatgtgtttaaaacttttaggttagaaaatcaatttttgtgtgatcggttttctcaaataaattatgtaacccctattgatcttacaaaaatcatggagaaattttaattcattttaaaataaaaatatcttaaattttgtaaaaatgggttattaaaaaatgccatatactgaaacacatgtgtagtttattgtgtttttagtttrcaggcagagaaaatgaattttaccccaaacatcagcatagttctagatttgccacctcctgtttttgacacagatctcaactgagcttctaattttggaatcttgttccagttcttatatttcctattctgtattcaagagctcattctgtattaactggtaaagaggttatcatttctgcttggtttatgtagacactctatattcttcattgtttaacaaaatatagaaattcaggtgcttgcaaatatgatggtagaggtgacaaagtgatactcatcacattttgtatatcgttagtagtggcaggaagagccttacagtatgagtattactaacccttacgtacaaatacagattatcttttcgttaacaatgttactctttctgagagatgttcatgtgagagatgttccatattttcaattcaaacaatcttgtaattgctggctgctgctgttgttcacagcacttggctttgcatctgtgcctcttacaattccagtcttgccctttgtttgaggaaacttcctggttcttgtatacctcctgctttcttgatctatttgctgctgtttcccaggtgaaaacccaactgggctatgcatctgaggtagggatggtttcactgtcctagcacatctttcctctattcaccctgatcaccatcatcttggttttgactcttatttaaaaaaaataaaataaataaaactgctttgtattatgcagctattatttttctgacaagttcagccactgtggagacagtttgaagtaaatgtggctcattgttggtggtctaagaatgtctaaagactagagcaaataagaaaatgttaatagagagaaggaaaacagaggataaaaattgaagttcctaagaagtatgtagctaaaatttcgccttatctaattcaggcattttctcttggctttcccagcacagtacttcttagcgatgataacaacagcaaccactttattaatttgctttttttaaatttagaattcacatcatcatggtaacaacaaccatcccttgaatatgtctttgttagttgcttaatttgctacacctaactcttccaccaggcgctaaatattgggactattggccatccattcagaaagtattatgtgcttcctgtctgtaatgcactaaatcagacattgtgctccaaagaagagggttgtaggagggaaggcatcacacctgtatgcagttactatgcagagcaggcttgggataaaaatagacattggccacatctgtgttaaatcatgagctgtgacccttctcatgacagttccccagctctgctaagacacgttctttggaagaagttgcttcacttttcatttgggtagaatatttacagtccaagtaatagatttcctataatttagaatttactaatacttcctttaaacaagtatatgattatccaaaatgtatataggcttttttgattccagttttataaaacaaatcactaatccaatgttgtgttttaaatagaaactttgctgtatgtaatttcagttggcattcgttatatatttacttaatgtgggcatttcttttcagacttatttatgaacatagaccctatctgtatttctacgtctacctgartatagaaaaatacactgttttttaaattgttatcctaaaatagtggtctgaagcttgcatttttgaacttaaaatagtgtcttggacttattttcaagtaagaaaatataagtattccatagcatgagtrtatgtttaatccttcctatactgatgaccatttagtttattcagatttcttgggattacatgcaatgatgcaattaacatccttggttaagatctttacattctctgttataggataaattcctagaagcaatattgtcaggtcatataatatgtatacattttaaataattacagccaaatcaccctcagaataattatacaaatttacattccaaacaatatgttagaatacctatttctccatatccttatcactactaattagtgccagtctttaaaagtttcgcttatgtgatgggcagatatggttaacattttgtgatgtttcatcataacatgattcagttaatgataacactgcttgttgtaaaattgttgcatgaagaatgaagagacagttgtaaaattgttgcatgaagaatgaagagacaaacgcagttaactgttcaacttgtgtggtgcattttgttgcactttgaaaaatgaaaaaaatcaaacatttaaagtttttttattgatggctgctccttaagaaaagcctggaaatactttagtttgctttggaatgtctttaagtgcatagtggtcctgtcgcatttcctgagctgcagtagattctaaatcatcttgatttaagataggcttttttgtaatcactgacagtctctgatttcagaattctgcagacattgtcattgagtggagcagtatctctagaagttataagaactgtactttttgctcttaataaaaagtaaagtgtgtcaaaataatcaaagtggaagaaagcatatgtaacagccatacaaataaattgagattcattagataagctagttggtagaggcaaatgtgaagaatatttttaaattcactactaagataatttttttaaaaaatgttaacttaaagttgctatttttaaaatttgcataatgctttgaagaatgacagtaagacaaatgtcatcacaatcataaaaaatgtgtataaagtacattagtattttaaatttctcctagaaaaaaaaattgctgcatctcttccaagatatataaccaagttagaaaaaaaagttagataaatatgcgtattaccagttaagttcagtttgacttctgcttaccagatgttttgatagaagtctttttcagtgttcactatgatgcctgtttctcacattgctgtgaaacatctaagctatatatactgttttttgataaataacatatggttttgaaaatcagtgttaaaaccacatgaaaatttttaaagtgaaaaattcagttttactctcaatataataattgttttaaaaatctttaaaaaataatgttaaatttcaccatgatatgtacagctgtctaaggagtctattacagggacaaatagaagaatgttatacattgctcaactcaggattacttccttttttttagttttagaagaattcagttttagatttaaccaaataaccagtaatgtatacatctccctgatctgttgtcatgagcacaaaatttatttactgacatgatgctaagaggttttctgcagatactccaaatctgactgggttttgctccatttttctttcactaatcaagacttcagtgaaataaatacatagtaaaattctaataatgctagacttatttcccaaatgtcttgatgttaagtgaataataaactccagatctgattttgtaaatattattttaagatatgcattcttaaatcttgataggcagatgttctaggaggctccaagagagctcaattgggtaactctctcagaggactgacttgctccatatttgcatcatacttttgtgtggtttcattcacaggcacagttgcccatcgtgcaggatatcattaaatgacctaaattaacttttctgcaggaagtggaggaatctcaggataggagaatccagttttaaatacccctgagacttaaattgattcagtcttaatctgggatgactcaaatgacttagtatataatgtctcttgtttctctaaaagagagtctctcaatgacagaggcctaagtctggagatcaagtatgtagtcctgttgactgagaacaggcagaaaaatctgattaatccaaaggaaaaaggcgagggaggtggcagcacagtgaacagatttgcacccaagcacaactaaaagaatgagttagggagggcggggagcggcggcttgtggctgtaatcccagtactttgggaggccaaggcaggcaaatcacctgaggtcaggagttcaagagcattctggccaacgtggtgaaaccctatctgtactaaagatacaaaaattagctgggcatggtggtgcatgccagtaatcccagctactccagagactgaggcaggaaaatcaattcaacccgggaggcagaggttgcagccgagatcgcaccattgcactccagcctgggtgacaagagcgaagctccatcttaaaaaaaaaaaaaggagggaggagacggaaagaaatcagttcgtttattttcaaaatgatcaaggatgaatggtaggttcctttacaatttttgatgtatctatttttttaccaactctttattttctttatttatttcagtattttagtttattaagtacttgcagtgttattaaacatagactgaagaatggaaatatgagtaagatatgtgtattaattttaggacactcacatcgtagtacttgtccatgttcctttttttgcctttttccattgatgaaggttatcttctctcttgctcatggctaataattatcactttttctcttaacaaattattttattgttgttatcatttcttacctacaaagttactattctctgtacaactctgttgctagcaaccatcttacaatttggttatccataagaccaaattttgtctctaaaacatctcctgggtgtagctgctcccatgaagacaatatagctacaatggagtatgaatccatataaaactcagtagtcttattgggctcattctctcacagccctgggagaagccttggttgcctgtgtctctttctcatattttgaggcatgcttatggaacagaggtttcccaaccctattcagaccccaaatataacaactgtttgtaagaccctctgtactatgaaaaagaaaaatccattccattccatttaccaacatacgtaatttcaaaagataaccaaagttacctaactttaatattaaaaagagctaaaggaactaaaacatatgcttattgcctaaactgttgaacacaaccacattagaagacagaaagaatactctgatgtttgccactattctgagaatcaccaaatgcaactactaattatgcagactgtcctgtagatctcaggatgtctatcagccctgccctttcccactaaatattatagagtcttaatctaactgggagacccaagtgtccctacacatttcctagatgcctccagaaggcactatctgctrtactgagaaccattgctatagaactttaccttcaatatcacttcttatttgtaatgtctgtccctggtggctctgtagaagattttgctctcaatcttccatgagcaaatagaaacttggaatttttttttctgtttcctaaaatagaatacagatatgtccacacttggaaatatgatatatttttatgagtatatcttcaagtggcagatcataaggtgaaatcccaacttgccttatattgtatcattaccatgttgtcgttttgtgtccagatgacattggcagtaagcagcgaaggattcagtaatgttttgataaaaagagcattaatgtaawtatttatttatttatttattttgagacagagtttcactcttgtcacccaggctggagtgcagtggcacaatctcagctcactgcaacctctgcctcccagtttcaagcgattctcccacctcagcctcccaagtagctgagattacaggcacttgctacaacgcctggataattttgtattttttgtagagccgggatttcaacatgttggccaggctggtcttgaactcctgacctcaagtgatctgccygcctcggcctctcaaagggctgccaggcttgagccaccgtgcccagccaatgtaattgtttttaatctgcatcatcttttgaataaaaagacattttaaatatcagaaaatgaccactgtctaaattttctttaaccagcataaatggatgtaaactaagtagtttgcaaattttcatgtctgtttcmcttttatctttctccttggtaatatgttttctgacattgctgtgaaacatttcatattacttaaaatgtgtatctttaacagatttttcacttttcagtttaaacatttcacacaatccacacgtatttattaaggacttatatacttgacataacaccaattgatgtttcagtcatcaaatcttgaacacctacttctgattgyctaacccttctttttcaaattaacaacaaaacaaaccaaaacaactgtctcatacaactactccattctccaaagagaagttgtaaattataaaactttaacagtcttattttttctttgatggcctacttaataaatctaaagggactataggtttacaaccttggagtgttgcttttgatttttttccccctgtatcagtccctaaaccaaaacatttacagtactgtgtatatttaataattttgtactgactgcatgaagatataaatgtgtgaatgaatacagcttgttaaacatgcaagtatatttcttcaaagaagagtttacggattctttttccttagcaaagggaagttgtattaaacattgtggtggttgaaatgctgctaatcaaaaattggtcatcgatttgaatacatcttatagcttttctatcatgttgttggtttatttctgaaaacacaagggagaagttgattgggctgccttagctgcctttttctatggtgacaggtgtttagactttaatccctctaactgtgcacatagatgtttctggtgaaaagaatgyactgccctttgtataaaaaacataataatgataataatgtaagtttgagaacggtttagtctacasagttattgacaagaggtacagcttgtactggaggaccagtctggattcaagaagatggtcctaagtgtaccgaagtatatcttttcgtatgaagatataaagaatagaaatatgagtggtatttgaggtgtccgcatcctctttggcactcagaggactctaatcaaacccaatgttgtgtactgaactattcctgacttgtgaaattcatcttttatcccctactttaactttttttttttgagacaaggtctcattctgttacccaggctagagtgttatagctaactacagcttccacctgggcccaagaaatactcccccctcagtctctcaggtagctrgaaccacagacacaagccatcacactcagctaattaaacaattttattttttgtagaaactagatctctctacgtagcccaggctgatctcaaactcctgggctcaagcaatcctctcaccctggcctctcaaagtgctgggatcacaggcatgcaccactgtgctcagctaccccaattttaccttttaaacacaaaagctttcattaaatgtaaagccaccatttcctttgactttcaaatccatgtatcagtaaaataaaacaaaaatttatttgaatgcaataatagcagacatatgctgttctaaaatcctcagaaatctggcagtggaaactgtgaagatagttatgatctcatgaagtttgaatatagtcctaaactctttggaatgagagatttgtcagctggattttcatgctctaaatctgacttcaataactttcactttctgccaagatgtatccattatacctcagtatctcctgatattctccaataaaatccactgtcaaattaaaagcttagttctgtcgtttgtgccaggccccaagtgctacccttatattccaaaatcagtagcgctttttccaagttattactcagggagtataaccaactagaaaaaaatttagaaatactagaagcatgttctcctagatttcctacatctatccctaccaacttcccaaagagccctgtagtatcttcacctaccttcctatcagctattcagacataaaaacagctgctttcttcctgggaagatcacgtaatttagaactggcttggggtgtacctctgggttaccaaaaatgattttttaaaaatatctgtcattcaagaaaataagatctggggtcaggtccaggcaatattgtcctgagggtgcttttcttcttctcgtggctgatattcccgcagtgacatatgatataatatgcactaagctgatactgcttcagtaaccatgtctgtgtctgtgacaggtgctactgactcctttcttcatgttattgatctaaaatattttttaaaatgtagaatctacaaaaccytggaggcctttcatccttggaagctggaattattgcatcttttcatccttcttaaagaggggaatgttttcacccttacagttaagttgacagttcatatgcgatgtttacttgactttttatatctggttacaataaatgtataggctgttaacacataataaataatgactcatatatttgatttaaaatttcctggattatctataatcagaatttagaatttctctcctagaagtgtggcragctgaagctattagagctgtggcctttacaatcctttaacggaataacccatctcctgttgctgatctgaaccgcataactggctaaactagtgcaggcagcatgattcttcacacacaaccagatgccagaaagaagaaaaccacaaaggggctgaaaaacacagcatagagcccagaagcaagagggtaaggtggggcagaaaccaaccagcagtgattggaagggaagattaagtcaggaggcagggctcaaagggcatctgaaggtgagaggcagcagcccgaggatgcctcaggagtctgcgttgtacaagaagctggacattagagataggtcgcaggtcaaaatcagatagaattttgcgatcagagcagacacagcaaaccagaagcacttgaactgttcaaatagcaccttctttccacagcaagtccttgctgttgtgactgcgaatacactggtccactgaagcctgtgacacttgcaatttgggagcttatcacagccggaggaccctgacacagggtgagggtgcaggaaagacaggacatgagattgaggatgctgactcagacaggtcactggaccgttccagtgtttttcttacagggaaagagtgtaggaggcagtgcatctctttgtctttgtcacttaacttttggtgttctttaaactgttctaaattagttcaagatctacaaattgaaggctaaagaagggaggataaataaagcccagcccaagcagttttgattgtagaaacatttggaagtatttgggttgttaggggaaaggagcatagctgattttttttaaattgatttggagtttggttatttgtcatttactcattagttactttcctccccaacaataacaacaaaagataattaccatagtctgttcttacatgaaacactgagaaattttatgtagacattgaaattacttcatcagtttcttctgtgaatgattcatttcacatttcccagtcttatgtaaattactctgcagcatttatatagcattagtgtcatgcaatttgtatcattattgaacatttattttcttttcaaacaaagtgcaaagtgccagaggatgggaagtatatctttagctgcagtttgaaagaaaatgtaccaagcttggtgtcggatgacctgggttctacaaagcagtcgtgtacgtttagccaaatcacctgttcaaatctaggttgcccaaactataaatgcacttgaatgagtgatttttcaagaatgtggggcaaaatgaagtcagagcattcaaggctgtggtatcttatttctgtttcagctactgtgtctgtgctctcagtgtttcatatattgggtccctacgtatgattttattttttaaatttctactgctaataaaagtttcacagatgtgatagtgtccagtatttctttcaaatttgaagtttcatttgatttaatcattttatctatcatgtcatttagtgtaatttttgaacctagtaagtgtctaataaatatttgctggggaaaaaaatgaatgctatggttcaatcatgcaatactcagatgttcgtaaccatttccatgtgaaaagtttagtataggctgtagagaatgacattttagacttttgaggggaattatttttatgtcagcttgaaattcttcttgaacttgatttctgacttgggggaaaaaaagcaagcctgatgtgcacaagctttatayagagratcaactgtttttaaaagaataatccagctgctatctgatcagccaggtaggagttgttctgtggaaatgaagaagccctccattttcagtcagagtcacgcatataaaggctttgataagattamaataatccaagaatgcaatttcaagatgcacagctagaaacagcaactaagaaatatccatatcttacaggacacagctaagggaagagtcaggttttaaggaccgtctacagataatgtcaggatgtacagataaatatgagcaactgctgattgagctagaaacactgctggttaagttataaatcttatgatttttacccttcaaaatgcctctttccttgctgctttatatttttttaaagagcggagtatgttgtcacttggaggttgtgctgctttcctgtgactttagtcacctttggtgccctggccagatcccttttaccaagcctgtaaaatgcccagtttccgtcagtgttagctgctattggctcacagcccccacttctcttcagaatcacttgtagctgaaaaacatttactttgccaaaccttatgtgcccatctcccagcactatcagctcatatctgatgactaactgacatggggaatacaaaaagccagtgccctcacttcattaggtcaactctggggcaattcatgctctagtgctccccgtgacatcaggctgaagttagacttatgctaatrccacattctcacttagctgctttccctttcctaccctactttcctctctccttttcatctgacaacactcccttaataaatcatgtgcatccaaatccttgtcttaggctctgcttctagggaacctaagcagtgatatttttgagagtatagattctttcttcttttatctttcatcctcaatctccagcacatctggatcatgatgctttacaagtattttgaagagtaagcaaagtaagaaatttggccttcatttggtgtgttagttagtccttgcattgctataaagtaatatgtgaggctggattattattattattattattattatyattattattattattattattattttgagatggaatctcactctgtcacccaggctggagtgcattggcactacaacctctgcttcttaggttcaagtgatttttctgcctcgcctccccagtagctcggattacaggtgcccgccaccctgtccagctaatttttgtatttttagtagtgatcgggtttcaccatgttagccaagctggtcttgaactcaaatgatccacctgcctcagcctcccagagtgctgggattacaggtgtgagccactgcatgcagtcagagactgggtagtttataaagagaagaggtttaaatggttcatggttctgcaggctgtagaggaagcgtagtgctggcatctgcttctggtgagggcctcagggagcttacaatcatggcagaaggtgaaggggaaccatgtatcacttggcaagagagggagacaggagagggaaggtccacactctttaaacaaccagatctcacaagaacactcattactgtgaggatggcaccaaggcattcgtgagagagccaacccccaaaaccaaaaacctcccaccaagtcccatctccagcattggggaatacatctcagcatgagatttggagggcacaaacacccaaactgtatcagttgatcaagaactgaccatggaagatggatagttgaagtcacaagcagtccagcacaattctaaccttaccatgaatctgaattcttagctcactaaagatttaggaacagaattggggagtagaattatggtcatgtaaaaatagagtccgtttaacatcctaaccttaaatcagaaaccatcaaagcatcatatcaacaaaaaaattgttttcacttatgaaaaatatgaatattaacacaattttgttgcacacttactctctgccatatgtcttacactaggcattgagaaaatactaaaaatacataggatatgttccatgctctcaagaagttgtgaattgtgaaagaacctgatagttgaagtaataatttcatgcagtgtgcctaaacatgaaatagaattccatacaaagtgacatttaaataggtagaaaaaccagagaccatatccacactggtaacagcatgggcagaggtttgcagttagacatgaaagttaatgcagtgttcaagaatatactgaggagttagtaagaaattaggctaaaatgtatgttgatacagatatgagaaagggctgtaagactcaagattcactttatcttgagggcagggtggcagctatcaacagtgctaaagcactttctcttccactttaaaaattaaaacagtgtggtaaccttaaaaggtgttctgaaacaatattctaagcaactgttatcacttttgctttttccttttttttatcaggtgcttacttaaacatttctcataattgcaaagattgtgacttgtaattatttgtagttactattttaccatgagctttacccacatttttatgtgttttaattttaagtggctaaatattattataaatagtgtgtgcagtataatttatattcgtcattttcattttccctgaaatctttgtaggctattaagaagaacaatgataggatcatatttaagttttagaaaaatgacaccttaaaagctgcaggtagattaggatgagtaggacttggagtcagaaacttcaataagggagtggctgcaatatagactaggaaagaggtgataccaacctgtcagtgtcctcatcggtaaaagaagatacagctgggcacagtggcttatgcctgtaatcccagcactctgggaggccaaggtgggcggatcacttgaggccaggagtacgcaccaacttggccaacagagtgaaaccccgtctctactaaaaacaaaaattagtcaggcacagtggcacacgcctgtagtcccagctactcgggtggctgaggtaggagaattgcttgaacccaggagaaggttgcagtaacctgagatggctccactgcactccagactcggtgacagagcaagactctgtctcaaaggaaaaaaaaaacatacaacaagcctcataagtgcttgtgaaagctaattgaaataatatattaaaagagtttggcatttagaaagctctgaaacgatcattcatttaacagaggaagctatgaacattttttttttaaaggtcagtttgacttttaggcacctgatttcctgaaggactctttgaactctttgaatgtgggtactgttttatgcattttcatgtgataactaaacagcctgatttacattcttgcccaatatacgtatttcttcaaataatgaactaatgaattcccgggcaataaataccttttggttaaatggacaaacagttctgttcagtgggaaacatgctagtagagtctgcttttaaaggaattgctgtatgcagtattctaagaaataatgaggaagtatttttacttcaaaatactttgatcataatatgatgataggtattttcttctcttgcctgtgaaagtgtgtgttaggtatgtacattatggggccaaactagtgattgttgctaattaggatatatgtggcgcattctatcaagaatcccagttttctgggcactgtgagctgtaagtcaagtcataaaaaggagtgaattgtctttttcatatatagcactgaaattgactggagttaattatttaatgcctacctcccctactagactacaggctgtgtcacacacctccctcagcatctagcacagcaaatggatttagtaatatttattgaatagattaagaaatacagagtgaataaaataggacactggttggagtgttgggtcaaccacaattttggtgtgatatattctacatatcacagtgagaaggaaaatgatataaaatgaataatatcctccttaaagtactatacaaaaagaatacttcttatattttttcaagatgatgtaatcttgtcaaatatataatatgttgcatgccagtgctttcttaatccttaatagtaataccagtaattgtatattaagttcctgctatgtgtcaaatacttctaggtactttaaatgtatattcagtaatcttcagaacaagcctagagagcagaatttagttatttcattgtaaagatgagaaaagtgggtctcaaaaaaagcagataacttgtcccagatcacacagtagtttttcttggtacctggagtgattttcatccctctttcaaatacaaccctttggctattgggaagtagctattacaactgtattttttctttaacttgatgtaagggaaagaccactttacacatatacaaataggagaaagttttgccagaccttctgcagctagtatttacatgagtgagtagagaattgtaagaggttctggtagcagtaaaaacaaattacaaacaacggaacatgaagagaagatgttgtctaccaacatctgtcaaatatggcagatgatcttctttgtcttattttgttcaataccactcaatatcatcacttaggcctctctctcttactgtttagatctcttgggattctcttaattttttaaagcctataccttgaaaaattctgtttaaaaatacattggaaagcatatagattttagtaggctgaataatggctactggaagataccaggtcctaatcccaataagctgtaaatgttatcttttagggaaaagcggtctttgcaaatgtgattaagtaaaggatcttgacaaggtagattatactggattaacagtgtgggccctaaatccagttacatgtattcttataagagcaaagcagaggaagatttgacagaggagaagtcaatgtgaccacagaggtagagactggagtcatgtaaccccaagtcaaggaatgccagcagcactggtagctggaaaaggcaaggaatgagttctcttctagagcctcagcagcgagggtaaccctactgacaccttgattttggcccagtgatactgctttggggccctctagttcccagaactgtaagagaataaatatgtgtggtttttagccatcaagtgtgtggcagttttctgcagtggccttgagaaactaatacagacatagaaaattattttatgactttttcttttagatgcagttgttaagtcagcatttgatcttatttgagctagatagaaccagggttttctaatctacaaactattgattttcatcttgatttaaatgtgtttacttattcttcctctataaggtaggacaattttgcaaaagatgtataagaatgtgtgtctcctttcaggttcagctgaaataatcttcatataacaaaagttagagaaaacaatctgtctgagccagagacttcgttatatgaattcatacaaactaatgaaggaatacaaaacttggcctcacagggagagagtggagtgtcttatgcaaatctttgttgtcagccacattcctacatgcagaatgcaaaaaccatgtttcagtttgttgaggatttggaaatagcttgagataatcttaatttaaaaggactggcaaattctttcagctttgtagaatttattccacatatgtcaaagacaaacttgttgtactgcaaaataaactagtactgtgtgatcttagttgaaaaggtaaatattacaatttacattctattctctcatattcattcttttggtacatgttaataaattgcaaaactatattgctgaaaaatctaatgatcctgaaaaatctaatgataaattctagcaattatcagtgattacaatataggcctggtttgttgttgttgttgtttttgtttttgaaaaggaatcttgctctgtyactcaggctggagtgcagtgccacgatctcggctcactgcaacctctgcctcccaggaggttgcaattctcctgtctcagcctcccaggtagctgggattataggtrcctgccaccatgcccagctaattttttgtatttttagtagagatggggtttcaccatgttggccaggctggtcttgaactcctgacctcaagtgatctgcctgcctcagcctctcaaagtgctgggattacaggcgtgagccaccatgcctggccataggtctcattttgtacactaagaaaatgtcaaattactaattttcatacttagtgctaaatttacatttatcataaatgtaaacatgtaatagagaaccagtaattttttattttccttaaaaatgatcctggtaaataagagaattgattcataagatcatggtttgttgatgccatrgcaacataatcttatattgagaacatcatctgttacaatgcaagtagttgtggccatgtgcctagaatagacttagttattaaagtacattgtgatatgatagaataagatttgtccagatgtttacagagctcttacaaggaattattttagtctgtttctaaattattttagtgtgttcatctgggttgaaatgttatgtgcttaaaggattgagttactgtgatgacttggaatatttaagtagctttgaattgtgcgggtatgttaaatgcctgtttgggaaagaaaaataatatgagtgaacagagattaaaatttgtgaattatctgattgccctagagatgtctctatttgagtttaaaataagagattggcctggtgtggtggctcatgcctgtaatcccagcactttgggaggccaaggcaggcagattgcttgaacccaggagttcaagacaaacctggacaacatggaggcacctcacctctaccaaaaaaaaaaaaaagaaagaaagaaaacattagccaggcatagtggcatgtccctatagtcccagctactccagaggctaagctgggaggatcgcttgagcccaggtgggtgaggctgcactgagccaagatagctccattgcactctagccctggagacagagtgagaccctgtctcaaaaaaataaaataaaataagagatcgaatagttctgttttaaaatagtctaggtgagaaatgatagtttggttttttttgttttaatcatattgtttaaaagaatacttcccagcagagttttattgggaaaccacaccaaaataaggaacatgctgggggcaaattcagtggtgaacataaatctgaatgttaagaagacaaaggaggcaacaccagctccagggcagaaggagagttgagaaagttaggaggggctgacactaccaatctagcatccagagaggtttgatgaagaaaatttgactttagggagttgtgaatttaagatcagaagtgatttatgcgtagaaaatgatttctgtcatttcacctgattcttgtaacttcagcttgaagtttctaatttcaagaaaattagaaatcactcgtcagctaagatttggggaaaactgttaatagtcacatgtgatgttattaacaatttattggatagctttatcgatcctgtttctcaaattatacttggttttacagattttagcctttggtttgactcttcttttgccccatttttcttggctgctccagctccactgctgagttcactacaggtcagagaactgttcagtatttttaaagcagaaaatgcggtgaggatgggattttgtaatgtaagtttttaatctccgtatctgagcattttggttcgtgcagtgatcccaagtagctgagatgaggcaggctccagtatcttaacctactaagtatgtgtaaacttgatagagaacacaattttcctttaaatatcttagctctctagtctctcaaattgtgaaaacatattgggggcagattgtgaaagaaatatgttcataaaatataaattcagtgatatccatggaaagagcaaactcagagtgaggcagatggaagaggaataacttggatcatccaggtgggttaggtgttccaggaaatactgaggacccccagccagctgtttgatctggcaatactggaggacggtgcctcagcgatcccttcaaaatcaatgaagatttttcctttactccgtaagctgggggtcattgacagtagttggactcatttggagtgaggtgcatagaaactggcttttaggaattcaaaactctcatggaatatgtgaaccacttggattcagtggatttgaaaataatcgaaaaagtaaatatactaaaggtcaaggaaaaatgaagtcacttgcttaaaggctgctgagtattagattttaagagaagaaacgtaagggaccaaaagttttcatggcaaaaagacaaaacaagcacccctctgtcccccgaccttccagccccgctaccaacacacgcagtgttttatgaagtggtcgcaggagaatctgaagcagccataaagaagaaaggagtatgagagatccaactgtgccactaacaggcacttaatttcttctgagaactaatttataccaactactctagcttttcaaatagcaagcaaaagccaatttgcatttacattgtaaaactctgttttccaaacagtggcgtacagagtgttggtggtcaaatctctaatgtaagcgagggatttggggatcaaatatttcctgaattgttactctttgctagagagtcaagataggcgctggtatgtaccctccaagaagaaataaatggaaaacacacacaggaaacaaacctttataagctttcttcaacattatctcatataattcttagaatatatataaaagaatattactactacattttatagacaaagaaactgagattcaagttatgtaacttccccaactctatacattggtgaatggtcacttcagaaagccttgctccttctaaaactccagcctacctctattaggctgtgatttaaagttcaaatgagaaacacagccaacaagtgcagagaaattccgaagtcccttgggggattgagggctggaaaaggctttgtggaagagatgaaactttctttctttttttttgagacggagtctcgctctgatacccaggctggagtgcagtggcacaatctccgctcactgcaagctccgcctcccgggttcacaccattctcctgcctcagcctccctcccgagtagctgggactacaggcgcccaccaccacgcccggctaattttttgtatttttagtagagacagggtttcaccgtgttagccaggatggtctccatctcctgacctcgtgatccaccagcctcggcctcccagagtgctgggattacaggcgtgagccactgcgcccggctgaagagatgaaactttcttatcaaaagggtccaatttagacaagggaagatgttgagtataaaaaggttgattatctagaattggacaatctatagcccactgaagtattttgggtgtgtttgttagatactttgagaattagaaattgtgaaatgtagttattagaaaattttagacagccaagaaccatttaaaaataaggctcccatcttttcattcattcactcaaggccaaaaaatattttaggattaaaaaccaatctcaaactctaaaatatttattaataatttagactttatactaaattatcttggaaaagctagagctcaactaaaatcattttttaaatctggttcatctgtttaatattaaggcagtctctaatttagtaaataaacacctctaaaaattgtagtgcaacctctattaacgtgatttaaaccatgttgtgtattctcctgagatatgccagattaaggaattatcgaagccttggtggaaaatgacctactcaaaatgaaaatggaattcataactaaaagcatcccaaaaaacagctagtcttaacccttcatttcgtaaataagcagagtgggaataggtttaaaatgtcgaccatctttactattttagatcacatcacgttcttataatttgagcactagtaaaggttttatttgttttctatttctttctctaatattcaaatgtgattttgttcctgtttgtgctttgaatggcatgtttggatgactgtcccagatctggcattctgagattgtaccactaaaaatgtcaagtgcatttgccttttaattacatacagtacctggattttaatattttagatttttccctgaagaagagacttttctggtcctgtagtttgtgggagggaaaaaaatatcactgacattatcatgaagctttttcccccaacgtctccatatatccacatttatcatttcagaacaatttcattttgggtcaggtttagttgttctgtagcttactttgctataaacactatgtttaaatatataattccgcactgtttgtttgtacttctttctcttatttcccattaatgttcagctcagcttgttttactcttaataggccattactacttggatgtcacatatgtaataatcagtatgtggaaggtatagtttcttgtgatttacactcctttccttcctttacctttggcataaatgtgaaccagctcattactttccagggtatttctttttttacttccccaaattaaattttaatttcatcctattgttattctctgatttttattatttcaggtgggcaaaaaagtcttatttgtcaatgaaacaactccataaccactgaactcccttttgcacctactacatagacaaggtacttaaagcatttttgcttttgagatgatacagttcctcaacttaaaaaaacccacaccatctacctccgtgtcttcttcagaaaggtcttctctcagctccaaatctaacacagtcaccaaggcactccaccttgtccttctattttaattctcagtatggaagtcctcactatcaggtgatccttgtttacttgtctattgtttactagacaacacagggatgtaaactgcacgagagtggagatattctctgttttgttcagtgatgattcttcaaaccctagaagtgtgccaggtacatgccagggacaacaaataattcatttaattaatgaaaggaaggaaacaaaaaagtaaatgttttctttgtgtgtttaagatggggcatggaacatgtatttttttttttctttttgcttctaaggcttcctctcagaaccctcccagattccattcatttgtctatccatttaagtctgcttttatttgtccccaaaagaatgtgactgactgccaatttatgtgtatttatatctccccagcttttcctttctttttgttaggtagtagttgaggttgacacctctattgtatcccccacctcacccccatgttttgaaaaggcagtgttaaacattactcctaatataggcagcttaatcacatttctcccaagtgaaagtgccagatgggagtcagaaagcataggctatatttttaattatgtcagaagttaatactagaactattaaaaagccactttcctctcctgagattgtctttctttatttgaaaactggagttggactttttttgttgaatgattctaagaaatgttttagattgtcaagaaatcagatacaaattcatccccctgtggaggagccctatctgtgcctcttctgtaataccagtagccatggtatgtattgcagtatgatgctaataagtacagtcatttgagtacttaccatattcttcttctagtttatacgctctctaaaggaagaacacttgttcatctttctggttttttagcctagtacaatgttttgtacccatcagataattcaacaaatacgtactaaatgataaacaataacagattcttatctctgttttttttagaaagtagacttccctccatctaatgctgcttctgtgatgctataatatttatggtgcagaaatctagatttagaaagagaactttattcgaatctgtttatacattccctaatacttactgaggctctatgaagtaccagatattgtccttagcactttacatgtttcaatacatttaatctttgagtcaatctagaaggtagactcaatctccattttaccaataagaagtgaggagcagtggttaacttacctaaggtcaacttgtggcaaagctggaattcaaactctgattaatggttttgttttatcaaaaaaaaaaaaaattaaggccacctgacaagaatgttcactattagtgtttttccagagatgttgaagctctttaccaactgatgctatgaaaagcagaatttttctcttaaagaatgttttagattttataaattagttcagttaaccctagcattaatgtatttgtttcaaaaaaagtttaaaactttaagcagtatattatagttgataaatgctcttatataagtagcataccttgacaaattatgagcatttttaatatgttacctattcattgggcaaatatatattaaaagtttataatgtattggtaactatgtaaaaatcattagccataaagacatgaatgagattatatctttgcccttgattcgctccagacctagtgtgagttgtagacttgctgagaaatatttgcaatacaatttttatttgggttatgggaaaatgattaactggtatttagaggtgagagggtagttaagggaaaggtgttaggaacactaaagaacataaaagcccatgatcccacttcccattttggaagcctggcaaattaggttctcagaggacctctgcagaacagtcctaccctggataggacacatctgtggatacattgctggacttacagtggctggtggagatatctcaggactcactattctgccaaataatatatatatatatatatatatatatatatacacatatatatttatttatatatgtataaatatttatttatatatgtatatatatttatttatatattatatatatatagagagagagagagaaggagagagagagagagtgagagcgagctgaaaacagtgagcaacaggcagaaagagaggttggtaatacctgaagggggatgctaaaactatattgcccttgagacttttatcttcagactggtaataagagtgttgcctagcctgggactcccatatggagctggcagaggtggtctgaggtctgagacacctcatagctactggtaggagatgtaaattatctttgagatgaaagcatgatcaatttaggcctgcagggttcccacaggctaacataaagcaattaactcacaatcaaaggtcaccaagcattcttgaaagtaactcactttcaagagtgagagttagcagaaacaacagatgtaaatcctcaaaaaaactgcaggtattgggattgtcaaatacaaatagccttgtacaaaatctctaaagaaataaagtgcaaatcataaagattaacaagatgctatcaggaataactaaacaaagatccgtttacgaagaaccaaatggaacttgtaggaagggaaagcataattgttcaaatttaaaaataactctttggatggacttagtagcagatttggcaaaatgaagagataatttattagctagaatttaaatctgaagaagttacccagaacaaaacataaaaaagagctaagatgctcaagaagaaaagaactaggcctgggaatatctccataatatatacaatatgttacagaactatagtagttgaaatcatttactgtcagcacagaataatatgtttcctctaagaataaaatggaaaatccagaaagtgactcatgtacttaacgtaattttgatataggacagaagtggctgtgtagatcattggatcaattcaaaagttatgcacaggtaactggatatgtatgtggggacggaggaggacctgaaacaactttctactatacatcttggactcttttaaaactttcaaataaaaaagaggatttttgaaaaactcagctttgaaggagcttcttaaacaataggccctaaccataaaaaaaaagattgatatatttgacttcattaaaattaataactgttattcataccataagtaaagtaagaagaaaagcaactgatggctttcagggcacattaccccaaaatatggcaccttggcatactgaatattttaacctgaaaaaagttggagaaagtgacaaaaacaggaagatctctctgaccttcccttgaagcagatcataagaccctcatatgagaagtgtcctccttatagctaggggggaaaataaaaagcacctttctttccgaagataagggacacatagaagaatctgaacaaacaggccttgctaagttttctgcagtttactatacttagctcatactcttcgccctatcatagtcctttataacgtcacccttcatcaaacctgctataaaaacactcgggtttaactgttgcattagttcttcatttccttatgaagtctaccatgacttgtaaaacttatattaataaatttgtatttttctcttcttaatctgtcttttgtaataggggtcctagccatgaacttttaacatcttgaaaggatggttttcatcccttatacagtctgataggagaagatatttgtaatacaaatttcagtcaaagctatatactgagcatttcagagaaaaaaacaggtagagatatttcaggtatctcaaaaggtcattttagtagtaatcaaatatgtattacatttcattttctactactgaagtgacaaaaatcaagaaggctgataatacaaagtggtaagatataatttaaatggggttggcataygctgctggtgggtatgtaaattggtaatagtttggtattatcttgtaaagctgaatatttacaatctttgttttatcaaaatgggatggataaaactcagggaccacagtttgccaactcctaaaataaagagtatttgagaaatggtgaaaggattttaatgataagagtatatgaatgaaagtgtctcagaagatgaggttgaaaatgttgattggcacctgcttgtgaaaggccgtatgtgtcataacttttgccttttcctcttgaatgtaaagcagtgaagtcatttcttcgcatttaccttttagaaaactcatccaactagyaatatgtaggataaatctgaggtagccaacatgggaagcaggaggactagtgaaaaaacaagattgggtcttgaaggcagtcgaaggtggggtggagaattcagaaccaatttcagagagaactaagcagatagaatcaactgtgtttaagaagtaagacagtgcactaacgctctattttacctaattgaatgaatttagtgggaagcttgatgaaaaattaatatgcacattaaaacatttcttcttcattactatgaaacaaaataatattttactttttttaccattatatacattcctaaaatatacttattttattgctttcttaaaaagtatttctgtcacttcagaattttgtacagcattttgaactgtgtttttaaaaccaaaacaaatttagagactctaagactagaaggagatgccttaagcagtgtaaaattaattttcaatatctgcagtattaatctgtaattttatttcttagttgtttaaagtcttcatagacttttgcactattttccacatcagaaatctttggatcacgtccatatcattattaaaggagaataaattattttccaactactgttaaagcacgtggcatttagctgctctcttttctcaccagtaaaatctctggtagaccctgttttagtcagtgatctaatactgggcaagtttcrtaagatcacatgcaatgaggaagccaaattacttcaaaagatcattgagttaaataatacatacttcaagacacccataaggtttaggtgtccagtgtggcagcctgtgtaataaataacatgtgctttacaaaacctgtcattgtatatttatataataggcagctaagattttttaaaagctgtttttcagtaatttcatttttcctattcatagtttttcatttctatgtaatggacccaaagaactgacatctagattatctctacctagagcagcagcgtctactactatttctactatcccatgtgttttagtttacaaaaacctttcacaccattatgttacttggtattcctaaaagctacacaagatgggtaatgttattaattttttttatagatgaaggcattcactctaaaagattctcacttgctcattgtcacacaacagataagagaacaaactaagaatcaaaacagggtcttgctgatccaatcccttgtgctttcagtgacactggacttttcttgcacattggtttggtgataggtggtgacagatggtggaaatggttagctctataaaggaatgtaacaaaggggcttgaaatttccagagacaactcagaaatgtttgttatcaagttcatcttatgttaatgtccacaacagtaagagatatgtctgatcagagacatccttgtgttttttaaggagataactgattttctatatgccagtgcaacctagcttaggcaggcttagtggtggtctttcatttattcaactaatattttctgttctgttgctcctttttaggtcctactagaaattcaatggtgagcaaaataaatatggtttttgctttcatgggctttaccttaacagcaatgggaagctattggagggctctaatcagtgaagtgatatgatacagttgaaatcctagaaaataccgtgtgctacaatgtgggttttgaggtggaacaggcagacagtatattcagagatttaacataggtggctgctgtgtgatctgcctgagaggatactgatctgaatgaaggtagtagcagtggggatgggaaaagtgatgacaaagaatatttaggaagtagtaattttgtaactaattgtgtgagaaagtgactgtgcattccagtttgcccaagataattccagtttttgttttccttcaaaagcatcccaatttggatgataaatgttaatcctagagataaggaaagtggaggattcaagaatgatgcataggtttctggcttgaagaactgtatggatagttttgccatttactgaaaggggatacactagaaaaagaactggcatgagataagattatgagttcgggttggacatggtgtgcttaaggtgactgtcatacattgacgtgaagacatattaatcacatgactccatgggtcaggaattcgggttgcaacttttggtcagagatatatcgattagagagtgatcagttatcaggatggtaactaaagagatgaaaatggataagatcaccaagccagaaagtatggaacacagtgtcaagaggcataggtccctgaggaactcaaaggggcacctatttttaagggatgagcaaacaaaaatctggaaaggagagaccagagtcctcagaaaactaggaggtacccaagttcatggaagtcccaggaaaagggtgttccaagaaagagggagtagacaggaatgtcacatgctattaagaggtcacatraaataagactagaaaagtacacattgaattcagaaacttgcaagtcattagaaacattggttatggtggtttggtgtggatgggggacataagcctgccggtaggattttaaagaatgattgggaagtgagtgggaacagtttctcagatctataactgaaaaagaaagaaagcactaatgaaatgccgggaggatttgcagaatttgagtgacaataatgtctctgaagacaccataagattacttaatacattgtacttacaggcttctatctctaatgtccattatgaaagtagaagaattagtttgcctaatcacagctattaagatagttttaattttttaggtaaatttgtgtgactttaaagctatttcatttttaagtagtgggagcaaggacacaattgatcaagtcactttagctatttttaccccccaaaatgcatcctagaaatttgctcaataaaaataaaattgtgccttagttttttttctcgttgtacaaagaattatgcttctcttggcttctgaacactggggattccttatatgmtctttggcagataaaaaaaatggtaaagatttatggccaaggaaagcatttctgaaaaaggtgctccacattgtctttgtgtatgtgcagaaattataaacagaactcaggggcaccaccactataatagctttttgctctctttgaagaaaatggaaaatgctgacttaggggctactgcttgtatttcctttaatgaatcttctaagcttgaatgattttaaataggatatttatgttcctcggttatagcaagccaagtacttaaaaaaatacatgtgattaaaatatccaaactaataaatatatacagacatatttagtaaaaactactgttcatagtagtaatagtaatgatagtaataaatgccacagctaaagactttgaggagaattcacagtcaaggaaaacaaccaccaaatcacatgtatttggagaatttgattagacttctatacttaagtttaataattatgttgaagattagtgaacaactcttggcacaagaattgtcttgacagacaggcagccttacccaactcaaataaataacttaatgggcttttttttctttattaaccacttggtaaatgtgaattgaagtctagtttttaacaaagacatatagattatgactttattatctctgatttgcataatagattatgaaagtctcaatgctttgtactcttggtatacctgcaagcgttttagtttctatctatgttaaaaaaattactttcagatttggctttttatttctggaaatatgtttacatgaattcattaacctatctatattacttgtaagatcttaaaaatgtcttcatcccctgagtttgaaattgttttacccatcaccctcatgtcagttctgttattttattactaaacctaggtaatagtattaaagctgctgttcttacttcatgatgatagtttatatttgcacctacatacattatatatattatatttgtacccatatacattatctgcttctggtagggattagcagctctgaagatttttgtaaaatgtagcatatgcgactcataataaaatatatttagaaaattataccataatagcatgtattttatttaattaaactgttatgaaaaatactgacctcattaagcaagaactgctcttccagagaattttcagaaacatttaattctataactcagatatgtcagaaaatcactaagggatcattatcattagcccctgaaagccaagtgtctcatagaacctgaagaaagtagtctttgattagtgaataatgatgatttgttgcatggactaaagctttttttctagagatttctacatcaaacttctgtttctcttcctatttgaagtagtatctgtggcaaaccaatgtaatttgagttacaagcaatgactatgttccttttaggttttttcattcaactttgtaatatattccacctgttttcaatatctacatatatagagatatagatatatgtatatatttctaacgtcgccctggaaaggaaaagatctctaacatatttactacatgttttggtaaattcaaccataaaataatttgaaagccttaagrtatctctgttcataattatgaggttagaaattccctacagccggaatatatggaaagtgtcaagtcagaaagggaatctcccttagtttcccaaaatacaccagccaaagccttgctttttctgcttgagaataatagttagtgaatctagtctatggagaagtttttatgcaattgaaataagataaattaagacagttatagtgaattgttttacaaagttaactgttctgacgcttttatttgagctatgtctttctcaccagtttagctttaaattaccattttatataatgatatttacattagatatatttattctttcagatttcttactttgagaaattaatagttaacctcaacagtctccttttggcagaatctgtggctgttgggaaaagtggagcagatacttggatgtatagaactatgggttgcggggagggggatagagaagccaagaggagaaggtaaagaagaaaggatcagaatgtagacaaatggttgatttttaagagctgattaacagattgtccactggaaaggcatgaggttaggtttagagatttctttgcgtatctgttcatgtggacaccatctcttgactccaagtgcaaggtgctgtgttgggtgcttcaaggcaatttcccaaatgtgtctaatcctgagaatcacctggactcttgttacaccaatttttagcagtaggagccatggatctggagacattgagaaattttgtgttaaaagacagaagatatagtagattttttctttgctcttgagcaatttataaactatccttatctttgtaagcctcagttcctttatcgataaagtgtagataataatactttccttgtcaattttcaaggtaaatgaggtaaaaggaaaatgtcctcagagagttactggggcttgtaaaagggttaaagttggtaattttaattgattgtgtgtatgatgagtagtcagatggttttgagaaagaaaggaagttagggcatacaaagaagtttttaaaaataatcatcttctcaaagttgtttcccaactttattatctgggttttatttaataaaagaatttgaaatattccttggtgtgtctgtttttctttgcctattcttctcttgtgccaactcaactattcatctcaaattatatatattaaatcataaacacatgcttctaacagttatattaggcatttatttaacctaaccccttctgtcccagacaagtaccattaatactgccttaaagcaccaagcataccacctggcatttgagtcaagaagcatttgctgaattgactgataaacctctaaatctgaccccatctctttccaatgtactagttgctagacaaccttatgttcggactttcaaggacacttggggaaaactagttcatcattctctttgatatttattgtggaggtttgttttattttttgtgttaacaaaacctcttgtcagaaagatttccttacctcaaccctaaatctcgtattgtattttagcatgcttctgtatttacattgtgggattatttttattaatatacaataaacaagttgtgtttcttggaggtaattactgggaataatttttttctgtgattattagcttctttcagtaactgatttttttttttatccatttagcagcagcaacagaagaaccagaagtgatcccagatcccgccaagcagacagacagagtggtgaaaatagcaggaattagtgctggaattttggtgttcatcctccttctcctagttgtcatattaattgtaaaaaagaggtaaggcctaatattgtcctgtcccgctcacttaccatttatgtcactggttttaaaaacctgtttttctcaagatcctttaaattagaacaaacaacaggaagaaaattttaattttaacaatgttgtcagcacctgagtctattggacatgctttctaataaattcttatttggttatttgcagtttaattttggatataaacatatgctttttgttaagttgacctagaaattaatatccgaatttaaatgtctcaaatgcaaaggtacttgagatcatttatcttatatttgaagtgttattattaacaatggcaaaatatggatttattgtgatacttgggctgtggtctaggaattattttgtgctctttttctgtatttttctacttcttggctacaaataagatatgagaagaatataaacattatttagtaaaattgtacattaaatattcattgactaaaaattttagccttttaaaatagagagtaaattgttttaattgaacattaactttttatactatatcaactaatatcaccatcttctgacgttacttgaagatactgagacctactggaatttaaactgagctttgctctggagaccaaagtatattcctgatgaaaagcatttcaaagtacacagtttttataatatgagctattgtacattatataaaatgccataaatctgtaaggcattgtcttggaaactaatatagcactctaatccttcccatcatgtatttgggttaatgctacaatttggaaggacttttaaaaaaaatatttataagcaaaagtacagtcctaaaatagtttggtgtatagaagtggttgtgatcagtgaattctattgaaaaatataataagtgatgttgcttatattacattaaattatctagtttactattatagttattttatacttgaaataaagcattaacattatagataagactcatactacatgttttaatgattccatcagagtttattttaatatattgcctctttacgattatcccctggagatatatatgttggagaagacacatctgcattagaaacattaggtatgcattatagtgttttgtgttaaattagctacatacgtgctttccccaaatagtgctttctcttgctgttgtctccctctgtggttggaaaatacatcatatgtgaggcaaaagttttaagtattttagcaataaaaatttgccagtaaagatcaataaaaatcaccaaatgtaaccttcagaccttatgtctctgtttagtttaaatttgtatttggagacttaagtaaacaatttagagagtaaagttaactaaacattgcttcacaatgttctggtcacttcagattggatgtaaacatgaaagtggcttctgattrtatcctcattcagctagaattgggctaaactattyagttttatttgttatttatttgaaaacattcatttgtcttgataactctccctatccaggcctctgatttagcaataatgaaaaaattgaaaaattaacctcctaaagtatgctaaaaccatcactaagcaagattttgggggaaggtaaaatgctctgacagctctctaaaattgtgtaatatgacaacttgattttctggttcatatattaaatggttaagttaatgagcctctctattaaaatatttaacatttgagctttcataattatgctttgattgtcttttgatagaaagtatgctagggcttttgcttctgttcctcaccatcacctttatacccaggaaaagctgcacttttaaagatagaccaggtttcattatttagatatgttaccttctaatrtatagtatttatatctacattacttgaatttcttacttaccaaagcaattttgtaatgacttttactcatatgtagcgtgtcacacatgtaccatgtatgctttaatcacaagtatgtttatcatacatataaaaargtatagatatagcagcattgcattggatattatcatcaagtatagcttaaaactattaatataaaatgtttcccttttaatatataaatttataataaaaataatggaaaaggaaattactttagcctcttatctacattttagtgggaaattgttaagtttgattttatccctcactgggatgaatacatgtagatatatttcttatgcggaaaacagttccatgtctttttggttgttttgcaaaagaatggtgtataattcaattgagtaaagttttacagctaaggatatgtataaagtaagtttttaggctaagaaaagggatattgcatctttcaaaacgcaatgtcattttttaatttaatcgctattcaattatttccaaatgtatgccattttttcattggttgtgtattatattttacatgcacagcatgaacacattaataactcaaacataaatttgaaattatgtttcaatacagtaaatgtttgtgtatgatatcatgttcacatgcatctactgtagaagtatctgtgtatatatagtatatggtatatatgtatattcacataacatatgtatatacctatgtaccattaagatataataacttgtttgtagaaatttaggtgttattctgtatatatgatatattaacataatagatctttatgttttgtatctaaagaaaaataatctatatagtacacaagttctatgcacagctgttccatctgtcatatttagataatggatgatattatgcttaactgcatgttgaaaatacacaatccatttaatttttcaatattttggcaataagaaataccagcatgttattttttccaaattatgtattttaaattttatttttatattgcatatctgtctgtttaattgcatggcaaaaaaaactaacaatgcatgagcaaattgaaatgcaaagcaaaaaaaacatgaattttattttattttattttattttttaacgcacatttttctgctttattgaatgtgacagagtcacgcttttcattcaccattgcttctctttttccactgtctgtgatttgcttgccaggaggagctactattcttactcctactacctgtaagtagaaaatgggtgatgtacaactttacgtgtgttaaggatgcagtatcccttttcaaaaacaaaacagaatgcttgcaattttggtgacatttcaaaaaaaaagttttttcagactctaaaactataaactttatctatcacctattttgccaatctttttaaaaagggatattgtatttctgtatgtccagctacttttaatttagttataatttccataagtagctttagtctagagccaaaaacataatttatttactaaagttaaacctgtaccttatcttagcaatatggcacttcactcatctggtaaagaagagatagtggttgtaactcacaaatcactatctttatgtagcattgtcatgtctgacaaaatgagccaagtggtgtatttatggaacactcaaaatgcctttacaggatgcaaattagttcaggtctgcatgtgataacatctttctccgtatttctaggaatccaagatgggttatagcttcagaacatctttggtccggccattaaggcaatcattgtgcttttgttaaagaaaaaaaagtagaaaaaccatggtgttgcagcaacaaagaaataaaaattctttttagaggaaaaaaatgagtttattgtaacttaagtaggacaaatgttttctaaaactacagccaaaaaaacctttgtcaactaggaacagatataggcatcacattgctccttttctcttccagagtctgtaactcttccgaaactcaagcatgatatgttcatttggataaggatggagaagatggtccattctatttcctgagtcatttttcagcttatcaccttatatgccagagtagtttttcatccaaatcaaaggaacattacagcaaagcattcttggactttgcttgaccagtatttgatccgccagctttcaaggtttaaagattgaaattaagaatgtttggggcacatatcccacagcatttaaatcactagataaattcaagctagctttacagcaaaacctttataagagtctccattctccatgactataacacaattctgccaacattttaaatattataaacattttgcttcctaaaatctgctaaaccaagtagctgtacactaacagtgctcctaacttattgtgatgaatcataatatccttgttaaattatgtttgatgaagccagagataatcaactgtgccatttcatacaatgatggagcactttccccctttatggcccacccatacatccacctgcagaagtttgtgctgttggctgctttgataatgaaagtcatttgcacatctgtcaaactcaaagtagttgcaaaacgaatttcttaactgttctgaagtgcacwttatgtatgctagttactcaggaggagacaaagcatcaaacatactggaatcactaagtatttaattatgagactgtcaataagcttaacattaaccattgatgtagctctgatgttaaaatgagattcccttttttggtggatagacaacatttctgtgttccagacaacgtaacaggttatactaatattattatagtacatggggctactggtaattttaatcataactacagatattatcacagagatatgcttttaaaggctgcttaaccatacctagtgatgcttatctggattagaggggtttttaaagataaaaatagatataaattagagaagagcttaaaagaaaaccagatgtgatctttgagctaatattcattgacattgtcatagttactatctgtttttgatcaaaacacttaacactgatgtcaatttttctttgttttagaagaacttgaatgaaagcctacctcacagggttgttgtgaggattgaggtataaaaaccaaggtgataattcatggctggcagatatttacaaaggtcatatttccccataatttgtcaactaatctaggtttgtgaatctgaaaagttaaagtccttcattgcatgaaaattttaacctgtcatgcatttgacaaattcattacttattgtttttctccaatcatgaactacatataaattatacatattttaaagtaaagcctcagggtttaaatttttcttttctattggctttgaactgctcatcttcaaaattttaacattgttctgaatccaaatttcagtttgtgctatttttattcaattcagtctctcatattttttgagaaatgaatttattcttcttatcccagaaacaaagattgaaagttatttcctaaagcaatttttgctgttttaaaatttacaaatggcaaaatatttattctatatattttgctgaaatttgtaacgactagtgttcaactgctagagtaaatactggtgtatattaactagtgttcaactgctagagtaagtagtgccactttgaaatgtgtcaatttaaaaagtgtaagcaaccagatacagcgtaagagcttagcctttagaaccaggtcattcttcattgcttattagataaataaccttgggccagttatttaactcccctgagcctcattgaacttatctatacaattagaatccttgtgcctttttcagcagattgatctgagaattgagttaacaaatgaaaagtgccaagtatataacaggcctaattcatctattcaacaagtatttattgaagcctgctatgtgccagacactgcgtcaagtgccaaggctatgcagatcatccttctctttgtggagcacatagtggggaaaacaattgaaagatatttgcacctatcaatcaataacactcattacaggggaagaatgtggtagtatagaaaatacctagcctaatttgagaaaggttgctttggagtcaggcatataaaccctccctgacgaagtatctattacactgagacagaacagacagattttagccagatattacaggcaaaaaaatgttgcaggttgaagaacaaacatcttgtatgatggcctagtgggaagtttggaaagtgaaagtccataggctaaatgtgaccttatgatgtttcatgtggcccatacactgtttcaaaaaataaaatcacttgaagaaaatcaagaaaattaacatcaatcagattcatggcttgtctttaaaaaaaaaaaattaagccagagagaagttcaacagtgggatcaaatgcccctaggcaagttgcccctaaactgctttccagttcttcacagccattacccttccttatggtatcttgccactgacagcagcactcatttatattacctgtctgaacctacatattcataaaggattttgaccctcaagtctagaaaaagattaatagctctttgaatgtatagcacaaatgttgctaataaatgatggtggtgatggtgtagtggtagttatgttggtggtggtaatagttcttgttacactttgtcattgttttcttattactaatactgtgattctgtgattatcattatttattatttctaaaatagccatctgcatcctcgaatcttagcttatgactatcttaaacaacatagtgtcagatctgctgtgtacatgtgtcgtgtgtgttgtgtatgtaccgccctgaggccaagtactgtaattctcagagaaaatatatcctacactggagcagtcctccaattgctagattaaggttgtaaaggaaaagcctttatacataaactcaatcttttaaatgagcctttgtagtatttgtagtacatttactctggtttggatattaatgaggatcagaaaagaatggcttagcttataatctagtgaaggtaatggtgttcttaaaacaactaaagatttccaaggcaatatgaattgcagccataaacttagtaacataatttgcctattacaagcttttagagtgcctttatttatacataaattttcttgttagtgtgatttaaatattttatgtgcctttaatagccctttttcttggatgttwcatgtgtaacattcacaagaactaaaatatattttacatccatgatatgtaagataaacatgccaatatttgagtagttcataattctaatgctgttaatagccaatcccttaaatcatatgcctttctgcatttataaagcattgctgtagttagttgatagtatgccatgtggttctaattagaaaacacatttttaatatttgaccatgtgaatattccaagatgataattttcatgtctttccataccatattttaaaactttcctcactacttttcttacacagtatatgatttaatcccatatattcatgtgtacttgaaattttctagcagtggcttattctaaaagtcttcagattagcttctgattaatgttataaatatattgctaaatatgttaatgctacacattgcatttttacttaataatagcacagagaatgaagaatgggacatgtctttgtctgttttaatttggtggctacagtaaaacagacttgaaaagttagtcatgttatttctaaaaggaactaaaagttgatcaaaagaattaattacccaggagtatcaaaacttggctttagcttgaatatttattgaattactctagtaaggaggtatttattttgcttttaataaatataattatattttatgatatttaagagaacaggaaatgatgagagatttggattgacagcttgaatattgaaatatgcatctgacaaaatacttttatagcaaggagcaaatataattgtttgaatgtcaaacttaattcctgaaattgtgaccagtgcttggggtttctaaaccatgtttgtaacattatcctcgggctcacctggactatttattgctggtgttaactctcctgcaagcctcaaacactaaggatgcccttttgtatttgycttggcagcaaacttgctaaaaaacgcaaagatgccatggggaatacccggcaggagatgactcacatggtgaatgcaatggatcgaagttatgctgatcagagcactctgcatgcagaagatcctctttccatcaccttcatggaccaacataactttagtccaagatgtaagtttttcattaaaattttaataaatratgttacaactcatttcactttgaattctacacgataccttttgagtaatgagagagagtaggaaagtgaggggagaagcagctagaaagaagagaaagagatggagaatattatggaatttacaagaaggattctcatcaagattgatactggatttagtttaacttcaaactctatgaattttattactgtatcacaagggatattccaaacatataccactcagtccatagcacgtgtcattgctttaagtggaaatacacgattgcctacaaaaagttagttcatgtcagaatttataattctttttccatttgcatcttcctttgtgtaagatgaaagtctcttttgcgataagaggaaacagtaattctttttgggaattattgacataggtaaaatcattgcattaaagtagtatattgtagactcctggaaaattgcaatactaaaaagttaactcagggaaacattagtctacatgctcttaagtatctggtgtgaagtccaaaagtatacttgaattgggggttttgcaaggcatagtgaaattcatccatccatctgtcttgaaaattcctaatgttggtctatgaaggcaaggcttttaaaatatttccactgaagtaccatttaaaagcagatgattttaataattaccccagaatcaatattactgtttattttcaaatttcatatgaatgttatattctgttctatagtgcatctgtttaagttaattaaatttaagtgaaattgcctaactttgtttcttcaaatcctcaagtaaaactgatgcttgaggcaggcaaatcaggtatatctcttgagtatactggccttgtataacttgggccttatggcatttggctcagatcgcagagatatgctcaccccggtttggaaaacatgggtataagcaaagaaacaatataagtattatctcctgtacaaactatgaacatatgtaatagtaagattgaaaacaaagtatttgtaggttgtatgcttgtatgtaaagagggaagtttttttctgaattgttcagcttggagaaatttttcagtaactattggatctaaaatgaagcccatcattttctatgtatatatgtataccaaattagtagttaaggatgctatacatgagtcattttggaatttagttataatcatgacagggcctttcagatctattttatttttatttcactatagataaatgatagagaaaaatgtaaaatactattactgttgaaagtaagttttgcggaaaataaagatgtatcatctctttaactacttaatttaatatttaatcaattaaggttttgaaagcattcatgcctcccaaacttgtctatctattgcctaccttagggccttatttgaaagtttgaattcagcagtgtaactataaatatccacttatgaacttagagaaaggattaaatctatttcccacagataactgaaaaaaattatttggaatgaatatgagataattatttctttaaataccttacacttgatagatctaaaatacatgggtttttttttctttaattttttaatgtcaagtttaatcttctggctttttaaattaaacagagttctgaaccataattatagatacacctctcttgatgtttagatataacccaagctgagagagaaaattttacatttgcagaatacagtaatctgagaaagtttaataattatatttcttaagaaagcataaatctattttaaagaaaaaagattttaaaaaacaattttagagcaatatattccttcatgagctttgttttcctgcagtgcccaatgatccacttgtaccgactgctgtgttaggtgaggccctaaatctttatcatcttttcattgcatggatcacacctccttgcatgggtttgcccacatagagattatttacagtgcaggaggcagcttgrttttgaaaatagacagccatggtattatcaaagagagcaactgtgttcaacccaatatcagatctagtggatttcaaattagcaaggcatgctatttaatgtattcttcaattcttggttgttagatttggagcaaaagtacatggcccttaatgtctgactaatattaatgtgtcaaaattagtagaatgaagccaaatgcatacatctsagggtgcaatgttgcctgaataactagtttatatgtaaaagtctacctaatggaaagggatgtttctaaatcctcccaatttataaccacgaaagaacaaatttacaagtaaatattaggattatgtgcatttgctctagcttttgtctttattaagaatgttttaatgtaggtaaagttgctaaaatcttgatgtggggtttgacattctacatgaaccttacctgataagtaatgttatctttcaagaaatttagaacaagctacttgggttaccactgtataacatctaagacaatgctattactaatgacaattaacgcttttacagatgtaaaattatattaatttttaaacctacctatatatttaagaatggaatgggtttcatttttcatttcactttgtaccctgttccttgactaattatacaccaatgattagtaatcagcttgcctgtatgtttacaggttccatatcaattttaccagcgtttctagttaagctttaaccaaagaaatatggaaactatcaaataaatatatcttgtaaattcccaaatgtcatgtttgttatttatatttaacatttcttgtgaacaaaaaactttaacttatattttatgcttgtatttttgttatacatacaatcaatgttcaattgcatttttaaaatattttggaacaacacaactaactcagttatgtaaaatatacctcttatttactaaaataaatatttaaaattataattttataattactataaaggatatatattctaaaataatctgaaaagtcaatgttcttcatctctacttgcactctccctttgatgtccaccaataatggttaggaagtgaactggggatttgccccagggagtggtcttatcacacagggaggagccataaatcatgatcactggggatcattaaggatacatcagatgcctctgaaaatgtcatcttctgctaagcactgtrgaatgctgtcagtataaagttaataaataaatttcaattaaaatattgagaactaattggaaaaaaattagttgcctaaatgttaaaagtttccttacaataattttctacacatatgtaaagtccaagtctsggtcctcctgtggatttacaatatgaactcataaaaataccttacatctttgttttcccatctataaaacagtataataattcctaccatacctttttcatggggttttattataaagagaaaattagatgatgtgtatgagttttataaactgtaataattatcatagtaattttccctgtgaaaaaggatattcatgtttaaggaaagctagatttaacacaatagagtcataaagtctagttatataaacattcattacacattttatttaattttgaaagtcaagctggttttaaaaatatattggcattctttaaaagctaaatatctcattaatcatattagatgtagaaatgatttgttgtatttttcatcattcttaggattgtggtctttagagttttgcatccaatcatttttgtatttataatgcagtttctgaaatcacttcaaatattgcttaatgctaatrcttactgatttaaaagggcttagaaacttttcatactgattcgtatttttggtttttgtgttttactgcttcattgggtttaagttcctataacaggtaagtgtattgcaaagaactctagaaaacctttcaatcaaggatatatttcaagttattattcttaaatgtataataaggataatgattagtacgtgtaccctcactactagtcacattattaggtggtttaatgaggtggaaatgtattgagattaataatgcatatgtgattattttaaagaccttactgctcattgtactactgtattaaagcttaatgcaaaacaaaaggcactgtctattttatattgggacacaatcatctgtaagatttggaatatgggtgaattctgtgtttctcactgagcctttttcaattgtaaatattctgctactccagcaggtaaaagtgagctctggggctgctccactgagccctggctaccttcttccagcttgagtgattgcattttgcctctctgacgttatctgttctctttacttctcatccttaactgtatattctgtggcagtgcccaaatcaattgcttctgaatttaatttttctggggagatgtatttattctttatgtcggtctgttgattgtaatattttaatagaagtagatccattgactttggtcgcatagtgagaacaggaaactctcatgaatcatgtttgttagccaatgtttttgtgtagaggggtgggcaaaatctgagtaaaagacatgaattcacttgagtggttaggtcacaacagaatctatcagggattttttgattcagtgtatttttaggaatgaatgctacaaaaagagcattcagcttaataagagggagtaaagataaatgcaatcaagctaaattacagaggcacacaaatctgattgtagggttcttttttttttcccttctccaggaagaaaaaatgtttatcatggggacaacaattcattttttgctatatcctatttgtagagttggtgatagaacaggcaaatgtactagcacttgaaatatgtttatctgttaattaaatatcattctctacagtatgcattatcattaaaaaaaaaagttcccctaagagtgtattttctcttctgttaatgagtatgacggtataatgcttttcaaagtaacaccccttaaaacatttgtttttttttttaagtggtaagtttaaatgtgataaatatgagcatgcttctcgttgtaatgtttagtacttcggtcattaaagtactgtttattcttcataggcaaaaatgttcttgttcttttcttccttcttatgacagaaaaagaatttaaagtttcttttctttttaagctaataacacaattgggaagggacttacgcttaattgtgagtggtcagggattcagttgactttttaattcattcattggaatatttattgagttactgttatgcatcaggcactaggaatagaaagaaaaatattctgtctctgtactgtgtgttcagaatttagtgaggaaaatagccaagtagataaatcattaaaatatagagcaagtgaaatgacatgtaaaaatgaataagaggtcatgggaacataaagaaggagctttgtaactcaacctggaggggccagaaaagacttccaggggaggaacccacattttgctccagaagcgcgccctgatttctctcgcagcgtggccaagagactcaaaatacatttgcaataaaaacaataacagtaataagtcaaggcggcagaggttgaatataaatgcacgtgtagtctggctagcagacagagtggcatcagggggtgatcatgtggaatgcccatgtttcccagtgcagagtgtgttgtggtaaaaagccccagagaatagggccacgagaacaagaagagcagccctttggggatgggtcacctagatcgggtatctctgagggaggttgggatatggttgggaaggagtttggtcgacttaatagaccatgaaaacacctccacttgacagctgggtcctctggtcccactctatactgctatgactacagatgcaagaaaaacaactcagcaaaatttcccgcttaagcttttaaaaggtctatcagatgtctccctgcatctcacagtgtctgttgtcttgctgatatacacataatatactctcacctgaaaccttgagttttgtctttggggatactgtctaggcctatactgtatgatatttctttcccagaattcctcttgttatcagaaagatcttaaggtcttaaaatcttcattgcatagatacatatattaaacaagataactttgtctcttttttaatcttctgaaatctgaaaaatgccagatgagaaccacagtgctacagcagagtccagtcgccttctagacgtacctcgctacctctgtgaggggacggaatccccttaccagacaggacagctgcatccagccatcagggtagctgatttactgcagcacattaatctcatgaagacatcagacagctatgggttcaaagaggaatatgaggtgaataagttttgatactgtattgaatttgatttttaactatgatactcagtggaatttagcatttttttccctctctttaacacaacaaggaggggattgttctataggctctctaatctagtgtttatgagtgtacaaccaagtgtgtgtacctgggaatgggaagggaatggggaaaaaagcacttcccagagatatatgagtctaaatttattacaagaatctttaatgttggattccgtaatttattttactatggtattaaaaaaaaacactttgcgtatctccccatgcaaaaatcaagtagcaatacactttgggtcccattgttccattgcagattctatcatttgaatgaatcaagtagcaggtacttctctgcccctttttttgttgaccttatggttgagaaatcagatgaagctttgtgctctaaatatactacttgccactctcagtttaattttatggattattggttgagggtggctgagaaaaaaaatagagcamtgcaaatctagtaaacaacactgagaagccaaaagaaggcagtgggaaattcttcttccaaccttatttccccttcctactcaaaccaaaataccaggacttatctcacaaaggcaatgatttaaaaccaaacattccaacaaacataatatagcaaaaggaaaatagttcctttgccacccttcacttactgagaaataccaatctggggcatggaaggaagccagtccactacccatgaacacatcacagtatgcacacatttaaagtgaaagaatccaagtaatattttgctttgaaaaggccatccaaaatacatccaatttcatgaagaatcttttaaactccatattttatctatggattacctgtataccttaaattaggagtgttaattatctctgaattttgaaagttgattttagatatatgccagaaacactgccgtggtaacaaaataagtacaaggaattagactattctgccagagctggttctttttgttcatttcatgtgtactcctgtgtaccttgcttcaaagaccactgggctctttgaagaccccgtttcctgtgttgagcaaagtttaagttcttttgcaaaatgaaatttacacccgttttaaattgctgcatatagtaattaaactagtcaacaaattcttctgttcccagattcttgaagaaggggactctattttaatttttatatggtcccttgttgtgaagactcactctttttcatgatcttcaaagaaactcagatgcgatgtattgcacacaatttaatgaataattatggagggaagcaggttttctttctactgttataaatgctaaatgatgcacacttgaaagatactcattaaaagcttttttgcagttttgatgcattatcattcaatacgttttgaaaagratgatactttgctacttctacttctcattatagtgatcttaattttaaaatactttcaaggtccattttttttctctaaagttatttttttgtctttaatttgacctgaatccaatttaagatgaacaagtatgaatccaacaaagcggctttgaggtctgagaatgaaacttgtttactactgtaggactgctttcctctctgagaaagtggtttttactatttggggcttcagaacagataaacctgatttttaaaaaggaattaaattcagtctgcttattcgttttgttttcccagagcttttttgaaggacagtcagcatcttgggatgtagctaaaaaagatcaaaatagagcaaaaaaccgatatggaaacattatagcatgtaagttcccattcaattcttggtgaatgtaaatattatatgcttatatggttttaaactttaagaaaaatcccagagagtggtgtgtctgtttatgaagtaatctatttaatattaaaacagcatttacaatcaggcttgagggctcatgcctgtaatcccagcactttgggaggccaaggcaggtggatcacctgaggtcaggaggttgagaccagcctggccaacatggcaaaactctatttctactaaaaatacaaaaatcagctggcttggtggcacgcacctgtaatcctggytaatcaggatgctaaggaaagagaattgcttgaacccaggaggttgaggttgcagtgagcagagactgcattactgcactccagcctgggcgacaaagcgagactctgtctcaaaaaacaacaacaacaaacaaaaacaacattggctattagcagtgattctgaaattgtcatcatcctcattaattaaattgactcagccacttcaccctgtggagataacttgctgtttgatttcatgtttgtacataaatgcatggggtattactgaacagctgagactatcaggataatgaaaaagtaagatcttttcagttataaattgttttaacacttccatcaaacatattcaagattggggtgttattctttccacgtgcctttaattcttacttggagccactgtctaaactccagttgttcgatattatttatcgttagggacttcctcctgagtaagtcctcaagatatacacgggataataaagtcattatcagacaaaaccacaggatcagtaaagaaagtagcagatagtttaacttgtaactagctgctgatttacctagaccactctgctctgaatttaaattattttaaagtatcttatgaatagctcaaaatctaaccttgattctcagggagtaagaaactgagagcgggaattcaaaattcactttttaattctgtggctcatttgctgtaaagtgcagaagaaaaggatccaacccgtttaaagtcatgactaaaaagcaaaattagaagttaagtctagttcagttatgtagacaattctatgactcaaatgattacttaccagacaatttcatgtctcctaaacactaactatgaaggttcaagtcagtgaagcttaagtcacacaatattataagtgtaatagcaaggttcactaacattcttatatttcttcaaaggactgatttggtagtagtatactatggatagactatgggcaaccactgaattctttagtctctaccaatgacattgtctcagaacagggggaaaatttaacagcttatatttattattttaaaattttagatgatcactccagagtgattttgcaacccgtagaggatgatccttcctcagattatattaatgccaactatattgatgtaagtatttttatagttaagtatgtctactttattggcttatatatatgaacctttttgcttattacmtataaagtgattgctagctttttaaaatataaaagtacaaactgtacacttttccttgttctgcgtcctagtacttactgacattgttgtgctttctttcacacctgactttggtttgggctgtagatttggctgtacagggatgtaagtaccactatatgtaaataacagcaccctattataaatacaaacattcttaattacagttattactaacgctctgttactactagttatttctgcatgcttcacctaattagcttcatacaatatatctctgttcgtttttttgtaattctttcacatgcrtaaagatctattttaccaccttcccttttcttgtgtagaaaaacaggaccatttttagctttgacagtttattatgtactcgagttttatttgttgatgatttctgtttctggcttttattcttacccttccctaaacatatgtgagaagctggatagtatgatgtgtattagtgttactgaaattttactttttacatttgacttctgacgttaaaatgagtagggagactattttgtgatgtgttgtattggcttttaaagtaataaaattactcaggcaaaataattactaaatttcaattgtaaaatacacatatcacacatatatatcgaatcacagaaatgaaaaaggttgctttgatcatatatttcactgttaaattttgattacatacatatctacatggaaattctttatttaaaggaagtaattatcaaacaaaatatagaatattcttaaagggcaatatattacattacctataaggaagacctggttcataatcaccctggagatcttgggaatgttacttctctctctgtacctcagtttccttatctttgcagtggggataataataacagtactaacctcatcactttgttgtgagaattcaatgaagtaatgcatgttgagcattttgcccaatgcctagcatatatttagcactctttaaacttcaactattttttttacaattaaaatctaggtgtgctataattaaattgattcacaatatgtataattataagacaaaaggtggaggtattaagaatggtagcatatgtatacttctatagacctaaaaggtatgaaacctaggacccaacattttataatttccataaataggaaataattttcattacatttattaggttcacattttagagttatgaattgtcattatgtatttagttgaactaatatattttataaagcatagtatatgagtatatgagttcaatttctgatcataatcttactcttattcattatataaatttatcaaacatcattatgtaaaactaagctaatggtctaatttttagaataaaaaaatcaacagttctatgacaaatttgtaattgttcttacctatttagtttaacctgggttttctgccaggacttgtacactggagccttgttataaaattatttcatggttcatatggtaggactgtattttaaataagacttgttatctagtctttctgttaagaccccagtgtattttggtctatttctatacaatttcataattttccctctcccattagttcattatatgtaaacgatatgagtatatacttctgcaattggtattttttttaagaagtggaaatgaaatacttayaaagcttggaaaaatttttccataaaacattgtgctattttccataaaacattgtggtatattaaaaatttgaaatcttccaaatttgcaataacgtaatactcatgctattaaattttaggttggagatctcagttcacatgtatttatatgtgtattgagttgcccacaccagtatgtggacaaattgtaccacagacttttactaaggctcattggtaaatatgcaacaaattcagaacttaggatcatatcatcaacakttttacaacttatgctttgttgttattcaaaccaattgaaagcaactaaaaatctattcctcctcaacagaacttttagcacactgaaaaaaaaaatactaaatttttgctcaagataagatgcatttttaaaaattcttctttccctatatatatgtgtgtatctataattatgtgtgtgtaaattaacattgtgagcacgcacaaaatagtttttgcatatccctgaatgtgttgtagaacaggaatattctctaaaaatctcagcaggactttgattggatgcacacatgcattgtccagctctaacattggaatgttctgttatttttttatggttctaatatgtcctcgtccatttgtaatgcagtgtgttgtacttttggatgataaaatgagaattaatatttttaaacactattttaccaggaatgaatgactaaacatttacatgaaggcataaacattttagtgaaaccaaacaaaatctatgaggttattccatggcaaacaaaaatcaattatacaatatatattctaatcagagcctttaaaatatttaatttttgttttatgtttacctttcagataacataggtttgagaagtgaactatgtgttcactactcatttctggactttttattataacttaatcttaacaggtggttgtcttcatctttttatgccttcattcatttatttctgatattgatgtaaaatgataactaatttgttctcttattttagggctaccagagaccaagtcattacattgcaacccaaggtaaaactttgccttgttaaatgttatagaaaaaacaaacttgcttattcatctatgtggtggtttttattattttttaaattttatcttagtaacaaaaaaatcagcccttctgattaacactgctccttactcatttgtatagtacaaatttattgtgtgtgtaaagcttatataaatttaagcttgatttacttttaattaaaagtgaaagaaaagctggtagtggttattatgatttgatccttgttacacagataggtcagagcactagtcaatagtgccagtcagaggaattactcatttttgaggaaaggaaaaagaagtctcatataagaggcctgtcttcttgcagcaagtttgttagtagtacccaagaccaatattgttataatgagctgttatactgagcaattttttgacgagtcaagactgagacaaaacaaagagatggaatttagtcaagttaattcttcatggaatataataagacagtagagagatcttgttatagtggtacactggggagtaaaagtatccaaataacaacaacaaaaaaarcatctgtagttatctctctaaattgactactggccctcagaagagaaacctgtacatcttttttatataaaaggaaagtaaaacaaaagctaggtttactcttttaacaggggtcatttttctgtgttttcacatatctttggagtaattgagttcagttgtgtactcyttaaagttagaaagatcgaccatagtggtgaacaatattcagttttatggtattcggtagagaacagcccagcacatgcttttgcagtttggagatattatgataagattaggatatgtccttacgtgtaaggatatgtttttattgatccctaaacatgcactatttataaatagtgggcacttatttaattggtaatatatgctgtctggttgatggtggtataagagttctattttttacayatatttgaagatgcattaaagtgacttagtgacaaatataaatacccaagaaactagtgatagtttcttctaaattgggaagtgtagagggcaaattgaaaaaaaaaaaaaaaaaacttgtatatgcctgtgtttttgcctattgtgggaatttagatatgaactgaatttaagtattttcagtgacattttgtgttagaccttttttggaattacttagtttactctgcttcttatcttagctaaacttcttactaactacaaaattcctttgataacataatattcaaattaatttctttgtaggtcccgttcatgaaacagtgtatgatttctggaggatgatttggcaagaacaatctgcttgcattgtgatggttacaaatttagttgaggttggccgggtaagaggaagaaaaagaatttttttgtcataaaaatgaacatagttgagaagcaacatgtaagacactcaaaatagaatatcatccaattgtttaaaaaaaattataggcacarcattttagttgagtacttctaagtagaccttgactggctgaaaaattatttgatttctcattgagtaataaaataagctttaattttgtactrgaatctaactgcattatcaggcttgtatattttttgtgagactatataaactctgtttattgtataatagatttttttctcatttatagatttttaaactgagttttaattgtgacctaaggagttattgctggaattaaatcaccttggctaattagtattatatattcaggtctgtctatatattctttttgtcacttaggttaaatgctataaatattggcctgatgatactgaagtttatggtgacttcaaagtaacgtgtgtagaaatggaaccacttgctgaatatgtagttaggacattcaccctggaaagggtaagtactctaaaattctattttaaaaagtgatatcaaaactgctttttctcttaaaatctttgccaagttctgttttgatgatgctataaaatccattcattcatgtattcattccacaaatgtttatttgagagtttactatgtgccagacatgtttctaaaccttgggacacatgttaaaatcgcctcgtgtggatcttagagccgattgaattaagacagcaataaaaataaataaatcaactaatatatcatacatcatgacaagtgmtatagagaaaaataatgttggggaaggaagtagggaatattattkaggcagggtaagaaatggtttacaattctgaaaggatgatcaaagaaaaactcattgttgagaaagtaatatgagtagagacctgaaataagtgagggagtgacgggttatgtccagggcaataatgtttctgacagaggggagagtcatttcagaagcctagaggcatgtgtaaagctgttagaatgccagacagtcaccaggccaagatgtgcagatatccataagtgaaggggaaagaaatacaaaatgaaggcagagaaatcacaaaattggataagtggtgccttgtaggccatgatgattttagttcatactaaaattgagttaggctgccattgtagggtttgtgagctcagggataacatggtctgaattttatttctaaaaggatcactccaagtgttacattgcaaagaataacgtaaggtggctggtgtagtagactaaagtgraatatagtaacagtgaaatacattttgtggtaaagcttggtagatttgaccacacaaaattgtgaaattacctgtggcacaaaaaaatatcaaaggtacatacagacagaagaaccttgcgattgtttattaatgtccttaatttataatgttaataccagtagaagaaaaaaaaaaaaactagaatctctgaagaaacacaattgttaacaagcctattaaaaatgtttaacctagtgtacttatataccattttgtccttccaaatcagcaagaactttaaaaaagaataatcctcattgattgttagagtatgttgaaacatatttttatacattactgatcatagttaaatcgctacaaaccttctttaaatcaataaaacagtatatctccagagctttaaaatgtttatgtcctttgagaagttaactttcatgaatctctcctaaggaatttatttaaaatacaatgacttcatttatagtattaaaaacttatagataaccataaatgcccaacaatagagaaataattgcatagtattttataaaaatacttgtgagttatcctaccaacatgaaaaaattaggcaaaatattaagttgaaatagcattatacagaacaacataatcatgattattgtaactgtaaaatatgtatgaaaatttcttagacaaatcaagtagaataaaataagcaattgatatgggagatttcagaaagaaccattaagcttgatttaatgaataactagctcatattattaaaaaagaaatgtggaatatgcagtctcttaagttcatacaagtcttgtaaaaatcaatgatgaacttagtaataaggaaaacctgaatacataacaaaaagttgagatattgccaaaatccaatagaaagcaatgatgacaaactgctgaccagtgaccccagaaattagcctattagaagtcaccaaatcctcttctgaataatccttgaatgatttcctcaaaactaaaattatattatatagatcaatagttttacatcaaaatttacctcattattctgtaagaaaaatttatactcataagtgatttctgttttgaaatgtgctctgaaatcatgtgaaaaattataacattggaaaatcagaaaaagtagaatagaacaaaggaaaaattaaatataaaaaagaaacaaatgagaaaaaagaaaaagcttgtttattgaaaagatcaataaagtaattaaaccactattaattctaaatgaggtacaatgaaaatatacaatattagaaaacacagagggacatagccattatacttgctattagaaaagctatggaaaatattatgtataaacttaaaaatataacttttagtcyaggacacggattttctgacaaatgctgattctcaaaaattaggtcacaaagatttagaagcatgaatagatggtagaagaaaataggatgattgttattatcattaaaattgcactatggttttaaagttaaagttcctttatactttaaggaatagctaatatctatgttttaaaagttagcataatgtacttggaaggctgaggcaagagaatcatccgagttgggaaagcagaggttgcagtgagccaagatggcgccactgcactccagcctgggcgacagagggagacactgtctcaaaaaaaaaaaaaaaaaaaaaggttagcataatgatgataacagaatcagataaagatagcattctctggagctctcattccctctttcattatgtctttcttctctctcttcctctcttccccctcttcctctcttccccctcttcctctcttccccatgcacacacatattgcagaccaatttcattcaagaacatgaaaaaattcaaaataagatattgaaaatttggatctagtagtgaattaagaaaatatcactacatgacctattattttttccctaagaatgcaagaatatttcaactgtagtgggaaatcttaacaggatatttcattatgtcagtacattaaagtaccaaaactgtatgactttaatagattaatgcatttaattttattttcaaaatatttatagtaatactctaattagggaaattaagaggcatcctaaacatgataaaggtgattcaacaatacctagtagcagccatgttaaggaatgaagaactaacgactattcatttatcataaaaaactagtataaagattatattactgcttctacaatcatgaatgttaygtggataatcagtgtcactaatattaaacatttttggaagttttagcaaatgaaataaggcagcaagaggaataaactgtgtaactactagaaaagacaaattattttaagatgaaaggatttataccaagaaaagtatggataatatttttaaatgggatgtataaacatttatttaaatgaccaaatctgcataaatattcatgagttatagcttgtctttatattagtgataaacagaagtaagaaaatattactaaataatctttaaaaatacaaagtgccaaaatatctcagaatatatttaataagaacgatatagttcctgatttaataaaaacacaaaagtgtacttacggatacgcataatatgtgaatgagtggagacatgcaccatgttccagaatatgggagtacttgatattaatatcactgtatggatttaatacaatcctatttggaaaatcattggattttttttttcttgttatttagaacaagaaaatggggggggttgtttttttaaccacatatttgaaaatcattcagaaaaattaaaaaaaaaatcagggaataggtgctgacatatgaaaatgtactaaaaagagcaaaccctatacatgtaatagaaagataaagggagcaaggcctattaagcaactccaataaaagaattaatatagaaggagtaaagtattacctaaaatcaggccatgaaacaatttttgaccttcctcactagagttgaaaagtagcaaaaggtgattttccattggggtgattccatggtgatgcttatcattgtgattgttacagttatttattgatgatccctgctttgtgtagggtattgtgctaggaattggaattaagaaaacctttaagaaatgatcactaacttccaaggttttggtggtattggtttgtataagattgaatctaaagataaactgtttttctcagttttgtttatttcatgtaatgtgtctaccttttctgattgaacaagtgagattgatagttcacagatagttcacagtagaatttgaattatatagattatagtgggattttttttccttttgctacaaatgtgagttcttaaaaataaattcggcaatatttcatctataccttccaagctgtgctacctcagtctacagacttcttctaaaaaarggaaggaaaaagctttgaaatgtgcatttacagggttctcttaaattaacccaataggagagcagcacaacagcagatgcttcacttctttcattttgtatttttgttactataaataatactgcgctgaattatttcacagagctaagaaaaatagtttgcccaaagaacagtttagctgcctgtatattttcacaagccaatctagagcagcactgtcctggaaaatccctacatgctatgcttcaaaaccattttcaacatggataagcaaggcattaaaatctctttgtgaggtgagaagctggaaagttgcttttatacaccacttgagaactcaatgcattgggtcaatggggcagcattttagctttcccatttccttcttttcccctaataatttaatgtgttgtcactcccagcaagaaacaagctgtcaaagtaaataaaatttacccagacttttagaactgagcaagacttataattttctttctttggcagttgtctgacaataaaggtaagctcctagtccatgttaggccttcattttattatatttttttttttaagaaaaggcatagtctttcgtaaaggttttattgttmtcattgtcagttgggtctgtacccataattgtgtttaatggctttattttggccattaaaatggcttttgaaaacatttctttccatctttgcacagagggggtacaatgaaatccgtgaagttaaacagttccatttcacgggctggcctgaccatggagtgccctaccatgctacagggctgctttcctttatccggcgagtcaagttatcaaaccctcccagtgctggccccatcgttgtacattgcaggtaagtggtggtccaaatggtattgaytgtatgcaatcagctttttttagagtatcaagacaaggcttttgagcacaaaaactaatgtgtgcttacraagttccagcttgcttgtattatagataaagtaaaacagcaataaaataaaagttggctgtaagtagtctataaaacaggaacttaagaaatacatacattcatcctaatgcgtgtagtgttatccacaatttaaagtatagaaactctgccttttartggcaacatctgtgttttttgtttttatcacttttgcaaatcccatattgtatagaatgctaggttgaaatagacatttcttgccaatctagaaaattcccaatagaattccagctttaaaactaaatttcagacatacagagttactaaatggcctaaattgcaaggatttgtgctgcaaaacagctatttaaaaattttttttaaagaattcacattagaggaccttgaaaactgcatcagtgagattcagcaaatatatgccaaaaaacacgagcattatatccagactttcttctgattagaaacttctcttaaaacaagcatttagagatactaaaagcaaattacatggcctcattttgaggtgtgaccagaaaaataagtactgaatctgaaaagcgtttcctaaatgatgctgcacaccattctcatacgctcttccctccaagctacataataggttgtacctaagcattttttgctttctgaaaatccaacctattcaggatttaaataaccatgtataaaagaggggaaaaaaagcagagaatgaagtaaaggtaaaacgtcccataggatcagatactatgtaccctgaaaacaaaaaaaacttcctttcaatcctcctcatgaaatctgatgtactcttaaattacattcctgtctccaactctgggaacagtgattgagaagatggtaggggacaaagataaatagagrtagccacaatatcttttgcttaaatttctaaaagaacagtgagtttaagagaagtgaccaaatctgaataacaaggaaataatgttactagcctatctaagcacttrgaaaatgagataaataggttttcaacttaagaatttcttgatttatcagagaggtttactttcttatgaattgcttgcttcagaaatgctccaagattctcagatactctcttgaaacagaagtgtcattttccacctacactgaagcatctctggactacaaagtgaattccccactccccgcaaaaaatccttattttgttttccccattgacttctatatataaaattggagaaacattccccagctgcaaaataatcacagtatattacaattaaaggacacaaaatatggtgagatagaggaatacattttagtgttctgtaccactgtaggatgagtctggtaaatgataatgtttagtttgagagagctagaaggaagatactgaatgttcacaacataaatgatacatgtttgagaggacgcatatgccaatcacccttttctgatcactctacattatgtgtattaaaatatcactatgtacccaagaatatatacattattatttgccaattaaagactaaaatataattttttaaaagtatttttaaaaattaactttagaattaaatacagtaagatagcggctagccttttgatttgctgggaatcatattctacacctaataattcattttcatttctcttcagatcatgattcaaatagtctttacactgttactctcctcccctttgataaccgtcattctcttgcccacccccaccatttgcatttcctgtgaagcgtggctcctcagatttcccgtttaaagttttgggaattaattttcttttgccttggtatttacaagaggtgaagacagtgagtgagccaacattctcacattgttgccagaggacacacaactagatgaatctaaaaatattcaatcttgagttaaattttgaagcgtgaatctgccacttgatcaattctatgaacttgaaattatgtgtattaaatttacataaaatgaaaattgtgagagaggtgtggaacttaaacagtgttattttcaatttgaaaataatttagaactcttgttccaatctttagtttataccaaagcagatactctgcatgaagctatttgtacattaataagcttttacacagcagggacaagtgctgtgccttgcagtttgttaaatcaatttgattctacctatctgacagtggaaaaagtccttatttaaggttatgaagactaacatscttcttacaattcattaaatttaattgtttttcagtgctggtgctggacgaactggctgctacattgtgattgacatcatgctagacatggctgaaagagagggtgttgttgatatttacaattgtgtcaaagccttaagatctcggcgtattaatatggtccagacagaggtatgtagatttacctgtagtggactttgtttttattttttattttttttgcaaacaaagagtagatgtctctcatatatactctactcaaccgaaagagatgtttttcatgtgtaatcaatattagctgagtcatatagaaaaatattggtgttttaattcatatttccatatagagaaaattttctgtatttcctaactttgatgacagaaaagtgatactaaaactagtacaaaattttctttttcattcttttggtaggaacagtacatttttattcatgatgccattttagaagcctgcttatgtggagaaactgccatacctgtctgtgaatttaaagctgcatattttgatatgattagaatagactcccagactaactcttcacatctcaaggatgaatttcaggtattaactatttctaaaacctcttttgtgacttactacaatttgttctgggcgctaggaatcctttcaaggaaggtctttcaagtcaaatttataacctttgatcctgttttaaatacaatacgtatctctttcattatacatattatatagtcacttttctattgatgaatttatatctactatatccaaaatgacaaataagttcagacttagggaagagcaaaggggaaaggtatcataaaagtcaaaaattaggccaggcgcagtggctcatgcctgcaatcccagcactttgggaggccgaggcgggtggatcacgaggtcaggagatcgagaccatcctggctaacacrgtgaaaccccgtctctactaaaaagacaaaaaaaattagccaggcatggtggcgggtgcctgtagtcccagctactcgggaggctgaggcaggagaatggcgtgaacctggcaggcggagcttgcagtgagccgagattgcaccactgcactccagcatgggcaacagagcgagactccgtctcagaaaaaaaaaagaaataataacaagtcaaaatgagtggtgatttgtgtgtatttagtgtgtatttatagcctttttttcatgcagtcatacagattttgacctgggtcactcacaatgtgatgagatcaagcacattaattataactgagtctgggttcagtggcagctcacacctataatcctagcactttgggatgccaaggcaggcagatcttgaggtcagcagttcaagaccagcctggccaacatggcaaaacctcatctctacaaaaaatataaaaaatagccgggtgtggtggtgcatgcctgtastcccagctactcaggaggttgagatgggaggattgcttgaccctggaagtttgcttaaccctggaaggctgtggtgagccaagatattgccactgcactccaacctgggcaacagagtaagaccctgtctcaaaaataataatagtaataataataataaatgaagtttgtagtacatgttatttcaaaatagccctaaatgttttcactgcccttaaaacacccctgaaggtgggtgaaaataaaaycaagggcagagaccaaattctttgattgttgatccagtgctctttccaacatgccatagcttatcttcaaatatggcaagcccagatgttactacaaatgataccgtttcccagtgtgatgaagggtcattatcataatggactgcccgattgcattttctttggttaaggcaatgcattttgcaggtagcagtgttgtttagcgtaccttttccttttaagaagaggagccctgaacaatgtgtgtcttgtttctttgtcacttctcaggcttcattagctttaactacaaggtctatcagcctgtcatagtagcaaatgccattgcctcgcacaaatccttcactttctacttggccttctaaattcctgatggatctgtgttatactgttaaatgggtcacactgtcttttaacctgggttctcttttctttttagactctgaattcagtcacscctcgactacaagctgaagactgcagtatagcgtgcctgccaaggaaccatgacaagaaccgtttcatggacatgctgccacctgacagatgtctgccttttttaattacaattgatggggagagcagtaactacatcaatgctgctcttatggacgtaagagactgccctctttgttagtgtagagtgttgtggaaagctacataatgcaactgaacactggctagttttcttttcgaggaaattaaaataacctaaaaaggaaaagtggaaacttttattgaaacacatttttttggaaaatgattttaggttttccctatagagattcttaagaactgtcatttttatagctttattgtagatttggagcttgattgtcaattattatattcatgtagtaaatattgcaagttataaatttcatcttaattattttcagaaaagaaaatcatgccttatctattttgaatataattagaaatgaattttttaaatcacagawtgccaaatcctacaaaaatcatgttaatttgggaaatttttatttctgacatttaatgtttcaataatttacaattaatttgttggccattaatcaataaggactattataagtaactagagaggggatggatggtattatgttaacacatccatcataatgaaagaacaatcttgccccattctaaaatcttaaattgcagggtgttatatagcccatagacagaacaatatggaaagaaagttttctgttttagtttttggtttttttttttttagacagagtctcactctgtcgcccaggctggagtgcagtggcatgatctcagctcactgcaacctccgcctcccaggttcaagcaattctcctgcctcagactcttgagtaacttggaatacaggagcgtgctctaccacaccccgcttattttgtttgtttgttgttgtttttgtttttgagacagagtttcgctcttgttgcccaggctggagtgcaatggcacaatctcggctcactgcaacctctgcttcccaggttcaagcgattctcctgcctttgcctcccaagtagctgggactacaggcatgcaccaccatgcacggctaattttttgtatttagtagagatggggtttcaccatgttggtcagattggtattgaactcctgacctcaggtgatccacctgcctcggccccccaaagtactgggattacaggcgtaagccaccgtgccgggccttttttgtatttttagtagagatgagatttcaccacattggccaggctggtctcaaactcctgacctcatgatccgcccaccttggcctcccaaggaaagaaagttttaaattatgactttggccactttactttgattatgttggaaagaagcaagaaagctatcatggtttataatctttttaaacagtttactgccttcatttctagcttttgccctttctcctatgaaaccatatcaaggagaaattagaagccacggttcatttctttctgactataacaggctttctaagttattgttcctgttaagcccacattctgtttctacgagtagtcttcaccagttactttactctttttggtgctgcaaagcggaatagtctaaaggcaggctctcgtccttgctgtggtcactcttgcctgtgaaaagctctcatccttgctgtgatcggagtcttgcctggccattaatcacatccactgaaatcacattaaatcctaattataccttttctttttatattaggtgtctggaaaggcaaatatactaaatagagagatggcatacaatactttttcatttctgcatctaaatatggaataaaaaaaggatgtgtgaacaagaaaaggagaaaataataatatttagaaaagcattgatgcctttgaattttttgccattggcatctttgtcaaatttttctcaatgtccagattgtctccttttcttttcttttttctttttctttttgagacaagctctcactctgtagcacaggctggagtgtcgtgcatgatcacagatgactgcagcctcaatctcctgggctcaagtggtcctcccacctcagcctaccaagtagctagaactaaggtgtatgccatcatgcccagctaattttttttttattattttttgtaaagatggggtcttgctttcttgtccaagcttgtctttttttctgtatgaaagttgaagcttgtaatccacctgctcttactgtctgcttaatcccctgtgattcaaaaaaaagacatttcatagttaaagctgttctggggatttagtagtgcaaatgaaccgttggagaagtaaagctggtttgatttacaagaacagggtttattgttcacttctttctccctaccctttatccccatcattagtacccttttgccaggtctatgagggattaggagctagggccaagaattctgtaatttcaaagccttacatatgttcctgcatttagagggaaaaagaataggaagtcttcagtcttctcctctcttatcagctcctcctcatgcatatcccctcccctgtggctcaaaaaatgagtagatagccgtcagtctgctttgacttacctttgcatggagcagacatttgattggaagaagagcttcctttcttctaacttttctcattgtattagttcattctcacactgctaataaaaacatacctgagactgggtaatttataaaggaaagagttttaattgactcacagttccacagggctggggaggctcaggatccctgcaattatggccgaaggggaagcaaacccgtccttcttctcatggtggcaggaaggggaaggagtgccaagcaaagggggaagccccttataaaaccaccagatgtcatgagaactcactcactatctggagaacagcatgggggaaactgcctgcatgattcaattatctccacctggtcctgcccttgacatgtggggattattacaattctaggtgagatttgggtggggacacagagccaaacaatatkactcatgaaccttcctgcctttcttaggagacactcatcccagctgcacgtgtaacttggtaaggttttgaggtcatttagaagtagccaggtaaattattattgtcatctactcagatttatcctgcagtcttcagccaacgctgaatgccatggttggtagcatttcccaaatggtggtagcatcagtgaagtccaagaaccagttcctgtgctgatgttaagattcttgaaggacttaaatagtagtatgatacaaatgagttacaagatcattgaaaatttttgtcagcattagggaactctataatctactaattattattattattattgcaaataattagtttaaatcaaatggcaattgtccagtccagataaatattgtttttactacttctccctttggaaagagataatatattgtgttctaatcaaggaggacttggttaacaaggagctatctccccgcttatgtggggacaggaaatatattgctgttatgctttggtgcttcaggatcttaaatggttgagactgtcattatgacctttgatatatgttagaaatgcccaggaagctgtggaaggtggattgtctgcaagatgtgcagaatatcctggtagtgtccacataatgtaaaagcacaagtgtttgagctacttgtggtttttcttatttggagtggagaagagtaaaacaattttacttgcacgcacacacactatacacatacccagatgattgatagacataccaggggttttgtgcttactttgccttcagcctctcagagactgattacgtttggaaaattgaaatagcccaacaggaaccttacagaggatgttaacctcagaagctttttagtttcttcttttgtatttgtcctgtatttacgtctttcagtaaagtaaaaactcagttattgacttgaattgctttggaagcattgaagtcttccaccaaattgattcattactgtactaattcagttcattccagtggtctgaatctcctattccatggtttaatcatcactctggctccttctgcatatgaagctattgcatcttactggtcctacattgmagtgtattgtatctgtttgtacaaccgatcatacattttaagtttttatatttctccatctaccttgtttcttcacagagctacaggcaaccagctgctttcatcgtcacacaataccctctgccaaacactgtaaaagacttctggagattagtgtatgattatggctgtacctccattgtgatgttaaacgaagtcgacttgtcccaggttaatggctatggattgcttttatgtacttatatacaacttaatagagtagtaatgaattgctaaaatctgctttatactatcctaactagaaaaaataatactctttttttttttctttcaaaacgttcatcatttagggctgccctcagtactggccagaggaagggatgctacgatatggccccatccaagtggaatgtatgtcttgttcaatggactgtgatgtgatcaaccggatttttaggatatgcaatctaacaagagtaagtcactatcggatcctttgagctgatctagaataggtcagtcataaccaagatgtggtataattttattcagacaacagggagactacaattaataagcactatatcatccacctcaaagctagtaaccatcttatgccttagtactcgaataaaaatacaggaaaacagaaatgctggaagctagrtttttcsgtcagtcactagactagcatattctctcaggaaatacagatgcactggctcagtcaagttggacagcctaggcctggcctctgagtgtatgtagacttatcttaaggatgactgcatgttttattagtattgacatccagcccagaaatggcatgtgataaaaaaaataagaacattgcaataacaataatgacagagaaactgtactgcaggaggaaagagacatgttggatcaaccattatagaagggttccatgtcactgttccaagttcattattgattatcctacctgcaatttcatcttcctaaacgtctcaacctatggctctaagcagatctaaaggtagaaccagtgctgctaccaccatgccttttcccagcagcaaagtagtaactgtatcgtctttctctgactcctcatttgctttccactacatgacaaattcaatgtgggtggggaagatcttaaaaaaaaaagtgctaataaagcccgggcacagtgcctcatgcctgtaatyccagcactttgggaggccaaggcgggcagatcataaggtcaggagttcaagaccagcctggcaacgtggtgaaaccccatctctactaaaaatacaaaaattagctggacatggtggtggcatgcctgtagtcccagctagtggggaggctgaggcagcagaatcatttgaacccgggaggcagaagttgtagtgagctgagatcacgccactgcaccccaggctgtatagagcgagacttcgtcccccaaaaaaagatattaataaaaacaatttagattatgtaaccaaataacaagcagaattggaaaagaaaacattagtaactttcatgaaattaagctctttttagagagaaacattactctgttttttaaagcaccagctctgtgggtatgtattttaagtgtgtgattaggattatcatgtttcagtgtctctcatatcaaaatgactacgtgtgtgtctggttaataagtctatatgtatataactatgagcagggaatggaatcatatcgactcctattgctcatttcagtggagaaaaaaaggataacttcaatcatctcataatattcatgcatatcttagatgttaatttaaatggaatctcattatgtctgcacatctgttacattatggttctagtaatnnnnnnnnnnnnnnnnnnnnnnnnnnnnnnnnnnnnnnnnnnnnttctggtccttattagtacatgattttttttctgttctcactctcatcatttaatatatttaatatatttaactgcatcaaacatttaacatgtaccaacaagtttgtagagtactaagtagggcttgtaatctaccaaaagatgcatgggctcttgccaatctgatatgatttactcatatattacatattcttcctgatatttttatttcaaggtttaaggttttgattcattctttcaacactactacttttggggaagtattatgcaaagttctactgatacagagtgtaggaaaaaaagatttccgtgtacttaaggaatctttatttttttcaggaagaaaagcattacatgaaaattgtataatcctttttgtataaaagtgatgcattttacagtgaaagagtaaagaatatagagtgtttaactgggtgatctgacataactgtgtgatcagagatgacctctttgcgatagtagtatttaagccaaaatttaatgaatcaatagaaattagttgggggttgatgtaacccaccatcctggtttgcccagggcaggagctttcccaagacacacagccttcagtgctaagaccagagaagtcccaggccaacctgggacaagttggtcattctatttgggattgagaagaccaagcaaggaagaagtattcaaggcaaagggtacatacagtatatgcaaagtccccaaggcaagaagagacttgatatatggattaaaagaagacaaagagaaggttgaagaagggggtggagccagatcacataagtttttttaagccatgacaacaatttggattttatgctaagatcatttgaaaatcattaaagcaggaaatgacaagattgtatctgcagttcaaaataatcatgatgcctatagtaagaatggactggaaggagatcaaagtttattcagggagatcagctaggaggtaattatcagaacctgtgactagtagtgtattgatgtcagtggtgataaagagaaggcaatgaatctgaaagttatttaggaaatgtaatcgtagtaatgaattactggatacatagtgcgagggagaaacaggtataaaggatgattgccatgtttcctgctgttgtcacttagaatgtttttttactagcatgtacatattgaggatttatatcagctagactcaatccagtgtagatgccatttgtattgtaaattatatgcaccttttactttttagtaaaaattgtagtcccagcgtatttacataaaaacacttccctctacagccacaggaaggttatctgatggtgcaacagtttcagtacctaggatgggcttctcatcgagaagtgcctggatccaaaaggtcattcttgaaactgatacttcaggtggaaaagtggcaggaggaatgcgaggaaggggaaggccggacgattatccactgcctgtgagtagggcagctcagcctgtcattcatggggccttggtgcttattttctcattttcaatgttaaagactatctggcttgcatcttatggacctcccwtagatgttatttttaaacagtcttcctgtctcatgagtctataattaactactaagtttattttgtatattttctaaatattgattattatatagctatattatttaaactctttggaacactactcrtaacaacttctgatttacacagtttacaaatatatcagaatctcaaagtctagattgcagcaatctatgcctatagcattttcctgagtataagctactgatctaatttcatcctcaagttttctcctctctgccttgtacacatataaagcaaaattaagacacaaatggaaaacaattaaaactacaatgtcttattttcccaaacatatatgatggtgtgacctgtgrtcacttggtgctgctatctaaaatgcctttgctttctttgctttcagaaatggtggcgggcgaagtggcatgttctgtgctataggcatcgttgttgaaatggtgaaacggcaaaatgttgtcgatgttttccatgcagtaaagacactgaggaacagcaagccaaacatggtggaagccccggtgagtcacagaatcttagatttggaaggcatcttagagattagttagtcatatacctacttattgatttgacttcatacacacatagggaatcagatgtgaaaatgagacrttgtggggactttcctgcctaattaatacattgctgagcatccccctctacccacagacacttaatcacgtattgcataaactgctaatcatgaaactattttcatttaatttgggaaatttgtaggattttttttctgttatagccaaaaaatatttgctgcagtaaactttggtaaatggtcctataagaagaataaatcctatatcaaggctgtatgtctaagggatataggtttcatcagtaccttagacacccagtatttttaaaaggcaatgaaatttagttttgtcattatctataattattcattcattttctgatcaaattgtaaatggttaaactatcatggttaagttttcagcttttaccaactgtagagggcagttcatatcatgctacttgagcttgtcaaggctcgtaaagtcagaacatagcttacaaaataagagctgataggtatgtgtgtgtgtgacagttcatctaggtgaagctgtatgcagagtaagaaagaaagttacacttatctaacacattttacttctaacgagagatatctgtgggttacacatatgtatgtgcatggtgggatcaggttgggagcagctgtgtagtgtatgctcacagaaaagtaaaccagaaaaaccaaggcatcattgttgcttgccctacatttatcaagatgatcagataactagaatgagcaattcaataaacctttaaagtatttcaccacttcctgctcatggattgctcgcacaagagttgcgttgcttcctgagacaaaatctgaagacttaggtttgtactgtttcacttttacaagcggtaccagacttccaccctttctacaggtgtcctcaaactccctacaccacctcatttccctgggttgttgcagctgtctacacaagattacattggttttgattggggtgctggctatggagatgagaaaggggggatgaatcggagggatttttgagggagaactctcagatcgtcttagcaactaaatgaatagtggttatgtctctaaactttgcgatttgaagatttcttgatgtaaactctgcctccatttttcaggtcaagtcttaaaatcatcagtgggatcatttctgacttcagaattcaacttttaccttcaaatttaactgatttcccaccttttttaattaaaaaaaaaatctatggttaaactgtgccattctgggaccttccaaaaagttactattttcctttacattcatgtcccgtgaatcctgaacaccccaccctctgatttgtgtttaatcagtgttgatgattagtttagtgagctgtggagttgagctgaggagtttggtgaggagatttagagtgaaggcaatattgctggagactgcttaaagagacataactatttctaggcacattttggttccttgaatgcactcgccacagtggtaggtgaatttgaatcataactacttggtgaatagtgttggaatgataaagacctcttaaggaaagttttattaccctagtttattgctggagacacctcgaacttctattccaaaataatatgcattttagactgttctccagcctgaattttacccacttgaatgaactgagttgggaatttttaaatgaattgcatattataagtaatagwttatgatatggtctctgaatttttctaaattcttattatggagcaagtccatagatgggcttagaggaaaggcagttttaactcaaaaattttattgccaatatgttgtcttaaacatataaaggcagcagaaatacattttcaggtataagtaggctcaaaatttaaggatcactaaccattcttgaaaaatttgcttaaatactctgatggacaaaaacagtgtcaaaaattaagaacttgaaattgcataaatggctgtttaaaatggctggctttttttttctcaaggaaatcatctgaaatatatggagaaaaacwtttgcagtttatcactgtagcattataaaatagagaaaaaaataaaagcaacttaatagtcaaacaatacatatatttgatttttatgtggtattaaaagatgttaaataacatggaaaaagaattgtaacaatgttaaattttaaaagttacatttaaaattatattttgaaatatacatagttatatttattctaagataattatttcaaccatgcacaaaaagaactgaggcaaactaaggtgatattttaacaatttcttctgatgatagaattatagctctttttctcattctttatrtttgttcagaatgtgtatattctttatatttgtacagaattgttctgtaatgatcaaatattactattataaacagataaaaaattmtagatatttaaaaaattgatagaaaatatgcggcaaagataaaatgtctttttaagataaatttcctttttcttaaatggatcattagactcaagtataaaatatgtatgcctagatattaatctcatatatagaaaaaataaattgtaatccttgagtaatctaaattggttgtcaagtttcatttggtaactgttattcaacattagtctctttcttaagttttctcactctttgtgttttgacatctttcaggagcaataccgtttctgctatgatgtagctttggagtacctggaatcatcttagttgggtgagactctttaaagtgcatccatgaagaaacctgtccatctrttgagccagcagctgttgtacctgttacacttgtgcagaaagattttaatgtggggggtgggagacttttacatttgagaggtaaaagtattttttttatgaagttgtgtatcttaataaaaaggactgaattagtttttattctatataaagcatcaacatttcatgccacannnnnnnnnnnnnnnnnnnnnnnnnnnnnnnnnnnnnnnnnnnnnnnnnnnnnnnnnnnnnnnnnnnnnnnaacatgccaccttttttctcatggtttcagtagagcagctaccacatgttgcatgagttcatactttctacgtggcatttttctccctttctaaaatgaaygctgatgaatcttaaaaggaagaagaaaagaaaagctgtgcaaattcatagtaaagttcgttttttatatgtttccagtgtagcagatctctatataaatatataaatatatataactggcttattttcttttaatgtgcaatgatggctggatcatttaaagttctttttagaaaataacataagccaaagactcaagtgtaaatatgtctatatggagaaagcacattatatttattggttacttacattccttttttgatggctaaaatastaccaccacacaatcatcttttttttcctgaagaaagctttttctttagctaaaatcaattgtaaacgatttttgtagattattttttgtatgttttagtgtaagtagaagataaactttttattcataaaccaggaagcaatgttctttatagtgattctcttgtgtacatgcttgtgaattaaatttgtgtaaaatcccttggcaattgggtcttttaatataggaccaaattaaaacattttgctgaatatgtatagtttttcmcaatttcattaggtaaataatggtttggtgatcatacatgagaaatgtacacattaaaaggccttgctgacaacttgcacaatgttgaacatagcctttaagcatcatttaaattttaaaggaatggagtttttcagcctgtggcccagcactggtcaagaaaacaagatggcaacatatatgctttcagggtyaaatttgagcaaactgtaaactgtcagggtgataaaatgtttctcttgatgtttacatgcacaagctttgcrttctgactataaaaagtgtgaacaaatcaatgccagattcctgttttgygcattgtcatgggattcttaagtgaacctttctaaatgtggtcttgttcacatgctccacgtagctgtaacttcacatcatcagcttgcagtttgtaattgactaaagcattccagtgtcctctttctagattgccagctcatgacatggtgcttataaagatttaattaaagtaagaatgaaataaagtttttataattataacagttattgtttgcacatcattttttcctcttaatgtttatgcattcaccactaaatgagtagcttattcctatactcgttgatacaagtaggccacaaaaactctatttaaagagtaaaactgatttccaacctctagtttcttttatttttattttcttaatttaatgccaaaatgtccagtaggtggagatggaaaaggccaggagattgacatcattttttgtttgttggtttctatatttatccatgtatgtaatacacattttccatttgtgtttgtcactatccatttatataatacacatcttacttttttcttataaccaacatgacaaatggtacttatgatccctattttacagatgatgaaatggaagctaatgagaaggtacatgatttgtcaacagattcattcttacttagcagctatgtctttaccactaaacacattgtttcccaaatgtcacaaagatagacaaaaaaatttagaatttcatttctattgttcctcattaatcaattttctcttaaagtattattatcataatggacatcttcaatctcccatttgctatgtactttattagaaaatgcgtgactttttaaaaaattcagataaagcaaacttttcttaggaaagctgattttcatttaaacatggaggcatttaacaaaaaaaaatccacaaactcgcccaagattttttttacccggtaatgtttattatgttatcctatagaagattctgtttcactgtgtgacactgacttcatttctgctcatgactgcaccacacaccagcaaagttatcatgagcacaactgtccacaaagctcagaggtctgtgcagcctctgtaattcaaagaacaagagttctctttctttgtaacaggaaattgaaatatcrtgcttgctttgtttgggcaccacagaagccacttgatcaggagacaatggaagaggggttgcctgttgctctcaaaactcatattcaaaagctcatatcttatacccttaagggctccctaagtagtcttgtgcatgactatgttctccgacacccccagccatgtccctctgggcggatgtcctggtgctggctgggggtggggtcctcttccactggcacagctctacatgcttttcatagtttagggcttcctattcctaatttagttattccttaaatggctgtcatgtcgttgaattttacagaccccctttctataactatcactaaggagatgttggaagtgtgtgggccagagacacaccagcaactgggaatttttgagttttaaaaccattcttggaaataagtgttatctctcttagagttgtctcctagccttttctaatacttaggctttggagtctgtattagtcaggattctctagagagacagaactaataggataaatatataaaggagtttattaagtgttaacttacatgatcacaaggtcccacaataggctgtctgcaagcttgaggaggaggagagccagtctgagtttcaaaatggaagaacttggagtcagatgttcaagggcaggaagcatccagcacaggcgaaagatgtaggcagggagattaggccagtcttgccttttcacgtttttctgcctgctttatatttgctggcagctgattagattgtccccaccagattaagggtggatctgccttccccagcccactgactcaaatgttaacctcttttggcaacacatagacacacccaggattaatactttgtatccttcaatccaatcaagttgacactcagtattaaccatcagtctttagataaaggtgttgctgtgttgcagccaaatgatctctgacattgaaagataaacaaaaggggagatattttttgcctggacatggagaggctgcatgtttatctccacactgatgtgctgatgtgctcattcagtattcatattaccacaagaatctcttgagttccaggcattcatgtcgtaaacttggaagtcagacaccaaaggctgctccttctcatatctactctccttccagaaaatggtgtaaggcaagaggttcttagcacctgaacttaatagataccagtaaatactaaaatgcagaagagcaggggctgattgtagctcaactgaaaatatgaggtgggcagtctactagctttggaagaccacctttgagatttgcctttttttttttttttgagatggagtttcgcttttgtcgcccaggctggagtgcaatggtgcgatcttggctcactgcaacctccacctcccaggttcaggcgattctcctgccccagcctcccaagtagctgggattacaggcacctgccaccgcgtcccactaatttttgtatttttagcagagacgggggtttgccatgttggccaggctggtcttgaactcctgacatcaggggatccacccgtcttggcctcccaaagtgctgggattacaggtgtgagccaccatgcccagagatttgcctaactttcataggggagtgacaattcagcatttatatttaatttctgtgcactttggcaagcattctttttaataacaaaatagccagaaatcaataatccatcacataccctgggtataatatgtaatatttaccttataaaatgtttccataggcagagactccacatccttcctagacttatttcagtgttttagtaaacacccctacttagtgtagagtctatgtgccatttcattcaacactgagtgaagctagaaggcggctggctgtgcctcccttaatcatttctacttacatattatttcatagcctcacagcttagggaggtttggagtagaagagatacctgaatttgttcacaactccagtctgttcaagcagtctgcagagtattcgagtattattatatctctctgaaactaaaaggaaaggctactttaagtagctataagtggctttttggaatataaattggccaaaaatcaatggaaatgtggtagatatatatgacacttctgaacttccagcttcctccaaagtgaattgaaatgctagctaacctggaagataacgaacaacacagagaccctgttgttatcaaatccggaaagacaccaatggagagtttctaaatcattgaagcaaacgtaggtcactatggaatatctgaaagctccttctttaatgttaagactgttgaaactaatcaactacatcggaataaatcagcactcaattttctgtgttagatgttaagtattgtcgatcatttaatacaattggcaagtccatcatcatgagatgttatctgtcataaaatgccttccttctcatgttctctgggcagatttgattagtcttttaggatatattagtcttgattccgtcaggaatatgtagcacttaggccataagaatccaaccctcagtacttagatataatctatgcagtctattcagatatagaatatgaagaacaggaatgtctaaattgagtcaccaatgacttcttttcttgtttttatatttactttattttattttatttcttgagacaaagtctcactccatctcccaggctggagtgcagtggcgtgatctcagctcactgcaacctctgcctcctgagttcaagtgattctcctgcctcagcctcccgagtagctgggattacaggtgtgcgccaccacacctggctaatttttgtatttttagtagagacggggtttcaccttgttggccaggctggtctcaaactcctgacctcgtgatccacccacctcggcctcccaaagtgctaggattataggcatgagccaccatgcctggcctcttttcttaaatagaaattagaacgtacagataggcaaagtccatgcatttagacaatgctgcatggttggggagacaaaatctaactgagaaagtagagaaaaatatgaatgtcatggcatccacctactatttgttgagaaaagagttggaaattcatgcctgcaaggccagcagggaccatgagtgtgggaagtgagccatgtatatttaagaatggtcactcaggtcatattattacaatgaacgtccttagcttgtgtgtttcctaataggaatatttttcatctctacaagaaaattctgcctcctagttttattaaaacacatgttcctattgattaatcttgcattttcccactgttgattcaaaaatggatactagatattctgccatattcagctgtactgtaagaaacacaaaaaaatgtgagtgataataaatggtacctgctgtttgacatggggacaaaagggagcaatgtggggagggctgcccccactgggactcgaaagcacatgcaacacctgcagcagcactaccttcctgcagcctttgctgcacaggaatatggacccaagcatggcccatttcccaagagaatgtagaaatcaaaatgtttagattaatttagaaacttttccgaatgttggtaaccaattaagtttagaaatacagatgaaaacaaacctctggcccaattctgtgcagaacaaaccaaccctgtctgaaggctacacttgctgtggttgtgtaagagcttcaggctcccagtctgtgacctccattatggaataactggttttactgttttaacttttttaaatcatttaaaagaaatatgagttttagctgtcttaaaatagccatcataactgttttccatacatgttcttttttcctatttgccttgtttcctcacatatttttctgttttaaaaatacatgtagatgaatcttgactcctaagataaaaacaaaacaacaacaaaaacaagatcagcttctctttctgctcctttgtacctggactaaattcagaagagcatgtttcagaaaataattcacacattttacctagtaagcactccccaaaatgatgagtaggagataattcttctggaaataataatactgagaactcaaaaggggagcagttgttctgtgagccgtgggacagccagaacgattttagtcacaagtgcagaatagcatctgtggaagcatcgcatttccagattgtgatgatgcctgctgacttccatggcaggtgtaaagcagtgtgggctgttgccagctcacaatgggaacctgaactctagttctayaaatctaattacctgaagcacagtcagcagaccaaaattgatttcaccttcatgttatattcttggaatgataaagtatgtattcattaatttgacttatttttcaacgtcaagttttttattgcctgtgatcaaatgtgatcattgaggaaaaagaatctcattttctcgtaagaaattagaggattgatatttttctcatgaaattatagaatattagagggacattagaaattatctaatcctatgcccttgttgttaaggttaagaaattaaaacctagtgaagtcatatgtctatctgaagagggccatcccgtaaatagtttaagctttgcaggctattggcttatgttaccttgttgccaggagaccttcccttgaagatttgctgaagaaggtcttcaaacaggaagtaaatgatagaagaaggaattttcaagtatcaggaaaggagaaagaacaatggatagtagaattatgggtacctacaaaaacattatttacatgtatttgtctcataggtcgtttttgatgattgaaacaaaaaaattccaacaccatctgaaactcaataaaatgatagttaaaagtgggaaaggaaagacatctaagtagaagtaagatttttatacttcacttgacatggtaaaatattgataccactagattgtaacacatcacatgttacaggataatcatcaaagaaaccactgagaaaagtatatgaaaaaatatgctcaaatgcactataagtgaatcaggatggaatcctaaaacatgttcacataacccaaaggaaggtaaggaaagagaaacagatgaataagam

SEQ ID NO: 94758 - DNA, 122644 bp, Homo sapiens
  misc_feature (1)...(122644): n = A,T,C or G
attgtttggaggactagagctgggctctctattccatgctgggtgtctgctttgtctcctggtgtgtaccattgcctctcagacctggtttggcactgctgacatcagtctcaccaagacagccagttctcaattcagcttcagtgttggatctccacttgctgaggattagcttctgtccttcctataccaactgcctacctggttagctttctgattgctttgtgtgcttgtcaatctccttgtaggtttttctgctttttcctcatgactggccctccctgaagttagtcacctgcccatctatctctggcattatgttattatgtgaggtctcccttcctttgtggactccttcttccttttgctgttggacctgagcctagcatccgcctcacctctaccaccctcctcagtgcgattagtttctctgggctctcccagtctagcttgtccacctatcacccaagatctagcactggaaccaggaagggcaggttcctgagacaaagaagttgatgttggcaggcccctagggcttttctgagacaacaacaacccatttgttgccagaattctgtggacactgagaccttctgtaacatgaggaatgtttacggtttacattgatgggtgatgtaatggtagctgcctctcagaatgcaagcgttctaagccattaacttacttacaaattactctgaacattttaatgttcagagtaaagtttcagaaccaagaaggtacaggttgttctgaagttgaagaagaaaagaagagaaggtacagattgttctaaagttaaagaagaaaagaataggcaaactttcaaggtccagttaacttagaaagtgtaggttcagatttaagtgacacaggcagtctattccaaagtctaacttgcatggaaggtgtggttttggcttgtgtctattgatcaggtgaactgttaagtttctttctttctttttttctttcttttttgagatgatggtcttactctgctgctcatgctggaatgcagtggtgccatcatagctcactacagccccaaactcctgggctcaagcaatcctccccatattctcccacctcagcctcccgagtagctaggactacaggcatgcaccataactcctggataattttttatttttcattttttgtagagacagggtctcactatgttgccctggtgggtcttaaactgacataagtgatcctcctgcctcagcctcccaaagtgctgggattacaggtgtgagccactgcatccagccaggaataagtttctagaacttgaaagactcaaaagaggttggggtttagagttcagttagagaaattgttatagccaaaaatatggctagcaacttggcaatgccaaccatcttcactatacctacttgtattatacataggtagattccttgaggtttattcatcttaggacctgaaggactaggatgtgtccctattatcatatccaaaatttagtgacttagagataatctaataatctctgataattcttaaaaatgaagaattcaatgtccagaatcacttaatttgtaacacagacagtcacttacaagctaagcctttatcagaggccccctgacttccccacctaggatttttttgtgtgtttttcagggttgaaaggggatagggatatactcactatgtacccacaatttttttaattaaaaaaagagaaaagggatgagggatgaggatgaaggaagagagaagtgaaattctggcagtgtagaacataaggaatcacttagtaaagatacagagtaagagtcagtagtatgttggtgatatggttaggctttgtgtccccacccaaatctcatcttgaattgtagtctccacatgttgagggagggaagtgattggattctgggggtggtatcccccatactgttctcataatagtgaattttcacgagatctgatggttttataagtgtttgacggtacctcctatgcacacattctcttctttctcccgccaccacgtgaagaaggttcttacttctcctttgctttccaccatgattgtaagtttcctgaggcctccccagccatgtggaactgtgagtcaattgaagctcttttctttataaatcacccagtctcaggtagttctttatagcactgcggaaacggactaatatacttggtatacaaaactggtatagaatcaagttacattttggagaataccaggaagaagcatctgaaagggcaattggagtgtcagaaccaggttaagagcaggctctgtggcacaatggatagttcattggacttttgcctacattgaaagaatgaggttaagctcaacaactaatgctgatgctttcgctggttaggcctataggtggaattcatgaagttgggggaatacctcactaatttttaatttttctaattctgaagcccaggctcacctgattgtggcagtggggaatgtccaaaatatgtaggaccaggcaggccggcaactcaggctaatgctgctgttttaggagtgaattttttctctggtaagcctgtttttgctcgtaaggacttcaactgattggatgaggcgcgctctcacattattgaagacaatttccttttttaaagtcaattaattatagttgttaccatatctacaaaatatcacaacatcaccctagattagcgtctgattaaataacaggataatatggcctagccaaattgacacacacagccaatcatcacagcaggaaggaaaagtaggatccccagcaactagaggtaaggcagagtcagtgcactgctatgagtgcaagtaggcaatcagaacccagaaacccataaaaatggaaggcacataacaaatgattagataaaagccatagatcctaggaatcccctaaatttgagacaaattatgacataggtttggtctttgtttttaaaaaatcataatgattcaacagcaaaatactttgaagaaggaacctggtggtatttcacttctgagatatcactaaaagaattgtgcgtaagtgaccaagtccctttggtggtcctccgaccttatctgtaaaatccaaaagtctgattagaataatgacaggatgtttgcagaaaagaatttgaatgtaaagtgtttagactgctctgggctgcatatcaaatcactaagagggatatttatttatttatttgtttgtttgtttgtttgtttattttgagacagtctcactttgttgcccaggctggaatgcagtggcatgatcttggatcaccacaacctctgcctcccaggcgcaagcgattctcaagcttcggcctcccaagtacctgagattagaggcacctgccaccatggccagctaatttttgtatttttagtagagatggggattcaccatgttggccaggctggtctcaaactcctgaccccaggtgatccacctgtctcagccttctaaattctggggttataggtgtgagccaccatgcctggctaatttttgtatttttagtagacatggagtttcaccatgttgactaggctggtctggaactcctgactcaggtaatccgcccgtctcagccttccaagcctttcaaagtgctgggattacaggtgtgagccaccactcccggccgggatattttaaaaatactgctgccttagccaaaactacagaagatcattaaactgaagtggagcctgggcttcagaattagaaaaataaaaacttaaaaaaaaatacttctctgagtacttctaagttcatccagtgtggagagtcaggtgcccaaattattcaaatttttttttattctggtttttaagcacataatactccatgtgattcctggaaagaaatctgcaagaacctggatttggttgtctttatggcatcttctagttctaaaatgaattccttctgtaccaacaactaatgctgatacttttgctggttagggatataggtggaattggtgaagtgggggtatactggaccaagggagtgatggaaaagatgagcacaaacccataacgccagaaaaggaaacgtggctctcatgctgcagatttatattttatttatttttattttttcatttttttatacttttgagacaggatctcactcttgttgcccaggctggagtgcagtggggtgatcatgtggcaggccaggtctcacaaacaggcaggcctccataataactgtttcagcactgactgaatggttaggttaaatattaaaggctgagagagccagtgcccttacacaaagtccagaacaagtaacaaaggcccaccaagactctttcccaggccttcctgggccttgaagcatgacaagataacgaaggaatactcacactccttgtgacaagacagtcttcgggagattcccagcagctgccgggtgaggttttcctggagactctccccagggctatcccatgtgcaaaaccacacgtccctctccctactggggaataacggagatcggggtggacgcgctcaaagggtaaaaccagatttatgccaggagcctattattttcccatctgggcttgttaagccatttgcctggtactgccagggaagcaatagggctcgcttatacacctgctttgcatttggttaagatcaggttttgagtgggttttgagtctgttctgcccgagtgcaccccctctcttgtctttgtctgaaatctgtctctgcttgtttgtgtatctgtcatggctcactgcagcctcaaactctggcctcaagggatcctcacacctcaacctctccagtagctgggactattggcatgcaccaccatgcctggctaatttttgttgttgttgttatagagacagagtctccctatgttgccccggctggtctcaaattcctggactcaagcaatcctcttccccctgattttcagaaatagtgtctaaattctatgatttagacatgtttagttagagtagtgatgcagtcattgtatttatattagaatacattcttttcatattttttttctcactgcttttagggttggaagagtttagttagttagagtagtgttttccaaagggtgtactgcagtctacaggattttgataatcttttcattagaggagtattcaagctttatttaaccaagggggttgtcatagaactcatgttccatggaaccaaactttgagaatcactgccttagggtcactgaaactagaagagtttagcatccactatttgctaaaattctctttgaccaacactattattaatttagcttctttcatcaccaaactgtaaccccttttcagcatggagtacacatgctaggatgcaccagtctagatacataagaaaatagtgaatttaaattgattagtgaaaattgcttggatttggggagttagaagtcttgggtatcagttctagttctggcacctagtaaataattttgagcaataagtcatatataataacttaatttaaataatcagagccttaatttgctcatctaaaaacaagaataaaatgtttataagggatatttttaagtttgacttgagctaatgtgtataaaaacttgtcaaattgtgaacactgtaaaaagcaagatataattatcacagaactaagtactttatattggttcagcagagtttcagaatttctactgttgtcaaagcacatgttttgctatgttgattttcagctgctatgaagtttatagaaaagcggaaagtctgaaatttctgtgacaaggctttttgttcggggttatttttaaagaaaacagaagatcggattgcattaaaatttgatgattgtgttattcttgttatatatgtcttgactagtatttagtaaaagttataaggaaaaaaggagcagttgtctgcaatatactagaaatgaactttaatcttttcacacgattcttattacaacattttttcctctctccagattgcccaatcactgaagagctgtgatcttcctaaacagttaaaagtcrggcacagctatgtaactcatacagtttctctttgccagactagactaaagaaggagcactamtttattctgataaaacaggtctatgcagctaccaggacaatggaatctacgttgactttagcaacggaacaacctgttaagaagaacactcttaagaaatataaaakagcttgcattgtaagtacaattcttatttttagtctttctagttttgtgacaaatgttaaaagtatatgatttcccatttacatttctttgtgttgctattaaaatgtaaacttttaagtaactgtattcagtattatcccttatgaaaactctaatgcaaattaatatcttaaatcatattttacacgtaagaaatttgagtaacaacaagttaacattacgttaaactcaaaagttggaatccatgacagaacgctttgtggcgctgattttttgcatgattataactacctctcaatcacttttttattgcatgagtattttaagacaagaaagtgagaaattaaaatcattgtaccctattatttgctgaaccaacaattgtatcctattttacttcactcctagagatagtctcttttgcctattttctctctcttgtcatttcatgtggtaagatctgccaccccccctcaccccccaaataaattttccttgattttattttcttttttcttttttttaattttaaatttttttctttttctttttactccagaaatacgcttatccatttccttgattttattactctctcttttccctttgccatcaaacttttggggtaaagagggctcatttcattgcttcagttttctcagcccccaaccattcctttgtgctctggctttgtttctactgtactgagtccctgactcaaaagtcagtcctcctcgtccttcatccacttgagtgttcataacaacaataacttcctggtactttctcattctgaattattctctccccttgcttctaccatgacattgacattttcattttatgacttttttccttatctgcattcttagccaacaatttatctttattctcatgaaaattacaacacaagcttcactaaaccctatctaagatctcttaagaaatctcatgttctctaatagtctttttaattttaattttatttttgagacagggtctctctcctttgggatctcacctcaccacaacctctgtttcccaggctcaagtgatcctcctgcctcagcctcctgagtagcttggaccacaggcacatgccacaaggctcagctaagtttttgtgagtttttttctttcttttcttttttttgtagagactgggtttcaccatgttgcccaggctggtctcaaactcctggatcaagtgatctacctgcctcggcctcccaaagtgctgggactacaggcatgaaccactgcacctggcctctagtgttttcctcagccaagaattccaagtaatccaccagctctgactttttgcccagcctctgtcacacaatttctttttttttttaattttattattttggtaatatgtgtatttttagagactgggtctcgctatgttgcccaggctggtcttgaaccctgggctcaagtgatcctctcattcagcctcttgagtagctggggactatgtgtgtgccccagtgcactagcctgtttcaaatgcctgcttcctgactcctgactcagtaccttacaccaaaactaattgcattattttttcacaccaatcttgccgcagcttttccctatatcccatattttaaggtcaccgctattctctgtctctccagaattgtttcaagaagtaaataaaataatgtaaaacaatgtgtgtaagtattaagcctagtaacaaagtaaatcctcaatatattccatttattctttatccttctgagaatttcaatttcagagtgctctttatagctcttatgctaatatatatatatatatatwtttttttttttttttctctctctcttttttttggagacatgttctcgctctgttgcccaggctggaagacagtggcatgatcatggcttgctgcagcaactcaggctccaactttggctcaaatgatcttcccatctcagcctcccgagtagctgggacttcaagcatgtttattatatttatcctagcttatcaattcaggaaattataaaatcttccacagcaaaatttgtgcatcattaatttcccttctttgtatctctctagtggtttttgagtatatataatgaagttcaatatttttaaatcattgtttcaaaagtaccctgatgtcttcaaacttttactaaagtttcacttaaacattttgaaggtatctgctgtgtttctagcactctttgtttagcccagttaaagccaaatgatgtgctctcagcagtttttgatgttcagagtattctccccactttgtgcacagtgtaacatagtttaagrtacatgtgcaccccaatatcaagaagcttttttggaattacatatttatagtaaatgattataaaggcttaaaaataaacttcttaggcggggcacagtggctagtgcctataatcccagcactttaggaggccgagataagaggagctcttgaggccaggagttccataccagcctggtcaacatagtgagacctccaactctaaataataataataataataaataaataagccttttactctcaaggagctcacagaataatgtagaaaacaagccacaaatatatggaacaaatacaaaaattatgaagaaacagattctaacattaaatattgtgaagttttaaagcatcttaagaacagctagatgttgttgatttttctagcaagtttgaacagcaaaagtaccacagataaggtgtaaaccaaaatatgttaatttgtaagtctatgatgtgtgaggtttaccagaaggagttccccaacgttgtttttctgctttgtagtcactctagtttcagtcgactgtgtcttctaagcaccatgacaagggaggaactgctaatggtgttatttagtaaatgcttatgttcattttttcctctccatcctctccactgaatgaacatgtactgaaaggtcactgacccttgagctaactttgagacttcatataagaattgttttcttagtattgtaacatagcttcccaattgttgaattcacttccattgtaaacattagatgtgttaattttccagttgactttcagaatgaaaacaatcctcaaaaaaataatttatgtacttcttaattatctaagcaaaatctgatgtttttttcttttgtgaaagttattttttgtgtctgaaactataacaaaggttattgtaaaatactttcctaagtaatttgattacgtgtctttctgccattctttatgacaacatacagtattcaagccctgtcatccagcatgcttatctctggacttcatggaagaggaaagagggcagctagaagaattctttttaattatatcatagtttaatctaatcatagcataaagttcgttacaccaaagggctttgtcagcagagcgataatgaatgacataaacaatctttggtcaggcagtttccaaattatcctaagtggtttgtatgagtggaagaccaaaacagattatttgctagttaactatttggacaatgtatttttacgtatgttaaatattattatcatcctgtgatagagtaggaaaaaaagccctgctcccttagaatgaggcagttaaggatttaacagttctgcaattcttttcaataaatgatcacaaatgggtgcctggtttaaaaaaaatggcccagaaaaatggttttatggttttaattcttaactttaactcaatttgcagttaagttcattgcatttgaatggtaaatgtgtttgaatttgaagatctgtaataaatggtatctttaaattctgccaaaatattctttcttaatttcaagcattaaataaaatactatacctccagttaggccagatactagatcattgttggatctggtatctggcataactagtacgctgcaggtacttagagagaatactgagaaagggtggttatttgtatctttgtaattttttaaaaaattataaaagttactttttcctttttgcaataggttcttcttgctttgctggtgatcatgtcacttggattaggcctggggcttggactcaggaaactggaaaagcaaggtatacccctcagccttttctcagaacattcccttatttcttctctcttctggccttaattcattaaaatgtatctcccatcccaagcctcctctgtcctccatgcagcattctgcttctagacatctccctttccccactctacttatcgggagtccacatctgaggttggcattgctcactgtactttctggactttactttttcaccctgctcatttgagactcattatcattccagtgtttttctcttacctttctccaccctggttttttttttttttttttttttttggcaagatctcactctgtctctcaggctggagcacaatctccactcactgcagttcctccctgccctcaggtgatcctcccatacttgagcctcccaagtagctgggaccacaggtgtgtgccaccacacccggctaatttttgcagttttagtagagatggggtttcactacattgcccaggctggtctcgagctcccgggctcaagtgatccacccacctcagcttcccaaagtgctgggattacaggtgtgagttgccgcgcctggcccttcttcatctttataatggactttggtaagtggatcacagccttttcattctgctcccactgtcattttcaacatctgatgacaaagtatctagccacttagtcttgaaagtctttgttgcttcattcccatgacctcctgccaccaccctgtaccttgacaccacgctagagttgttctacccctaaaatctcctggttcttgattggacagtgccaaattcttgaaaagtagtgcataataatatcttcaaaaatttttttcttataagaagcaaagaaaaataggagaaatatgtcccaaaatataaaatacctcacattccttttgctatatttcattattatggagagtaaatgcaccacttacaaatgacaatataaaaagaattacctataatctttttacatattgttttgttacttttactaaggtgaagtatgaagccagttgctagatcattcatgtccccccgctttttgttgtttgttttttgagacaaggtctcactttgttgctcaggctgagtgcagtggtgtgatcacagcttaccgcagcctcgatctcctgggctcaagtgatcctcccacctcggccccccaggtacctggtatacaggcatgcactaccacacgtggttaattttttaattttgtgtagacatggggtctcactacgttgtccaggctggtcttgaactcctggatgcaagtgatactcctgccttggcttcttttaagcattgggattgctggtgtgagacactgtgcccagcaccctcaccctatttttgcctttgtaaaatttttatgagcaataatcatacctcaaataaacctcattggctactatactgccaatgcacaaagctctggccccatttttaaatttgactaaaaccttctagtgtgactccagtggagtaagtctcattgctgcagcattaggaagcctcagtaaggttaactgataattttccagtcatgtgtctacttgagaaacactcagcttccctagtatgacctaggagcacagtagaactgaaaagttgaataattgctggaagattactatcttctcttgtcacttggctgttgtgtttctgggccatagtgccagtccttgatcaaagaaatgttgacaggccatttcagtggtattgttttgatgttagtacacacaaatgggcatcacttcttggctattttaccccctaaatcacataaattgattgcagaaggcatatctaatgtctgaacaaaacctccttttgttccagctctttcattcactttagtacacccattggctggcttcccggagtcatttttccttgtcctcgtcctttcatctgagttgatcagccctatgtggcagcatgctcttccctctccctggcagggcattggtaattaactccagcccctttttgccagcatccttaacatagtcatcctctttattactcatttttccaccgcatctattctcctaaaccccaaccctgggtcattttcaccattttccactccagttaactcaccttccataggcaatatgtattttttctaatgtgagttttaaaatttgtgcatgttcttacagatttaccgtcatgactacacgtattttttgattgaacattatgtgcttggtattattacaattactggagatgaagtggtgaagacaagagacaaaatccttccaggagtttatattttagcatgcaagacagacaataaaaatataaataaacaaaatatgtatataataagataaagtgctaagaaataagtaaagcccaaaagaaggaatcagggtcgtctgtgtgtgtgtgtgtgtgtctgtgtgtgtgtgtgtgtgtgtgtgtgtgaaataacttttgagtaatgactgaaggaagtgagacagaaacatagggataggttggggaggaacattccaggtcagaaggactatcaagtgcaaaggccaaaggcaggaccttgcctggcatgttccatttaaggaataacaaagaggccatgaactagaactaaaaggactagagggaggtggtcataaaatgagatctactaaataaagaggaacccgatcaagtaaaggttagtatgtcaaagcctggtcttcaactttcattctgagtgtgacaagaactgattgcaggatttgggcagaggaatgatatgctctggtttgctttttaatagaatccctagggctgctgtgttatgaatagatagtagagtgagagcagaagtagagagaccaatcaggagattattccaataatctgggtaagccttatgtcttaaaccagggcagtagcattgtagctggtaagaagtatttggattctggatctattttgatggggtagatagattttattgaaagactggatttagagtaagaaagaggagtcaagaatgaccccagaatttttgtatgaacatctggaaacatgaatttccataactgagttggggcagattgtagaaggagctggtttggggagaaaaatcaggagctcagttttggacctgttaaatttgctagttctattggatgtccaagcgcagaagtcaagaatgtagttgaacatatgaggctagctttagaggtgaagtcctncctggtcatgtactgtggtgcttgtcagcatatgtgggatttaaaccatgagactggggtagaacaacyttaaagaattggggaggtgaaggggaaaagcaaagaaaactaggaaggagtagccaggaatgtgagaggaaagccaggtaactattgtgttctagaaaccaagtgcagaaaggttttataaggggagagtgtatgaaaaaacgtaaagaccatttatgtaaatggttgtgatgtatctaaatctacatattttttttctagtttttcattgagcactttttgagacccatcagaattgccatgcatacatctgttctcatgcttctactgtgtgttactctttggcatgtacccaacttgccaaccaacctatgccctctcttggtgctgagcacccaaattggctttagttcctcacaatcacataaatactgcaggttcccttataaacctgtgtgataactgctttgccatagatcaaggaatgaagtttcaggaagttagggttttcatcttcttaactcaggtatgtagtcccaggttgctttctagaatggctgcctcagcctaccctaccttccttcaacttacctctccaccagccattgccattattcagctctctaatttttggcagtgtgcagttgggtatagaataaagtctttcattttagtttctatttctctgccctgttgctctaatccatgttggttgctctcttggtctggtggatggttgatatttccattagcccatctattgtgttagatcccatgattttaaaatctctttcttcttgtttcattttctcattttgttgaagaacaacttgatagcttcctaaaacaggatgcatgagagagataacttgaatctttgtctatgtaaagacgcatcattctaacctaacacttgacagtttggctaggtgttgaattctaagatggaaatactttgtttttctagaaatctgaaggtattactttactgtcttatagtatccagagttgmttttaatacatttggtattttaataaatttctgattagtgatcctttgtaggttgctcatgatctctctgtggaggctttcaatatctcttaatcctattgatctcttagtgtgagttttgccctgggaaacttggtgggcaactatggtctaataatttacgctcttcaattctgggaaattttataatatgatttctttcataacatcaactccattttctctttcactttaaggcctcacctccctgttctaagatcagttaattagtagccttagttacatctgcacagttccttggtcatgtaagacaacagacttgaagtctcagcaattaagacttggaatcttcttgtggaccacaattctgcttaccatatctctactgaatttttctttacttccctcatatttttacttacaagaccaccctgaatgtggggtcttttaaaaaaattatagttctctttcttattttgttgacgcagtatcttctctcttttctgaggctctcaatactctgtgtgtgtgtgtgtgtgtgtgtgtgtgtgtgtgttgttattttaactcttttgctccctgcattatttccttttcaatcaagtttttctttgatgttgtttgttcagtgtttgtctttcatgtaggttgctatcctgctatcctcaaatgtctggggaccatctgttcattttcagagtaaggcttgttttttcttatcatagttaccctcctgtatgtctgttgtctctgtgatgaaagccactccttattcctccagattatgagcctcctagtctggagtgggaggcagggtgagtagtgactgctccacatccaagcttttaccaattctcctatatttagctttgtgcctgttcccctcttctcttacctaatgacaccctgtttctcttacttaatgaccttttttcttacctaacgacaccctgggacctcccttctagggtcctaggggaaagctcttggctttttttttttttttttttaacttttccaggactccttcctcttaggcacctagttgttgcttccttcattctgctatttctgtgtttcaaaattctttttctgcttctatcttcgatttgatttagagtattcatatacttttataaactgttttcctcttctttttgtgaaattttgtggaatttgaggagatggaagaggtaaatgagttttatcaaccagctactttttttttttttttttttgcctcttgagtagctaggactaaaggcacgtgccactgcacccatctaatttttgtatgctttgtagagacggggtttcgccatgttgccaaggcttgtctcaaactcctgagctcaggtgatctgcctgcctcggcctcccaaagtgctgggattataggcatgagccactgcaccaggcctcaaccagctacttttaaagagaaaactgtattctattttgtagtttgctgttttcaaataataacgtaagcatttctcaaaatcattaaaaccatgaacaataatgtgttaaaataacttctactggcatccagaaatgcttataatgttattttatgttgatataataatttaataaatcctccctttaatgtacattaagactgtttcagttaaaatatgtttgtaattatgtataacactatggagaatatttctcaacatagatctttgtatgtttctttagtataaagtctggaagtgaaatggctgaaatcaaaggatgtaaagattttttwaattaatttaagattttaaacatacaaaagtaggaatactaatttaataaatgtctatgtattcatcatcccactctatcaattcatgaccaatactgttttatttatacctttctccataacctcctctacatattattttgaagcaaatacttgacattatttcatttctataaacatttcattgtgtatttctaaaagataaatttttttaatgtttcataatattggagataaatattttaaagaaaatgttctccactttgtagatagacttttcaaagtattattagttttgcatgggtaatataatctcattatttatttaaaagggtttcttccactgccgtataatagctatcatgtttccctcctcagaaatagctaagattatcatcacattattgtatattcttgtagaaattttataacagcaactttgtatttgtgttttcatgtactccttttgcctttctgtctttctttatctctttccttaaaattcacattttacagcttttgcttcatatcgtcaaataaccttcctgaaagttgtgaatttatactacgaacaactgtatatctcattgatttgttagtaaaaaatgatcatatttttcttatgttcactaactttttacagtgtactttgaaaatcatctgagtcttctgcttgatgttttttggggtcaaactatagtaggatgaattcaggagatctaatgctctgagaattatcacttttagtgcctgttatgtcagtcctcattgtccttaacctttcttgcatattttgaaaatgagtattctaaaatactgtccttaaccacttcactcctgagacatttctgttttgataagcacctaaaattttttttgtatatgttgtgaggcaagaatatcaagagattccttaccctatatagctggccagttgtcccattactatgtgttattcactgttactttgcagttaccacttaaaaatttttattatataaagtctctacaattatatctgcattatttatcacttcatctgcaattcccagcacagtgcctgaaacataatgatgctaaaataaatattcatagaataaataagtaaatgaattaatttaaaactatgcactggttttcaagggatagaaacaagttgtgcatagttgaactttcctagacacactattataacctccttgccttcaaacgactccttcaggatgcaaagcagaaagcaagtatcatagggaattatagataattttcaatgggaatgcatagcaaggagaaatgatatttagctgggcacacactcctcgcacaataagaactacagaattcccattgcttcttattcctaatatgctgatgactccaagtcagtatctttagtttatgtctctctttcctgagcttcagactcaaatattcagaccccctcctaaatatgtatttgcttagatatatggaaaactgaacttcccttttttcagtgcctttgccttacattttggaagtcatccttggctcatgccttttcttcactctttatataaagctgaactgaaactaattgcactttaatttctcttagctctatttacatcttccttatgtctactgctactatcttccttcaggcccttatcatttttttggggcgggtaaaaatttcttgcttagttcaggagtttccatccctaccctactcacctattttccagagtgactttctaaaacacagatctagttcattactctctgcttactctttaatggcttcctgttaccaaaggttgggcttcaagcttcttagtatggcatatgcaactttcctcgctctagtccacctctacctttgaactctaccccttagccatcataacccatctgctgttctccaaacatgccttccttagcttcactgatttttaaaaccttgatcctttcccaagactcaatggtgtccttaatccccttgctagtttttgtcccacccctgtgtgctcccatgtactccttgtacatatcaatgtcattactattattattattattgagacagagtcttgctttgtcacccaggctagagttcagtggcacaatctcagctcactgcaacctctgcctcctgggttcaagcaattctcctgcctcagtctcccaagtagctaggaccataggcgtgcaccaccacacctggttaagttttgtatttttagtagagatggggttttgccatgttasccagactggtctcaaactcctgacctcaagtgattcttctgccttggcctcacaaagtgttgttattacaggcatgagccatggcacctggccatatcagtgtcattatttattacattgtattggcagatcctgcagcaccataaaaatcatctagttgtctgtcatagtctgtgctgtgtacttcctgtgtgcttccactgcttaggtatgagatattgaatagctcctaaatgttcgggccctatttcctttactttgtaggcagctgcaggaagaagtgctttgatgcatcatttagaggactggagaactgccggtgtgatgtggcatgtaaagaccgaggtgattgctgctgggattttgaagacacctgtgtggaatcaagtatgagttctgagaataagtttattagcatgttgcttgtgttactattaatacatgtcaaatttttttcttttctttccttttttttgagacagagtgtcactctgttgcctaggctggagtgcagtggcatgatcatggccaactccagacttgatctcctgggtccaattgatctttccacctcagcctcctgagtagctaggaccacaggcatgcaccaccacacctggctaattgtttttaatttttttgtagagacagagtctcaccatgttgcctaggctggtcttgaactcctgggctcaagcagttgtcccaccttggcctcccaaagtgctgggattataggcatgaaccactatgccagggctgtgtccaaattttcacctacataccttgtgtattagtttcctaaggctgccatgacaaagtaccacagactgggtggcttagccaacagaagtctgttttcttacagttttggagactggaagtccaacttctaggtgttgacagggttgggtcctcctgaagactccaaaagagaatccgctccatgcctctctcctagcttctggtggctgctggcaatctttggcctgtggcagcacagctccaggctctgccttcatcttcacataatctgtgtctcttcacatagtctttcctctgtctgggtctatgtttaaattttcccttttaataagaacaccagtcatacaggattaaggtctaccctaatgacctcattttacttgattatttacaagtaattttttttttttgaaacaaagtctcactttgttgcccaggccggattgcagtggcacaatcttggctcactgcaacctccacctcctgggttcaagcgattctcctgcctcagcctcccaagtagctgggactacaggagtgcactaccaagcctggctaatttttgtatttttggtagagacggggtttcaccatgttggccaggctggtgttgaacttctggcctcaagtgatcccactacctcggcatcccaaagtgctgggattacaggtgtgggccactccacccagcctcggcaagtaatttggaaccatttctaaataaggtcacattcacaagtaatgggggttgggacttcaacatatttttagaggacacaattcaacctataagacctatacacagtcttattatcatttcctccttaacaatgctaaatacagaattcacactttatttaaccgaggttgaggaataacaggctatggtaaatgaaatgctgtatcattacataygtttcaatggagttttactatggcttaagttcaacatcttgtttgtttcatttgcagtggttctcaaacgtcgaggtgcaataaaactctctgggaaagctggtgattcttgatcattctgatgccagtattccacagggcacaacttsagaaatgctgttctctaggtggaaaagacagcttacaatgtttaattccctaaataatctgggaaggtggtggtgggggggtgtccagtggttggaggagagtgaagattagaatagtagagttccttccattatgttccctgaaaagggcaagagggagaggataacccagtatagatagagatctgtgttccctttacttaatctccaaaaatcttctgtttctatgtaaatgagaaatgctggggaaggaagaaatctatatgtaactgaagtggacaaaagttacctattgagaatgtttgtctaagcacaaggctaacattgattttagtcactgtttcctggcaggtggcagkgccaagccacctgcctccagcctcttgctgtttttagcartgggatttattgaaactgttctcatcctaagtccatagcctgggagaacccctgaggcatgagtgggagctgctctgtcactgctgtcactttccactgagaagtaccttgatctgcctacattctcaaagacatgactgtgctcctgttacttctgttgtcaccttttcttccttgctgcttgtccttagacaaggctgggcaaagctgcttttgggtggcaataatcagtcagggctagtgattcttcaccttggggagctcctgctcttgggtcggaataggagccatgttcagatcttctccaagctcacagtgtacctgctaagtaaacctgggttgcgatttataaagctgcatttctctcygccacctggctagtgaagaaaagtggtggtttgcccctcatttggtattatgtattttcatttattaatacagataaaccragaatttgattgtgttattataatataggaataaataaatgaaatttgtatattttatactgcaggcttaaatgctcagaactgaattgtatcgttttacagctcgaatatggatgtgcaataaatttcgttgtggagagaccagattagaggccagcctttgctcttgttcagatgactgtttgcagaggaaagattgctgtgctgactataagagtgtttgccaaggtgagcaggaggatgttgactcatttgcccctgcgagtttagaggaactccatgagtttcctagagccatgctaggctgcaaaaatcaaaacacatcggagaatctttagttactctgtctgtgstgcagcaagtatcaagattttgatcttatgcttttcaggagaaacctcatggctggaagaaaactgtgacacagcccagcagtctcagtgccyagaagggtgagcatgactgatacagggatttttatcctcctttaacaaaggtgcacataagaatgtagttagttgagacgcagagaggaatttcccccaattcatgtacatttcaaaacagaatagtccacaaaggattagatttcttgtggcttccaagttctartggacttttgtttgctttattttttcacaaagcccttttatattaatttattatattcatgtcttacaacgacgactttattttgtttttgtctttgagacaaggtcttgctctgttttccaagctggagcgcggtggtgcaatcacagctcactgcagtcttgacctcccagacacaggtgatcctccccatctcagcctcctgagtagctgggactataggcacgccaccatgcttggctaattttttatttttctctcttttttttttttttttgtacagatgaggtttcactaggttgcccaggctgctctcaaactcttgagttcaagttatctactcgccttggcctcccaaaatgctgggattccaggcatgagccactctacccagccacagtaatgactttaacaaattgattggaatattaaataggtaatactccaaagttcttatggtcaggattgaaacttagcttgaaattacttctgccagaactccttttccttttttaaataacttaattcctgtcttctttttttaaataaagatagggtctcgcaatgttggctaggttgatcttgatctcctggcctcaagcctccctcctgggcctcccaaagtgttgggattacagctgtgagccaccatgtctggccagaactcttttctattaacatcttggcacctcaaatttcttccttttgagagcagggaaagaggtttgtgcaggccttgaaatgaaaggaggtccttgaagggtgaatgaggagagctttgtcagggggcataggtgatgaacacgtgaggtgacactcctaccccacccctcccatgcatcttttccacatgtttatcagggctgctccgctgactgccagggcctggaaatgtgcatcacttcaagccagcatggattccccatttctccatccacccctctgcccttcacacttttctgggccaagtaatgggagaatggtggaagggtggatgaaaaagaaaggaatacctggctttaggaggaattggtagaggcagtttttaaatttaagttttattattattattattattattattattattattattwcgagatagggtctcactctgtcaccaggctggagtgcagcagtggcacgatcatagctcactgcagcctcaaattcctgggctcaagctatcctcccatctcggcctcgtaagtatttgagactacaggcatgggccaccacatgcagctaaacatttttttgtattttttttgtacagacaggggctcactatgttgcccagactggactcgaactcctgaactcaactgatcctcctgccttggcttcccaaaatggtgggataacaggcatgaactactgtgctggccagtggaggcattttttgtttcaagacaaggtctcattctgttgcccaggttggagtgcagtggcgtgatcatgactcatagcagctgctacctcctagcctcaaacaattccctcacctcagcctctcaagtaggtgggactataagcatgtgccaccattctcagctaattcatttattttttgtagagacagtgtttttccatgttgcccaggctggtctcgaacttctgggctcaagtgatcctgccatcttggcctcccaaagtgctgggattacaggcaagacctgctgtgtctggcccagtggaggcatttttaaatagtgttatttcattttaaaaatgagtataaataatgtgcctgtttttttcccatgctgctttggtttgtagctcagattcagctgctctctttgcaccttgtgggtggaagagtaaaggattagaataaaatgagaggagtttgagtcctgattttgcctgtaggtcttttgcgctagtcacttctctgagcttcctctatgaaactgaaataataacaatgccagggtcagacgatttcatgtgagaattaaatgacctaaagcgagggaatatgcttggtgagctatcaaacagtaggttaattttagttctagtgtatggtacatagtaggtactcaagaaatcgttaatatttttctagtgaaatttttctatagtcacttgctttattagatgaacctggtacttgaatctattaaggtgtgcccatggcctcttctcatggttcaaattacacagtcaattcatctctgaaaagcatactaataccagctaacattcatatagttcttattatttaccaatttgtactttacacaatagtcatcttacatgttagtccttataaaaaccctttggctctattatctccatcctcattttacaaagaatgaaatggaggcaaaagctgtgaaatcacttgcccagtgctgcattcctagtggttgctggaagcaggaagcaaacccaggcagtaaggacccagagtctctgtggcataacactccctcaagtcataggctgagcccgtgatgctgtgcaattcatcagaagaacgggtaaggggctgaataaggggaagaattgtttgaggcaccaagactccctcacctgttgataaccgggaggagagagacattaggtgagaaggaaggtttccagtaaagtctttgtaaagagtctcaacaaacctagatgactaagcccaaatgattagttagaatggccttctccaaactggcaaatcactgtccacctgaggatttgagagctggagcagcatcccagagaaattacaggactgatttgtcaatcttgatgcaaggcaagactagaaaggaacctggtgaggaaaggggtggtggtggtggtcagaaggacactgaccatttcttacaatcccctcattctctttattccattgaagtcattcctgcctataccttccatccctgcatggaaaatggacaatgatgattctgctcactatgaataataagtgctgctaaaaattttagtggctgaagacattacataaaatcctcttgccagacatttatgctagtgttctctttgcctgtttgccttactattttgctagtgatcatagtatagtaaggagcttagactcttaaaccagacagatgtgagccaatagcctagctctgcccctactggcgggggacaccttgggtaaactacctgatcctggtgaaataatagatctgagatgacagttcttggcatgtagtgagctcttactcaagcttcatcacaggcagtaaaaataatatggatgcaatgttcaagttttttagcaatcggagaaataaaaatgaaaaaagatacaacttttactccatgaaatagtcaatacatcatgatttgtgtatataaagtcctagctacctgtcttgtttatgaaagtactgtataagttaatatctactgttgggaaagaattgtggcaatattttggtctcctttgaaagtttgtcgtaggccgggcatggtggctcacgcctgtaatcccagcactttgggaggctgaggcaggcagatcacgaagtcaggagattgagaccatcctggctaacacggtgaaaccccgtctctactaaaaatacaaaaaattagccgggtgtggtggcaggtgcctgtagtcccagctactcgggaggttgacgcaggagaatggtgtgaacctgggaggcggagcttacagtgagcagagatcaggccactgcactccagcctgggcaacaaagcaagactccgtctcaaaaaaaaaaaaaaaagtttgttgtaagaccaggaaatgtgatctttatgaatttatctttaggaaataattaagggtgttttagctacaagaatgttcatgtcagcagaatgtaaaatgcactctctagttagcttggacaggcaagctggccattaaaaaaggggtgcattggatgtttggattccactcttgatcccagagacaagtgaccctgtctttaatctcttccaagttattttaatggcatatttatgaatataaagtttttaatcagagttatgttaatgactttatgaaaaaaagaagtattttctcatgcgaattgcagtaggccactttaatttcttcatgaattttctgtacactgcagttcaaacggtcccagttttccatttttatttttaaattgaggtatcctatagttcatactataggatgaactatggtatgaaatggtcctatcttaagtgtatagtatgatgcaatttggaaattcactaagctatgtaacttaccaatatagaatatttccaccatcccagaaagatagctcatgtcccttcccattgcttacttcccaaagacaatcactgttctgatttctatcatcatacattcctgttttagaattttatgtaaatggagttaaaccacaggctgtcttargtcggaaacctaataactttccaaattggaaagtactcaagtgcctatggacagtagaataagttctggtttattcattcactggaatattagatagctatgggaatgaatgatccataattacttgcaacaatatggaggaatctcaaacataatgtcgagtaaaagaattgagactcaacaaaatgcacactgtatgattttatttgcatataaatgtaagtacaaaaatagacaaagctaatctatgctgttggaaatcaagatactgatcatccttggtggggtgtggtttggagaatttagtgaccacaggaagcacaagcatcctgataatattctgtttcttcatctgggtgatgactacacagggagttcagttagtgaaaatttatcaaactatgcttctgtgaaatgtgtgtgtgtataacagaagtaaaattttaggccaggcgtggtgactcacacctgtaatcccagcactttggaggccaaggcgggcggatcacttgaggtcaggagtgggagaccagcctggccaacgtggtaaaaccctgtctctactaaaatttatccggttgtggtggtgtacgactgtaatcccagctactctgaggctgaggcatgagaatcacttgaacccaggaggtggaggtggcagtgagctgagattgctccactgcagtccagcttgggtgacagagtaaaactgtgtctcaaaaaaaaaaaaaaagaaattaaaaaaataaaaaatgacagtgtctggctatggcccaaaagttacccaattattttaccttaaacacaggtctaaaaaaggattgcaatgcttttgaggtaaatgtagctatccaaaacaatggacaaattttgttttccattttcaggtttgacctgccaccagttatcttgttttctatggatggatttagagctgaatatttatacacatgggatactttaatgccaaatatcaataaactgagtaagtcttctgtaactagtggcatgcaaatgataaagacacctagttagtcaatctctagaggatgcaactttctttctgacttttaacgctggtggtttgtcttagcctagatcctctctgactttaccacatggtttctactttcattcggaagtatattttcacgcttgctggcttctcctacctttattttggtgggatgttcagccttttgtttgtttattttgatttgctttatatttgaatgtaacttctgtcctatggaaatctattcatgtgtactgccttgaaagtgatgtttgtcagacccaggttctgggccttagcaaggagaatatagcgagaaccggatcctgaaggagcctggtgggcttagacagatccagcacctcccaccacttcagccgatatcaagtccaggatctatttccagttctggaatcaaactgcctacaacctgactctactacttgctagctgtgaggtctcagacaactttccttcaccttttagtgacccagtctcttcatctgtgaaatggtgacttcccacctgatagtattactgtgagaatgtacaggtagcattcaaaaaatagctgtttgatatgtggcatacaatgggtggttttaagttattgttataattcttttattatcaactttattataatgttgtacttctgtgttaggacacttggccttcacacaatttaataaaggtagtaataaagagaagttgaggctggatgtggtagcttatgcctgtaatcctagcactttgggaggtggaggctagagcatcccttgagctcaggagtttgagaccagcctgggcaacatagtgagacctcatctctatttaataataatttttttttaaaagaagttgagtacccaaggatacaatgctaagaagtggcatagttagttagaatcagagagctaactccaaggcgcacactcttcactgccctgcaattcctctctttcttctccctcctccgaggctgttttatatccctaaagttctcaaattttatgtcatttttactggtttattgtttttctttttcttcaagttattaaaaatagctatttgactctgggtaagttgactgacttttytgggcctcagtttcctcatttgtaaaatgaaatgactagatctgatgatttctactgttaattccagccccaaatgccatggttgtaggaagatagatcactacttcctgcaactcaaggtgcattgtttcttcagcttctccctcattccctgaggcagatctttagcaaagagactgttttccaaatccaggacctgtcatttttctgctgagttattttgtcctagaaagttaactaacacttctcagtttctatcttcttatctaaatttgtcttgataaactggatatcaaatctggtgtcaaaagggaatttgactagccagggtgaactgaaccttttctaaagtgaaattcctcgatttgctcattccattgagaattagaaatgacatcaatgaaatattcagccactaagagctttctgcttttgatgtttaaaatattttaaaacatttaaaatattttttagtcatatagacaacatctcaatccccaaatgtgtgaagctatgatcagctaggcctacctaggcaaaatagggctgttagtttctcagaggcctgattaagaatagatgtggtaggtaggggtacatattctcaggaccacctgaggctgttttgagggaaaattgaaaaaggagagatgtggttaaataggattaggattatgttagtcttgaggtgaggtatgtgacagcaggccttgctattaagggagcccagggccccatctctagggtttcatcaaactgcctgagttgggccaccatggtcatgtaaactgagcctaaacaatatcacagagcagtgagtcatattagtgactgttaagtggacgaggaagtggctctctgaatcacactctaatgaggcaagaacattgtcttgtcttagtgcaggtggcagcagacaaagaagggccagggccaagatcaggaaactgtcaagtgggatagaggtgatttggcctatttagaagacagccttcctgaaaagttagatgggaatctgtggatcaaataagactagaagtagcaggtagacagcagagatccagcaggggacatatgcagagttttagagattagagtttgcaaggttggcattcatgaacagcagagctcttatactggccatagcagatgtcatttgctgtctgctttttaaattttgttaagaatgcataacatgagatctatcctcttaacagatttttcagtgtacaatgcagtattattatctataggcataatgttgtacagcagatccctagaatttacttattttataaaactgaaacttcatatccattgattaacgattccacatttcccccttacccagcccctggaatccaccatcctattctttgcttctatgattttaactattttagataacctcatataagtggaatcatacagtattagcgtgtctgtgactagcttatttcacttagtatgtcttcaagtttcatccatgttatcacatgttgcaagattttcctcttttattaaggccaaataatattccattgtatgtatatgccaccttaaaaatctatttatcttttaaagagaaatagattgttaccacatcttggctcttatgagtagtgcttcagtgaacatgggagtgctaatatctctttgagatcctgatttcaacccttttggatactcaaaagtggaattgctggatcatatacttttatttttacgtttttgagaaacctccatgccattttccatagcagctatgccgttttgcctttctaccaacagtgtacaagagttccaatttctgcatatcttcatcaacacctgtttttggggtttttttgatactagatatcctaacagatgtgacgtgctatctcatttttaaatttttatttttaattattgttattatgttagagatgaggtcttgctatgttgcccaggctggcctcaaactcctgggctcaagtgatcctcccatctcagcctcccaaagtgctgattacaggtgtgagccactgtgcccagcctcattttggtttgatatgcatttttctgatgattagtgacattgagcatctttcatacacctattggatatttgtatgtctttagagatgcacaatatctttcttctttgaagaaatatctatttaggtcattagctcattttttaatgagactattgtattttttgctatcaagttgtagaagttccttatatattttcgaaattaacttcctatcagatacatggtttgaaagtgttttcccccatttcatatgttgccttttcattttattgattgtttccttttctgtgcagaaactttttggtttgatatagtcctacatgtccatttttgcttttattgcctgggcttttggcatcatgttcatgaaatcattgccaagaccaatgtcatgcagattttcccgtatgtttccttctagaagatttatagtttcaggtcttactttgaaatctttaatatactttgagttgatttttgtgtatggtataagatcagagttcaagttcatttttctgcatatggatatccactttctgacatcatttgttggagcaactattatttccccattgtgtattcttcttggcaccctttttgaagatcggttgaccatataggcttggatttattgatttatttctgagatctctattctttttttttttctgagatagggtctcactctgtcacccaggctagagtgtgatggtgtgatctcagctcactgccacctctgcctcccaggcttaagcaatcccctcagcctcctaagtagttgagactacaggcactgcatgccaccatgactggctaatttttgtatttttgtacagatggcattttgccatgttgtccaggctggtcttgaactactgagctcaagcttgccttggcctctcaaagtgctgggattacaggtgtgagccactgtgcccagcctgggctccctattctttttcattggtctatacatctgtttttatgccagtaacatgctgttttaattactgaagatttttaatatattttgaaatcaggagctttgatgtcttcagctttgttctttttcaagattgtcgtggttatctggggtgttatgaatttaattttttttctatttctgtaataaatgtcattggggttttgataaagattacattgaatctatagattgttttgggtaataggaacattttaacaatattaagtcttccagtccatgaacatgaggtgtctttccatttgtttatacgtcttccttaacttcttttcccaatattttatagttttcatatacaagtctttcactttcttagttaaatttatttctaagaatttcattattttcaatgtttagaaatgagattgaatagttaattattagtacatagaaatgcaactgatttttgtatgttgattttgtatcctgcaattttactgcatttattagttctaaataaatttatttagagctttcagtatatttagagcttcagtagatagtatcatgtcttctgaaaatagggacaggtttacttctttctttcctatgtggttgccttttttttttttcttgcctaattgctcaggctagaagagtggacagtcttgctttgttactgatcttaggtggaaaaattttcaccattgaataggatgttagctgtagacttttcatataatctttattatgttgaagtattttttttctatagctatgtgccacataacaacatttcaatcaacaacagactgcatatataatggcggtcccatacattataatggagttgagaaattcccatcaccagctgggcatggttgcttatatctgcaatcctagcacttcagaaggccaaggaaggaggattgcttgagccaaggaattcaagatcagcctgagcaacaaagtgaaaccctgtctctaccaaaaaaaaaaaaaaaaaaaagtagctaagcacaatggggtgtgccagtagtcccagctactcaagagactgaggcagaaggatcccttgagcctaggagttcaaggttgcagtaagctatgatcacaccactgcactccatcctgggtaacagagcgagttcttgtctcaaaaaaaaaaaaaaatcctatcacctagtgatgtcatagaaattataatgtcatagtgcaatgcattattcatatttttgtggtgatgctggtgaagacaaacctactgcactgccagtcataaaatagtacacatatttatgtacattacatcatacttgataatgataataaatgactgttactggtttatgtatttactatactatactcttttcaaaagagatggggtcttgctatgttgcccaggctggctcaaactcctgggctcaggcgatcctcccaccttggccttccaaagtgccttccaaagtgcttggccactgtgccaagcttatactatacttatactttgtacattattttagagtgtactactacttatttaaaaatgttaactataaaacagcctcaggcaggtttttcaggaggtatttcagaagaaggtactgttatcatagaagatgacagctctatgcatattattgcccctgaagacctttcagtagggcaagaggtggaggtagaagacagtgatgttgatgatcttgaccccatgtaggtgtgggctaatgtgtgagtttgtatcttagtttttgacagaaacatttaaaaagtaaaaacaaaaaattaaaaaacaaaagcttatagaataaagatataaagaaaatattttttacaactgtgcaatgtgtttgtgttttaaactcagtgttattacaagagagtcaaagagttaaaaaaattaaaagttattaaagtagaaaagttacagtaagctaaggttaattgattattgaaaaaaatacatttttgtaagtttagtgtatcctaagtgtacagtgtttatcaagtctatagtagtttacagtagtgtcctagattttcacattcactcaccactcactcactgacttactcagagcaacttccaggcttgcaatcatgataagtggtctgtattatatcatattttcactgtacattttctatatttagatagatagggataaatatacaattaccactgtgttacaattgcttacagtattgaataggataacatgctgtacagatttgtacaatagactttactatatagcctaggtgcacagtaggctttaccatctaggtttgcttaagtacaccatattatgtttgcacaatgatggaattgtctaacaacacatttctaggaatgtatccctgtctttaagcaatgcgtgactgactgtattcctagtttgttgagagcttttatcatgaaagggtgttgaattttatcaaatgctctttctgcttctattgaaatgatcatgtaatttttatccctcattctgttaatgctatatatcacattaattgattttcatgtgttgaaccatccttgcaccccagggataaatcccacatgatcatggtgtataatcttttcattgtgttgttgaatttggtttgctagtattttgttgaatatttttgcatctattttcatcaggaatattaacctgaaattatattttattgtgatatctgtgtagcttttatattagggtaatgctagccttattcatttgaaagcattctcttggtcttcagttttttggaagagtttgagaagaattggcattagttcttcaaatttttggtaaagaaattgtcagtgaagccatctggtcctggkctttttcttgggaggattttaattattgattcaatctccttactgtttatagatttattcggactttctatttatttaagattcagtcttggtacattgtatgtttctatgaatttatccatttctagtaggttattcagtttgttggcatataattattcatagtattctcttaagaaccttttatatctgcagtatcaattgtaatgtctcctctttctgattttatttatttgagttttctctctttttcttggtctagttaaaagtatgtcaattttgtttatcttttcgaagaaccaactcttagtttcattgatttattctattgtttctccattctctatttcatttcttcttgcatcttttcttttttctgctaaacttggatttagtttgttcctttttctgttccttaaggtgcaaaattaaattgtttatttgaaattgttcttctttcttaatgtaggcatttattactataacttccatcttagagctgcttttgctgcattccattttcatgttcgttcattttgtttcaagatattttctaatttctcctttgatttcttctttgacccattggttgttcaaaagtgtgttacataatttctacattatttgtaaatttttcagttttccctgtaatatagatttctagtgttattccattgtagttggagaaaatacttggtatgatcccaattttttaaatatgttaagacttgttctgtgatctaatatgtgatctatcctggagaatgttccatgcatacttgagaaaaacatgttgtgttgggtttaatgttctgtaagggttctgctttaaaaaaaaaacctgctgatagttttatagggcttctcttgtatattgtgagttgcttttattttgctgctttgaaaattcattgtctttgacttttgacatttgattataatatgtcttagtgtggatttctttaggttcatcttatttagaatccttcaagcttcctggatctggttgcccatttttcctccctagatttgggagtttttagccattatttctttctataaactttctggttctttctctttttcttctccggaaaaccccatcatgcatatattaatccacatgttggtgtcccacagttctcttaatctttcmtcacttctttccattcttttttctttttgctcctttgcctgaataatttttaaaggcctgagtttgcctctctttgttgaaattctcactttattcatgcattgttctcatcacctcaacgagcatctttatgacagttgttttgaaatgtctgttaggaaaattgtatctctgcttcattcaggtcaattcctgaagatttatcttgttcctttgctttgaacatatttccccatttactcattttcctttactctctgtgttgacatctgcacgttggacaaaacagtcacctttctcagttttcatggaccggcctcgtataggagaaaccctcgccagttggcctgatcagcgattctggaggccccttaaaccttcatgctagtccagccttgtttctttgttgttaggggccccaagtgtctagagtatgctaggtcccattggtgttccaagatgagtgaaacttatcttggaaggaagccagctccttgggcagtcaccagagaatttggatcattagatgtcttgtccaattctttctctccccagagaaaagttggggtctggattttgttttgttttggtcgtggggctttttttttcttctttattttgctttttttctctgtgctgtgccagggagagggactatggtgactaatatgctacatcaaaccggtgtgtttttttctcactggcccccaggtgactagagtatgctaggttccattagcgctccaatacagacaagacagaaaaagccagtcctttgggcagtccctggtaaagttggggcattggacacttagtgcaactcttcctcccctgggagaagctgggagttggggttattgcctgatttctctgtgctgagccaagagcagaagctgtggtgagtgcctgtgtgctcgttagaatctcctctttgttctttgtagcacacaggggactaatagatgttgggtctcatctcttctaactcaagtgagttagaagccaatttctcagatagcacctggaaaaattggagtgttagatgtgtggtccaattttttcccccttggggagaaactaaaagttgagagttctctcctgatcatatagcatcgttctgggaatgggtattatgtcaaagaaacagttctgcttttcctactggtttcgatgtaactggtgttatacttgcctggtaagcaggagcctctcaagtagtttctggktttctcacaaagggaattgatttatgtgtggctattgaatgattgtgtctgctgtgggaagagtcgtccaagatttcctattctgttatcttggtaacatcactcctctttgctctcttttgacccttcttctttatgtgccaagggattgaatgcatacttgcaactctgggaagactgaagcccctgcagagcttattattctttattttttttgagtgctagaaatgatacaggccaacattatggctaatctttctacaaggttattctactaagttacatataaaatgaaagtacctattttcagcctgtgaatactggtaaacagtttgctatgttttccatttgtacagatatcttaataatatttcattatgccagtcttataagaatttcataaggactacattgtagtttttttttgagtcggagtctcgctctgcgttttttttttttttttttttttttgagatggagtcttgctctgtcgccgaggctggagcacagtggcacgatctcagctcactgtaacctccgcttctcgggttccagtgattctcctgtctcgcccccccctgaggatctgggattacaggcacgcgccactgcactgggctaatttttgtatttttattagagccagggtttcaccatgttggccaggctggtcttgaactcctgacctcaggagatccgtccgcctcagcctcccaaaatcctgggattacagacgtgagcaccgtgcccggcctacattgcagttttgatctgtacattctctggttgctttacctactcacctgtttagacctttgctgcttcttatagttcctagttactataaacctagttgcataggcttatctcatttatattttcagattattttgtttagtactttatttttttaattgtttttttagaagtaaaatacacacgtaaacattttaaggcaatattcgagggtataagtaaaaataaatgaacaaaacatctttcctggtcttcctacttttcctttgcaaaagcaactgctcattggtttattgcgtgtctttccagtagtctgttcaagtataacttaaattattcatatttggaagaaaccatggtagaagactgtgctttctgtagactttcttcagtagctgtggttcaagggcaggtaatacaaaacggtagcttgggtctatagtcagcagatgtgtcttgtttatgacatataactaggacggtgccatgcttttacaataccggtagcttaatttgcattttattttatcctctagctttacccatttaagaatttgagtctgccacccgtttcaaggatattaaagcagaaactgactttatgtatctgttcattgtatgaattttttcccacttaaattattttaattgtgtaagtggactagatcttattttattttcttgttatatgacttcttaacaatattaaatgtctttccttaattgagatcaagatttacttattggtggtattgattaaataagaaaaataaaggttattttaatcttatgttttataaattaagtcctggagcagttctcaaacttaaatacattaggatgacctgggctgcttgttaagaatgtaaatttttagccaggcacaggggcttacatctataatcccagcactttgggagggtgaggcaggtggatcacttgaggcaaggagatcgagacaagcctggctaacataacaaaactccatctctactaaaaaatacaaaaattacctgggcgtggtggcaggcacctgtagtcccagctactcgggaggctgaactcaggaggcagaagttgcagtgagccgagatcacgccactgcactctagcctgggtgacagagcgagactccatctcaaaaaaaaaaaaaaaaaaaaaaagaaagaaagaaggaaaagtagattttttttgaactccctttccttctcctaccttccaatccccatcagagaatcctatgtagtggacttgatatggggccctagaagtttctgaaggaggaaattcctgaatcagaggctgggaaggagaccaaccccatgtctatttgagaaaacactcattgtgttcagcagcaaagcctgtgactttttggatgacaattaatttcatgttttgttttgacttaaagagaattgataacggtgaagctttattttagaagtagaggcaacacaattttgctgtggaaaatttcttgtacttcactgctgcagaggaaatagcaatgtgccctagtggttctgacctctttaaacagggttattgcacagattgaaaacaacagaacaatgaagctaaattgctgtcatactttgtgaaacacagatcacaggaaacttccctggtctaatggaaactgtactaaaagtaagaagcagtaaagttagcttaatttgtaaacagtactacatgacatgggcttatgcagttacacaagtgaaatcctttttcatttgtctagacagtagtgttgacttttgttatattagatactttacatgtaagaactatcagctagatgccaatgctatataaagcaaacaaactggcagtgtataatatagagtacatttagctcaggggtcaacaggctgtggcccataggccaaaactggttcactctactcgtttgtgtatggcctgccatatatactgagaattgttttacttattttaaaaattatttatttatttatttatttatttgaaacagggtttcattctgtcacccaggctgaagtgcagtggtgcgatgacagctcactgccgtctccatctcctgagctcaaacaatcctcccacctcagcctcccgagtagctaggactacacaggtgcatgccaccatgcccagctaatttttaatttttatacagaaatggggtttcattgtgttgctcaggttggcctcaaactcttgagctcaagtgatctgccgtctcagcctcccaaagtgctgagattacaggtgtgagcctctgggcctagtctgttttacatttttaaatggttggaagaaagtaagaatattttatgacaygtaaaaattacctgaaatgcaaatttcaatgtccataaagaaagttttattggaacatgaccatattcatttgtttatttattgtctatggatgctttggggcctcaatggcagagtggaggtgtttcaacaaagaccatatagctttgcaaakcccaacakgtgtatcactggctcttccagaaaaaaatctatacaccttgatttagctcactcctctcctaaaagactgacattccctggaatggaggaagcttagagaccagaatttcaacctctttccatcttwaatccactttttagtttgttttttatttttctgagagactttcatgttcagatttttagttatccaaaaaactgaagaagaaacaacttcctaatttctcaccatattctgttgcagaaacatgtggaattcattcaaaatacatgagagctatgtatcctaccaaaaccttcccaaatcattacaccattgtcacggtaagtgcttgacccagtggtaagacaggccaaagaccagaactgaccacataaacagacatgtttgggcaggaactgaccgagttctgtgacttacccttctgaagcacatggggggatagttcatggctgaattcaggctgtgaaggaatggctcaatatgaggccagtccagggctgtgaggaatgaactatgaataagtgtccagcattaggttaattcacctgtgtcgagccaaaaacagamcctttgatgtgagaaataccattttcctctgatctttcgattgccctttgtttatctgagggtctgctgggaacagtaggctatatatagggacaactactttgatgtgggaaattttgttctttcctagtcttttcattacaattaacttgatagaacttctttttcataaatgaattcacactgtctacatctctttagataaagcaataaaagcaagtgatataaaaaagatgtaggtagaatgtgtgaaaagtgtataaaaagatgtaggtagaatgattaaaatgagctcaaataaaaattaaattatttaagatagatagatttataacacattttaaggcatcggctgcctcaaaggatatttgtgtcttcattactttgagttttaatcttttattactatggaacagtaactatgacatttacattttaacccccacacaaatgtatgtatgtattctcattacttgcagattctgtatttgtgggtttgcttactcactaaaatttatttgtaacccccaaatcaataagtatagtgcatttgtggtcatttgcagccatcacaaagaagcacaaaaagttgagttgcccaatgcttatattcctagctaaggtctaaccaggagacattctgctttcttgttttagctgtcatactataaacaagtaccattttcacaatctcactgtctattgaatgccatactttttatattctcatgcttttttgggggtgatttcactggttaaaattgtccccttgcatagtgctgatgtggtttctggtgttcctaagagcaagaaggctatgaattgccttacagaggaaatatgtgtgttaggtaaactttgctgaggtatgagtgatagtgaaccaacaatatacataaataatgtgactttaaacaaaaacactcataaaagaaggttatgtgttgatcagaagacaaaaatgtcgtaatcagaggctctcaggaacctaactctctatttttcctaggagcaatggttcagtaatcattaatttagtgttcatgacaactttatagaatataactactacgaataataataattgactatatatacataaatatataccatatatacatatatgtatacataaaatagggattatgcacaaatgcaattaatttactatttatatatttttatacatatatatgcatatatattcatatacataaaaatgttctaaaataatgaccctaaaatctataggcatttaatgaaaatgtgtggaatgattaaataaatatgtgggattggattaaataaatgattggatggataggtgggtggatggcagggaagatggatagagacttggcaggctgcctttaaaatgctggtagcaccctttaattcaatttagccaggatatttgatatacagaaagcttctatctagtaaattccttgctattattgataatataaccagtggctaaccattattctaatatgggaaactttaacaaacagttaattaaacagttattaagcacacaaaagttatattaacaccatcagcacaagctatcagcctaatgtcacttatttgctgctgtaaaccataatagaactagaaaaaatatatatatatacacacttggccctccatatgtgtgggttctgaatccgtggattcaactaactgtggattgaaaatatttgggtggaatcaacctaaatgcccatcaatgacagactagatagagaaagtggtacctatacaccatggaatattatgcagccataaaaaagcaagctcatgttttttgtgggaacataaatggagctggagactatcatccttagcaaactatataccacacattctcacttataagtgggagctaaatgataggaacttattaacgcaaaggggaaacaacagacrctggggtctgcttgaggcaggagggtgggaggagggagaggagcagaaagtataactattgagtgctggcttaatacctgggtgatgaaataatatgtacaacaaacccctatgacacatgtttacctaggtaacaaaccttcacatgtacccccaaacctaaaataaaagtggaagaaagagagaaagaaaagacagacagacagacagamagaaagaaagaaagaaagaaaatatttggaaaaaaattgcgtctgtactgaacatgtacagacttttttttgtcactattccctaaacaatacaacaatgattgacatagcatgtatattgcattagctattataagtaatctagagatgattaaaatatataggagggtatgcataggttatatgcaaatcccaagccatttactagcagggacttaaacatcttctgattttggtacctgagggaggtcatggaactaatgccctatgaaagccaagggatgacaatatctcctgatatgtaagttcaggtccaggtgttttacattgaaaggtatatagtacctttcytaggtatgagtaatagatcgtgtgctattttaatttaaatttctattttactaatattttatcttacatctyttttgaaattatcattttagggcttgtatccrgagtcacatggcatcattgacaataatatgtatgatgtaaatctcaacaagaatttttcactttcttcaaaggaacaaaataatccagcctggtggcatgggcaaccagtatgtagcattctacacgtcgcaactgaagtaacctccatttctcagtgtgacaggaggacactcttctcactcagtggagcaagttctatgtcacccatctagtttctaagggctgagggtgcaaaggtgttttaccactatttgtaacttgaatttttaaaacatttatggttgttaactcaaataggtatgtttaaacttggatattgggttataaatgtatccatctggaagttactcagaaagattatctgttaatgtttttcctcattttgttttgtaagtctttttttttttctttttttttgagatggagtcttgctctgtcgccaggctggagtgcagtggtgtgatctcggcttactgtaacctctgcttctcaggttcaagcacttctgcctcagcctcccgagtagctgggactacaggcacgcaccaccacgcccagctaatttttttgtatttttagtagagatggggtttcaccatgttggccgggatgatctctatctcctgacctcgtgatcctcctgcctcggcctcccaaagtgctgggattacaggttgtaattcttttaaagggagagaggaaccatccaattttaccagtttgattgctacgtttttgatttttgaggcagattcttagataattatatcttttaattactacaaagattaaaatttcaattttaatacatgttgcaactattaatcttgtttagtttctagtaaggtacaccatttctacccaaagtaattactgactttcgcttatcctaaattttcttacagatgtggctgacagcaatgtatcaaggtttaaaagccgctacctacttttggcccggatcagaagtggctataaatggctcctttccttccatatacatgccttacaacgggtagtgaagcactttcagatattctcccagctaggcagaaatgatcaagatgttttctgtcttaatcttggtggcaattctattaatccagttgtttaagccaaaaatcttgggaatcaccattgattcctttcctttatgtcactcaagcagtctctcagtaaatgcttttggctgtaattaaaaatctatgtagcctgagaactttttattacctctagcattaccactctggttcgagctgtcatctcttgcctgtattaactgcagttgcctctttactcatctctgcttcttatcctttataatctagtctcatcccacccaccagagggattcctttaaaattcaagtccagccaggtgcggtggctcatgcctgtaatcccagcagtttgggaggctgagatgggctgatcacctgaggtcaggagttcaagaccagcctggtcaacatggtgaaaccctgtctctaccagaagaaaaaatacaaaaattagctgggcatggtggcgcattacctctaatcttggctactctggaggctgaggtgggagaatagcttgaacccaggaggtggaggttgcagtgagctgagatcaggggctcctgcagtgtagtccagcctgggcgacagagcgcgactccgtctcaaatgaataaaataaaattaaataaaataaaatgcaagtccaattatggcattattttgcaccaaaaacttcaatggccccctgtgtcactcagagtaaaagcttacaaggccctgtgtggcatgacctctggtgtccccttacctctcagacctccccttctgctactccctcgggtgctcactctgaactcgttggtggacttcaacatgctagacttgcttctgctgcaggacattgcactggctgttcaccctccctgagatgatttgctccatggatccgaatgcctactctttccctgccttccagctctgttgaaaaattaccttctcaatattgtcttaccccagttatacttaagatttaaaatttcaaaccaccttcatctcagttactctgctctagtttttttttttttttggtccacaacatttatcaccttttaatacgctatataatttatttttatattaggtctattgtttggtacttgtcttcctgcattagaatgtaatctttggtttcctcactgatacattctgttttgaatgaacaaatagtatccagcaataaatgttcaayatatgcatatgcatacatttttaaaaattgaatgaatggatcataatcaattgtcttttattttagttaggagaaactgaaagagagaagggtggggtgaaataaaacaatctacatttcttttatagtgccgcaagtgtatctataaacagaaatccctttgaataatactgaataccttccagtattgtgattatataggaacacaaaatgggtagctgaagatattaamctttctgaataggaatgtaatggagttattcttgatttgattcattttaaagaattatttctaccctattttttcagaagtgtcccatttgaagagaggatttctacactgttaaaatggctggacctgcccaaagctgaaaggtaatgtctagtgtcagaaaagtgctggcatagtggcatatatatgsgtaaaaaatgaagtttttttttttttactttaaattacaatttttggctattttcgaaacgacgtggcattgccttataatggacacttttcatgaattattcctggctgggcagggggtctcactcgtgtaatctcagcactttgggaggttgaggcaggaggatcacttgagcccaggagtcccggaccaacctggacaacacagtgagatactgtctctaaaaaaatgtaaagaattagctgggcatggtggtacgcagttgtagtcctaactacttgggaggctgaggtggaatgatcacttgagcccagaagtttgaggctgcagtgagtatgatcatgccactgccctccagcctgggtgacacagtgatatctctctcaaaaataaaaaaagaaattattcctgggagctagtaactttttgttttcgaaaatgtggttgacattattgaacaacagagatagagccagcaccagagatcagaggcaaatatcacagaaccagagccagatatggaatggagcagagctgggagcaggcctgacactcagttataaggatagactccaagagcacaaggtgctccatcaagcccatacccacagattggagtgagggaaggctaatcaggagctccaggtaaacagtgcatcagaaaccagacaccagaagaaagaacttggtataacagaaccaagaatcagcaaaaagtcagaaaccaggaaacagaaaggactgggacacaccaagagtggtcttaactgcaagaacaaaacagagtttcacaataggggcgtaccactgcttgtatctgggaaggtcttatttatttcccgttaggaaacctatccttgctggagccaagtagaactactgggtctgaacaaggaggaggaggttagagagaaagaaaaggcaatggctagcaagcccaagatctacaaaatcccccaatccagcctgtatgtttatagcaaattgataatatatttctgtttcaattttacccctagacccaggttttataccatgtattttgaagaacctgattcctctggacatgcaggtggaccagtcagtgccagagtaagttgttgttttcttaaaagaaaaaaaaaaatgtaaaatcatctaaccctaacccacaaaacaagatagtattctttaacttctactgagcacaaatgtatttgatacatacacaagaagatcaaaatagttaaaggtataaaagggatgccatggttcaactgcctacttaaccataaaatagttgaaattctagaaaggacaactgccttattaactatatattgaatcatttgaaaagccctcattgaatattagatgtggcactgttgttgcatataatgaaaacatcaaggctagatactatacaagccaattcatactaatgtggtgcatttcaggctaagtcacctgcaagtccactgtggtatatccggctgtctactccccgacagttcagttataagttccttataattggatttaacatgttattgcctcaggcagagttgtttcccttctaggctcccattgtcattgaagtggactctctaatatragtttattcattatctaggccattctgttatgattttactacacaaacatagtccttaaatattgcgtttaacaaaacaagccattctgtcttctaaactccgctaaagcctctattgtcttggacacagtggaaagatgcaaaggctgccatgaatgtggcatttccccaccccatggaaactcgttgacaattgtcctcaattggaatgcaagcatattcgctctggcagcatgcctttgcaatttctcagaaaagctttttttaaattccttcctattaggccaaaatgattcctagtatagggacttactcaagcctcaccacttttaagccttgggcctctgttgtattcctgcacagcgctagactgtatcacagaattgtatgccttttcaggttactctaagcgtgaactatctaaaatatattcaccatgccttcttttccctttctttctttctctctttctttctttctttctttctttctttctttctttctttctttctttctttccttccttccttccttccttccttccttccttccttccttgcttccttccttccttccttccttccttccttctttctttctttctttctttctttctttctttctttctttctttctttctttctttcttttcttctttctttctttccttttttgagatggagtcttgctctgtcacccaggctggaatgcagtggcgcaatctcagctctctgcaacctccatgtcccggattcaagcagttctcctgtctcagcctcttgagtagctgggactacaggcatgcgccaccacgctaggctaatttttgtatttttagtagagacagggtttcaccattttggccaggatggtcttgaactcctgacctcaggtgatccacctgcctcagcctcccaaagtgttgggattacaggcatgaaccactgcacccagccattcttttctattttaactgttagccgtgtttgatatgatttgtcctttgagaagggacactctatttgcattcattgcaccttaggagctgacttgagattaggtaccatgtcctttttttttttttttttttccattcagtggtctagttcaaaacccaagtacattttaagtataattttgaaaagtgctgcaaaggaaaagatcggagtcccccaagagatctatctaggcagtctcaatctagtctagagtagggtgcaaatttgggctggttaggagactctcctctgagtgacaaaaaggaaacagaatttgcaagtggtcttattgaggaaagagctgtgcacataggaggaacacataaaatgaacaaatggtctgacaaacaaatggctagatggctcagcaagtagacagcgtgatcatggtaagaataatagtagcagctcacccttatttgtgttctgctgtgccagagctgttggacaagctatgagaattatctcccaccaatgtctgcagcattgtgtaacagggaagagggctaagaggaagcccagagaaggagtcaggcaccaatcctgcagggccttgcaggtccttgcagtctagaaaaagtacaataagaagcattgaagcattgtaataaaggaggtgacaggaccagatctatgtgtatttagagatcacttttattgtgtaagaggaatgagttggaggaagcaggggaaagtggggagagacaggttagctttcccaacattccagaaaagagataacagtgatttggactaaggtagaggcaaacattgtggatggaagaagatataactgagattcttttaggagatagacttggcatgacttaatgtgagttgggtgagggggttgggggatcaagattgatttcctagtttctatcatgtgccagcaggtggtcccatttatattaataagactgctaaagcagggtaagtttggggagatgcttgttttgcaattgaggtgcctgtgatgtccaaatgaggatgtccagaagacaaataaatgtggatttaaagctcaaaggaggtgaagatctgggatatcggcagcatatagatggtgcacagaagtggagatggcctaaggagaaagcaaagagagaaaatagaagggttaggaccaactgtcacttaaaacttgagaagaagaggcaaatgaatggaagtagagattttctgactttcttaattattattgttagttttaatcgcatacctttattcagagttaatatgacttataaattgacagtaaaaaggcgattttagtttattttggcccattcactaagtggaaaacttatcactcaaacttatcaaagctactcaattgttgcccattataggaatttcttgtttctttcctttggttgggtgagagttgggaactggcatttcacattctatggagtgtgtacttcatgacagaatctgggttcaagaaatatgtaatgatttgggttgcatgatccctttcctgtgagaactcatgctctccttgagaggcagacaggtacacagatgatttcaaaactgtaaagagtccaatggcagccatatgccagggtgctggcagaggacagaagaggagggggttcttggtgtggttgggggagtgaatcagatgactatgtaaaaggaacgttatgtcatgacaacaggtggaaacagtaactctcgctggcaaaccaaagtgcaggtcacactaagactgaaggccaggaaagcatcttggagttgatgatggattgagctgtagatagagagtggcttgtgttcaagtcctgctctgtcccttattaactgaaggactgtgaacatgtcacttaacttctttaaacctcaagtttcctgacctttacaactgactgttctggtagcactttccatgaatatttgctgtgaggatttcaagagataatgcactaaagaccttaactctatcaggcttgtaaaattccttctcaaaaaaagaaaaagaagaggcaatcattgttataatagtactctgagagataagacatttctttccccaatccattgctattatgctttcttattcactggaaaaaaaaaaacacagaaaatttacatcagtgaaatttacttaaactttatattagttccatgattatattcataaagtgtagaaaattaaaaaacacaaaggcagtgagtataaacaataaaataaaaatgaactccaattctactatttagagacaaccactgtcaatagtactttgatatatttccttatagttttctgtgtatgcatgtttactaagaaatgctaaatatatttcaaaacaaaatcaggattatgcaatatgtatacagtttggttttcatttttattgcttaacattgttttgtgactattttcctatgccattgttttttgtgggggatggggagagggagttttactctttcacccagactggagtgaagtggtgcaatcttggctcactgcccccctggggttcaagtgattctcctgcctcagcttccctagtagctgggattataggtgcctgccagcacgcccaactaatttttgcatttttagtagagatggggtttcaccattttggccaggcttgtctcaaactcctgacttcaggtgatccacctgcctcagcctcccaaagtgttaggattacaggcatgagccaccacaccctgccccactgttctttaaaagtatcttttcatggatatagagtaagtcttcttaagaatgtgtcatcatttacttttccttgtggccaagcgtgtcagctcacacctgtaattccaacactttgagaggctgaggcaggaggatcacttgagcccaggagtttgagaacagcctgggaaacttaatgagatcgaatctctacaaaaaattaaagaattagccaggcatgatggtgtccacctgtggtgctagctactcaggaggctgagacaggaggattgctttagtccataagatcaaagctgcagtgagctgtgattgtgtcactgtactctagcctgggcaacagagtaagaccctgtccctaaaaataaataaataaataaattatttttccttgcatttaaattataaatcagtaatgtgatgactgtgtttgtatgcaagtctccatttgtactccaagtgttgacttaggacaaatgcccagaagtagaatcgttgagttgcagatgctctttttaactccctggaaacctattgtcacatgaccctctggaatgtatgtgacccttaggctgtcttagaagtatctgtccactcttctttctaactgagagcatcgctatgaaaatttttacagttgaatagtgttagttgacattcaacatggtttcatgtatttattggccagcagtctatcttcctttgtargaagtatgatttagatttttgtttatagaaatttagggaattggtatttgatgaatatggtagcatgggtgctagtgctgggctctgaggttctgtttcaaaaccagcaatttcagagatggagatgtgtttaatttttacttcattagataacggtttggctaattaagacaactcattaygacaatcttaactccaaattatttttcaggtaattaaagccttacaggtagtagatcatgcttttgggatgttgatggaaggcctgaagcagcggaatttgcacaactgtgtcaatatcatccttctggctgaccatggtatgcttttaaaaaacattcttattttatcattgactataatttatcacttcagaaatcatacacaaataatagtgatattttaaaatctctacttccagacctaaagtctcttgaagaagcaaggaatgaattgtggtagaatgtgatgaaaagaggactacattaaattttctagtttaattattctgatacccctgaaaacctacccacagacactatgttttgtaaaagtagagttaatgatatttaacagggatgtggttgggtttttattcaatctaaaaagtgctttgggaccttctttccagccatgattcgtttatgtagattggctgcagtttactgtaattggcaagttttgccacaccgtgtgtatttttttttagttatgtaaatagatgtgtgtttattcatagcttttcatctttaaagttactgtcacctcacatttctctacttgaggttaactcttgattttggttaacctgaatgttaaaggaagtgaaacagtggagacaccctctgccacctcacgcaaaatgcattcaaacagttttgaagtacatatgcactcactctacaggtttttttttttttttttttgagatagagtctcgctctgtcacccaggctggaatgcagtggcccgatcttggctcactgcaagctctgcctcccgagttcatgccattctcctgcctcaacctcttgagtagctggggttacaggcgcccaccaccacgcctggctaatttttttgtatttttagtagcgatggggtttcaccgtgttagcccggttagtctcaatctcctgactttgtgatccgcccacctcggcctcccaaagtgctgggattacaggcgtgcgccacygggcctgtcctctacagatatttttttaagtgcctactcaatgataggtactttcctagatatggagtagatccttcctagctagggtggtcaaactgtcttcttgaggaggacgtttaaagtcaagccccaatatctgtgaagagaccagccatggggcatgaggaagaaaaatagtgtgtctgcagaacttttggtcgtattttagagcatccagataatgggaaacatagtaatgtatttttaaaatttctaaggtagttctctaacactttgccttattgttttaaaattaaatggaaacttttgatgtacattttgttaaaagaaattaatgaaaataataatttatatgcaagccaggcaccatggctcaggcctgtaatccccgcactttaggaggctgaggtgggtggatcacctgaggtcaggagttcgagaccagcctggccaatatggtgaaaccccatctctactaaaactacaaaattagccaggtgtggtggcacatgcctgtagccccagctacttgggaggctgagacaggagaatcacttgaacccgggaagtggaggctgcagtgcagtgaagcgagatcacaccactgcactatagcctgggcaacagagcaagactctgtctcaaaaaaaaaaaaaattcatgtgcagtctgaaaaatcttcaaataaaaaaggttaactaccaaatctttttatagcacgtactccttatataaatttaaattactttatactttttttttgagacagaattttgttctgtcacttaggcaggagtgcagtggcacaatctcggctcactgcaactgccaccttcgaggttcaaatgattctcgtgccttagcctctcgagtaaatgggactataggggcatgccaccatgcctggctaacgtttgtattttttggtagggatggggtttatcatgttggctaggctggtcttgaactcctggcctcaagtgagttcccccctcagcctcccaaagtgttaggattacaggtgtgagccacggagcacagccgaaataatatacttttaaaggtaaaggttatttccattaatctattatacattgaacaaatgatctgtttatgatacccatctgttcttccctcaaacatgacccttctccactgccacaattttctgccagagtagagtaatagggtgaattgcgtaaattctcagtgaagcttagtttgagatctgtaacataaaatgtcttctatttgacaagacagaaatcaaccgttgccatttatatacattcagtgggttattatgattatttttttattcaggaatggaccagacttattgtaacaagatggaatacatgactgattattttcccagaataaacttcttctacatgtacgaagggcctgccccccgcatccgagctcataatatacctcatgacttttttagttgtaagtatgaagacacctatatgaaaaaaagggtaaacctgaaagtgaataaccatagtccactaattctgagaggaagttggggttatcagaccctctrctgacttcttgagaagaccacagagaaacaagtgggaaattcccatgcttaagtacagtctataaagtctatggtaatatctaatattgttaggttgaaatatatcctactcagttctaaatgctaaaataattctttgcttgaaataatttttaatataattttaccagatcacagttattaataagtgaatgtatcaaattcacctgagtggttcacattctttgcatttgttcgttatcaattgtaatgtcatttatttctttttcttttgaaacagttaattctgaggaaattgttagaaacctcagtgtaagtatacaatactcttaatacatatatttaagttaatgcaatgaccttaatctgggtttttgagaaattcatattgtatatttctaaatctaagctacttggaatttatttytaaaccttccatcaacattattttatrtgcatattagttgcttttatcttagttgttttcattttggagctgacacatccacagaaattagcttgcagtaatagtagcactaaatactggcttatattgaaagggctgatgtcccawtcaaaagggttgcrttagtgagcttcaggtagcatcgtctttctcattttttgtgtgactaatataagaggatagtgaattatacctcttwcagatcttttttttacaagtcaaaaagataatctctttactcactaagtataattgcaactgctttcgattggttcccacatcccaaattgtaagtaaatgagtagagaaacttccagatatcttaaagcaatatttttggaagtacaattcactactcctggagagacctggaatggtcttctgtaatagttttgttatttatttatttatatttattttacctttacaatgtttgcctttattaactttttttaaaaaattcaactttcatgttagatacagagggtacatgtgcagatttgttacatgggaatattgtgtgagtctgaggtttggaatatggaacctatcatcctggtagtaagcattgtacccaataagtagttttttaacccatacacctcctcttccctctagtagtccacagtgtctattgttcccatacttatgttcacgtgtgttcaatgtttagctcccacttataagtgacaacatgcagtatttggttttctgttcctgcattaatttgcttaggattatggcctccagctccattcatggtgctgcaaaggacatgatttcattctttttttatggctgcatagtattctatgatgtatatgtaccacattttctttatccaatataccattgttgagcacctgggttgattccatgtctttgctattgtgaataatgcagcaatacacatatgagtttatgtgtctttttggtagaatgttttattttggtggaggggtatatcccyagtaatgggattgctgggtagaatggtatctctgttttaagttctttgagaaatctctagactgctttccacagtggctggactaatttatacttccatcaacagtatataagtgttcctttctctgcagcctcaccatagcgtctattgttttttgactttttagcggtggccattctgactagtgtgagatggtatctcattgtggttttgatttgctgacaaaaacaagcaattgggaaataacataataaacggtgctgggataactagccagccacatgaacattgaagctggacccctaccttttgccatatataaaaattaactcaaaatggattaaagatttaaatataagacctcaaactataaaaatcctggaaggcaacctaggaaatactcttcttgacatgggtcttggcaaataatttttggctaagtccccaaaagcaatkacaacaaaacaaaaaataggtgagacctaattaaactaagagcttctgtatagccaaagaaactatcaacagagcaaacagcctacagaatgggaggagatattcacaaactacaacaaaggcctaatatccagaatctatagggaatttaaacaaatcaacaagcaaaaaacaaataaccccattaaaaagtgagcaaaacaaatgaacagacacttctcaaaagaagacatacaagtagccagcaaacatgttaaaaaatactcagcttcactaattctcagaaaaatgtaaaccaaaaccacaatggaatagtttttatagttatatatttaaaatatattcacaaatatttatctactacatgaaattcatgacttcactattgtttgcaatgcgactgtaactatttgagtatgggggtatacagttacaggcttaccttgcttcactgcattgtgctttctagatgttgcatttttttaccaattgaaggttttgtggcagctctgcactgagcatgtctatccagtgctattttttcaacagcatgtgcccgcttcatgtgtctgtgtcaccttttgttaattctcacagtacttcaaatttttcattattattatatgtgctctggtgatatgtgatcagttacctttgatgttactattgtaattgttttggggcaccatgaatcctactcatagaagatggcaaacttaacagataaatattacatgcgtgctgattgctccacaaactggctgtttcccgtccccctcctcgcttctggactcttctattccctgaggcataacaatattgaaattaggccaattagtaatgctacaatggcttctaaatgttaaagtaaaaggaatagtgacacatttctcattttaaagcaaaagctagaaatgattaagcttaatgaggaaggcatgttgaaagttaagatgggccaaaagctaggcctgttgcatcaaacagttagccaaattgtcataacaaaagaaaagttcttgaagaaaatgagaagtgctattctagtgaatacatacataataagaaagtgaaacagcctcattgctgacatggagaaagttttagtggctggatagaaaatcaactagccacaacagtcttttaagccaaaacctaattcagagcaagacgctaactctttcttcaactttatgaaggctgagatgggtgaggaagttgcagaagaaaagtttaaagctagcaggggtttgttagtgagatataaagaaagaagtcttctggccaggtgcggtggctgacgcctataatcctagcactttgggaggccgaggcaggtggatcatttgaggtcaggagatcgaaaccagcctggccaacatggtgaaacccgtctctactaaaaatccaaaaaaaaaaaaaaaaaaaaatagccaggcgtggttttgggcacctgttattccagctacttgggaggctgaggcaggaaaattgcttgaacccggaaggcggaggttgcagtgagctgagatcacgccactgcactccaacctgggcaacagagtgagactctatttaaaagagagagagagaaaaaaagaagaagccttctccataacagaaaagtgcaaggtgaagcagcaagtatttgtggtgacatagaagctgcagcaagttatccagaagatctagctaagatcattgatgaaaatggccacactaagcaacatattttcaatgtagaggaaacagccttccattggaagaagatgccatctaggactttcayagctagagaagagaagtcaatgcttgacttcaaaacttcaaaggacaggctgactctttttttaggggctaatgcagctggtgacttgaaattgagccaatgttcattctgaaaatcctagggcccttacgaattatgctcaatctactctacctgtgctctgtaaatggaacaacaaagcctgatgacagcttatctgtttatagcatccgtttcctgaatattttaaactcactgttgagactttctgctcagaaaaaaaggttcctttctaaagattgctgtttattgagaaagtaccaggtcacccaagagttctgatgaagatgtacaaggagatggatattttcatgtctgctaacacatctattctgcaggccatggatcaaggagcaattttaactttcaagtcttattctttaagaaatacatttcataagactattgtcataaataaggattcctctgattgatctgagcaaagtattataaagtgaaaaccttctggaaatgattcaccattctagataccattaaaaacatttgtgatttgtgggaggtcaaaatatcatcattaataggagtttggaagaagttgattccaaccctcctggataactttgaagggttcatgacttcagcagaggaagtaactacagtcgtggtaaaaatagaaagagaactagaatcagaaatggagcctgaagctgtgactgagttgctgcaatctcatgagaaaactggaacagatgaagagctgcttcttacggatgagtaaagaaagcggtttcttgagatggaatctaaccctgtgaagatgccataaacattgttgaaaagacaacaaaggatttaaattattccataaacttagtggctaaagcagcagctttgagaggacttgagaggattgactctaattttgaaagaagttctactgtgggtaaaatgttataaaacagtttcggatgctacagagaaatactttgtgaaaggcagggtccactgatgcagccaccttcatttctgtctcattttaagaaattaccacagccaccccagccttcagcaaccaccattttgatcagtcagcagccatcaacattgaagcaaggccctctacgatcaaaaaagatgacaactcactgaacgctcagaggatcattggcattttaagcaattaagtaatttaaaattcaggtatgtagtttttagacatagtgctgttgcacacttaaaagattacagtatagtgtaaacatatttatgtgcactgggaaaccaattcatatgacttgctttattgtggtggtctggaagtgagttcaaaatatctccaaggtatgcctgtggagtaaaatctctgaggatggagtgcaaaggactgacgataaacgctgagcaaagagtggttaatataatctgggacccactgcaagtttcaagtagaatgcccattagagcagaatttctttacagtgatgatcactctgtttttctctcaacaccttctagtatgccgatcttgagtaaaaactgtggacattcttgcccaccccttctggtgaagtgtatacttgcaatgtgttcatgctgagtggatgcatagttcagcattttcaacatgtggactctctaaatccatatatggttttctttttgttttgtcacctcatgatccctatagctgaagctctgttggtgaagaagggcaaatctctaataatcccagttgtgcaaggggattgagtatcacagtctttggaaatccattgcatggcatcacagatatggactggacctagagttacaaaggcccaaagaaatgggctaccatttcacatagtccatccttcccaaggaaatatttcatgtggtagtattcccagcagtgctgttccctgggcctatattgagcttattctggacagaattaaccaagcatgaagtggcaactttttaagttctgcagcactctgactacatgagagacatcactactatttattctgagataaaatgtcaaaaacggccgggcgcggtggctcattcctgtaatcccagcactttgggaggccgaggcgggcggatcacttgaggtcaggagttcgagactagcctgaccaacatggtgaaatatcttctctactaaaaatacaaaaattagccgggcatggtggtggatgcctgtaatcccagctactctggagactgaggcaggagaattgcttgaacccaggaagcagaggttgcagtgagctgagatcataccgctgcactccagcctgagtgatagagcaagactcagtctcaaaaaaaaaaaaagaaagagaaaaaaaaaagtcaaaaattgtatctcaactctgtagacttcattccaaattctcaaatgcaaagaatcaccggtacttcttcacaggtaggtagtgagcctccggttttctctggatttactctggctacacaaagtccaggaaagtgtgacaattacacacagggacaaattatagttagtcccttgcatcttgggggaagctgcatactcagcagctgccaggttgtgcctgcctggaagttacaaaaatattggcttaagaaagaagtaatgataaataaaacagtagaagcataagaagcctagaaaatataccaaaataggcaagaaaaaactggcaaaaatatgtttgcaatatatacttttgtttttcttctttcattctataaactctccttgctctcccattgtctatattttgtttaaattttgtttgtgtaaattatgtgcttcatagtttctcttatttttcttatctaaattgaccctgagataatagtgacacacacttgttaatatatatgatatattgtggtttaaaataaatgagaaaatgaggaaataggaaaaatttcgtttcctttgtttatggtttttcttcttgtttctcaaaatggtcatgagggaaagttcctttgtagttctatttctcattacctcatttttcttttacataaatagataccaatgtgatttgcatttctacaattttaaaatatgccatacagtcataattgttaaagaaacaaaattttactccaatttgtaaggaaaccatgattgttttacaaatagggagactataataggtttcaaaagccattgacttgatcggaaaactaagcaaatgtaggttatttaaaagataaattgagtctgttggaaagtacttttttgtgcaattaaactactttttaatttttttactcatatctactaatatggtatatatatttatatgtaatttagactcaaaagttgtcattatcactctaaatctagatgtctgtccattttctgttaaaaaagagggtaattcatagtggtttaatatatatataatatatggttatatatattacatataatatataaccatatataktatatattatatggctatattatatatgatatatgatatatggttatatatgatatatggttatatatgatataatatgtagttatatatgatatatgatatatgatatgatatgtatatatgatatgatatatatgatatgtgatatatatgatatatagttatatattatacactatatatgatatatagttatatattatacactatatatgatatatagttatatattatacactatatatgatatatagttatatattatacaactatatatgatacagttatatataatatatatggttatatatgatatatagttatatataatatatatgtttatatattatatattatatatggttatatattatatattatatattatatatatggttatatacacacacacacacacacccccaggaataaaaactgaaaacattaactcataatttaaatcagattttttatttttttgagagagtctcactctatggcccaggctggagtgcaatggggtgatcttggctcactgcaacctccacctcctgggttaaatcagatttttaattgcaacctgattatcattgcaacggcaaaactaataactagggggatctgactacattgataataggtttaatattcctattgtattagccaagctgaaatccccttacttttaaaaggtgcttcataaattgatgtagaagatgaacttttaaaattaatttgcatatcttatgtatcataaagaaatatttacttgcttttcagtgccgaaaacctgatcagcatttcaagccctatttgactcctgatttgccaaagcgactgcactatgccaagaacgtcagaatcgacaaagttcatctctttgtggatcaacagtggctggctgttaggttcgtgtatctgtttacttatctcataatgcctttaataaccatttgtcattataagtctacttaaccttaccctgctattatcatcactgtgaattttcctgagcattgacattttctkgcctttttgtatgctatttagcagttctgcatttgaagtgatcgttattagattrctgattttagcatccttatcttaacaatatagatgagaatgaggagtaaggctaagagtgtgcccagggactgtaagtgccagcaccttcctacccccactatgctgtccattaaggcagcagacagatgatatcagctgtctttcagcctgataatgagtgattgattacacaactctttaagacctttgtcatctttgtggtttttataaaagagcacatatagggctgtaagaccaagctaatgaattagttgtaacatttatttcttattactatttataatggtaatttatgttgattattgaaacatttgcaaaatttaaatgtgcttagagaaaacagaaaccacttttgactttgtgcatgctatttagcagttctacatttcaagtgattgttattagacattatgactcactccatcttaaataaccaattaatccattgattcaacgttttattttatgcttgccatgtatgcaccaggccctgttctaggcatttgagatacagatctgtctcctgctctcatgtactgtagtggagaaaactgaaaataagccagtaaacaaataaatatacactttgtgatagctgataattcctatttttgtatttcataccagcacttttttccttatgcataagtagatgtaaaaagtatctggactttatggcatttttctagcctatttaatatgtatgaatgtaatgccagggggatagaatgacaatggcaatacagtggctaagagatatgtttgacaaagaaaaaggagatgacactttgggaggccaatgcgggcaggtcacttgaggccaggagttcgagaccagcctggccaacgtgaagaaaaatacaaaaaattaataaaaatacaaaaattagccaggcatggtagcacctgtaatccaagctactggagaggctgaggcaggagaattgcttgaacccgggaggcggaggttgcagtgagccaagatcgcaccactgcactccagcctaggcgacagatcaaattagtatttgattccatcaaaaaaaaaaaaaaaggaaagaaaggaaaagaaaggaaaaggagatgaaagaacacaagggacaagggacaagggaattaggctccaacattcaggatcaggaactggggatttggctaagcctattctgtaagataacctggaaacccctgttgggcctgagagtgcagtttcacactggttcactagatggtgctgacccctctctttgggatcgaagtttattagccctttgtgtagatgggtggctgtactgtggctcaggacattctctagaaagtattttccttaaatatgtgaacaaaattaagctctactaatattaagtacatacaactgttagtaatttaggtatgtaatatataaataaatatatgtccaagttggggtacattctccagatatttactgttaaaagtctaacaccaaacaagttaggtcactggtacagaaggagaaagagctgtaaagtgagagctcgcccacccaaatacctctgggtatcatgtattaatactcaatctcaaatggtgagctgtttattcttttaaaaaccagcactgaaatgttaaaagaactgcaacccaagagttcatggccaggctccccacatagctaggttgtgggaacttggaaaaattaatatcttagagtctaatttttctcatctgtaacacaagattagcctagttttattattttcttgccattaacatacaaagtaaactaacttacatcaaaggaaattttgaatacagccttaacaagagagcaagtgaagaatctaatctgggccaggcacggtggctcacgcctgtaatcccagctctttgggaggctgaggcgggcagatcacaaggttaggagtttgagatcagcctggccaacatggtgaaaccccatctctactaaaaaaatacaaaaattggccaggcatggtggcgtgtacctgtaatcccagctactcgggaggctgaggcaagataattgcttgaacctgggaggcggaggttgcagtgagccaagatcgcaccactgcactccagcctgggcaacagagcaagactctgtctcaaaaaaaaaagagaatctaatctgattaaatcctgggttcactctctccaactcttaaaacacaagcctccagctacttattttctagtgaaagtacatcatttttagtaataatgtgcatcatttgataattaggttaggtcccctttgtacaattawagcaaatttcaacagtttgtataatcyattttcatcatcatcatctttattttacctaaaatgtgttagatyttactaatttggggaaacctgatgttttgatatagtagaagtattaagtgcttttttaaaagaacatgaatgttagcttttaattttggatcagcaactgacaaataaatttcaggcacctttttaagaactagagataaccaacaaagtacctgaccaaaggatctttgcccaggtaggaagataacagctataatcagatgggataactattgcactagaaccacgtacaaggctcaaggaagcaaaaattacagacccaggtgtgaatgtcaaggagcatcagagaatgcttcctggtaggggtggttgctgatcggggtttggaagacttatgatgggataggatacgtgttgccatacagcaggtctgccctgtgcagtctgtcggttgtacagtggcatcctgccaacaaggtgagtgggagtggaaatggaatctttgctcagctcaccaagccttaacaggggctgcattggcaggaggaaggggattcgttttttgtggttgttgttgttgttgtttttgccaaaagtgccatctgcttgccaagccttgaacactgccaggccgcgtccttcaaaggcacctttttttctctcaatgatctacccagagcaccttttttttttttttttttgaaatggagtctcgctctgtcgcccaggctggagtgcagtggcgcgatctcggctcrttgcaagctccgcctcccaggttcatgccattctcctgcctcagcctcctgagtagctgggactacaggcacccaccaccacacccggctaattttttgtatttctagtagagacgaggtttcaccatgttagccaggatggtctcaatctcctgacctcatgatccgccctccttggtctcccagtgccgggattacaggcgtgagccaccgtgccggcctgagcacctttttaaagccagcagtagctctagggcaaggaagggtaaagagaaggaggcaggtttccagatggaagaactagattcctgcagttgcaagtagttctgcattgctggagcactgagtgtatgaagccatcatgtgtacaaaggaccttgtctgaaatgactaaggagtgtgactttgatcttgaagaaagtaggctgttggtagatacaggtggcttgaggtgaatatagggatatttgcttttggagaggtccttcaagatgctacatggacgaggatggtctagcgcagtggtccccaacccttttggcaccagggaccggtttcatagaagacagtttttccagggtgggggcgggaagggggggtggtttcagaatgattcaagcgcatgacgtttattgtgcactttatttcagttattattacactgtaatagataatgaaataattatacaactcgttatactgtagaatcagtgggagccctgagcttgttttcctgcaactagatggtcctatctgggggcgatgggagacagtgattggtcatcaggcgttagattttcgtaaggagcatacaacttatattccttgcatgggcagttcacaataggattcaccctcctatgagaatctaatgccactgctgatctgacaggaggcggagctcaggtggtaatgcttactgacccaccactcacctcctgttgtgtggcctggttcctaacaggccacagacaggtgtgggtccatggcccasgggttggggacccctagtctagtgtgaaacagggaagcctgttagaaaggtatgtagtgacccattcagccccaagggagcccatgaagccatggggatggtgaaactatatagtgcatcaccgggaaggtattatggttaacttagaagccacagtttctaggatagtcttgcttttatcatattctgtctgatgtttgttctcattagaacatagatttttatttccagcagtgttaaataagattaggggtatgtgtgtgggtgtgtgtgtgtgcgtgtgtatgtgttttgaagggaagattcagaagttctgaaggcaggatgatcaatttgggaaattgttcaaggggcttattagaacctacctgaagggaacgtttttctaggacacaaaacaccggtgcaaatccactgttgaaaatgttctccaatgtctattgtgaaatggagagattttgagttcagctcctttcgggaggggaggaaagaatcctctccaaggcagcttcctctagcagtttcctgcctcttgtgggatgagaagatttgctgtctaagatattatcatatttatttgtattttgctgagttcttttactggatgtaaggcagtccaaatgttatttggaaatctcctatcaatcaatcatgcaatttagatagaagttagttccatacagtgtgatctctgacttgctaaggtttagaataaactcaaagggcaatgtggcacagttattaargtttgagagtatgcccatctgtgctctgactctacacatccactgcgagaagaaacatccatataacrccaaaaacactatatgaaaatcttgttgcacagtaggccacccatcaatattacagcttttctttttcttttgatgttccaggtgacctgcaggaaatgtagaaatcaggaaactgacatacaaaagaaaaagttagtagcaaatggaaacaactttataaaaatataatatggtatatagtataaaaattatactacagtatactttttactttataaaaagtataccataaaatagttttaaaactatttttatactatataaatagtataagcagtataaaataggctgggcakgatggctcatgcctgtaatcctagcactttgggaggccgaggcaggtgaatcaactgaggtcaggagtttgagaccagcctggccaacacggtgaaaccctgtctctactaaaaatacaaaccctgtctctactgaaaattagctatgcgtggtggcacatgcctgtagtcccagctacttaggaggctgaggcaggagaattgtttcaacccaggaggcagaggttgcrgtgagccgagattgcaccacygcactccagcctgggctatagagcaagactgtctcaaaaaaaaaaaaaaaaaaaaaggataaaatagttttaggacatagttttatatctaacatgatatgacactgagttattgtgtaaaaagttattttaaaatataaaagtaaattctttgaactaagacaatgagaaattaaatataaatgtttaagaccaaacttaaacctagaaaaaacatcatctcaaaatgacatgtttcccatggcataagaagctgctacaacttttaagtgtgtaggtggtggattttgaaatctttctagatttttctttcttgagaaatctgggtttatcttgaaaaccctgaattagaaaaattagattgatttcattcagcggcaaacacaggmagatgtatactgaatcatatttcttaaaaatctcaaatttagaagattgtgaggttgaatgaggtcatctcctgaagcttctatagcaggaatgccgatccatgatgaaggacaggattgcatttattttctttagatgatctaccattgaacagtagagacagggtccctcacggtctgtatccaaacagaayccggatttttacagactgatcgaggcataatgctcagaactacatctctttagaggctcactttgcaaggaaaaaagaaatcattctgccctagaagggggctgtaggaagtattcacaatgagtcaattaatatcaagatctcctgttccaggaaactgttactaagtattacaaaggaaattttatgtgctcacataagtttagaaaacactggcttaaagctggtatagaattattctttcctagagaaatatttacagcattcactatgctaatatgaattgtgatccctagacagaggcatctgatgtgaagtaagtctcaaacttatttgactatagaacttatttttaaagtcctctgaagggaccagtgttttgaggaaaacattatgggaggtatgggactggatcaaaagctaatgaggatattgtaaggggtattgtcctggtgtggagtggctgcagcacaacttgaagagatcartttctagaatttcatcccacatctgctgaaatcagtcatttaaaggtagggcaggagatagctccattttaaataaatgtctcagataattctcatgtccattgagggcagaggtcccaccagtgcagagatgggttaagaaccgctcaatgatgtaacttcctaggtcactgtcagtcacaatgccataatccttttcataaagccctttctactcccagcactctcttcaaagtattcttcacttctgagttcctaagactacagataaggggattgagcatgggattaaagaggctgtgaaacagcaggagatatttcttctgctccttggggttcccatatctgggtccaacatacatgataatggctgtgccataaamgagtccaatcacacagaggtgggagaagcaggtgcrgaaggctttcctctgaacttcccttgattggatctgaaggatagcacagaggatgcacatatatgaaactacaattgtggacaagggtcccaccagcccagaaattgctccggccaagaccatgttctcattgatgtgggtatctgcacaggcaagtttgagaacagccamgatttcacaaaaaaagtgataaattttctggggcctacagaagggtaaaggtagaagtaacacaagatgaatcaaggataaaaggactccagtggtccaggaagtcaccgcgagggtgatgcagactctccaggtcatgatggccaaatatcggagggggtggcagatggccacgtacagatcataggacatcaccaccaggaggagacattctgtgacagcaaaagtggaaaacagaaaggtctgcatcatgcggcccgcaaaggagatgggcttggctggatkcaggaggttcaccagcatccggggcaccgtgttgcrggcgtaggcgatgtcgacgaccgccaggtgtgagaggaagaagtacatgggggcrtgcagtctggagtccagtgagatgagccccagtatggtcccgttccccagcagggtgaagacgtagaacagggagaagagcccaaagaggagcatctgaatccttgggccaacgggaaatcccagtaggaggaactctstgatggatgttatattgtcycccatatccctatgacagaggaaatcaagttaatgctcatggtttaggagaagtgtttaaaaacagattcattttaacttgttcggcactctttggtgaagtagaaaagtgttcagacagctgcagtgagtttttgtgtttttaaatgaatgcttcaagacaatttggtaacgctaaaataaatgtttaaaaaatatatgcaggccgggtgcggtagctcacgcctgtaatcccagcactttgggaggccgaggcgggcggattgcctgagctcaggagttcgagaccagcattgacaacacggtgaaaccccatttctactaaaaatacaaaaaattagcccggcgtggcggcgtgtacctgtagtcccagctactcrggaggctgaggcaggagaattgcttgatcccaggaggcggagcttgcagtgagccgagatcrcaacactgcaytccagcctgggtgacagagccagactctgtctccagaaaaaaaaaaaaagaaaagaraaaaaaaacgcrtgcacacgtatacataggtttcttttttattacgttaattttttaataaaggctaaaatttaaaaataaacrtgtcacatattaatatatccttttggtctttttttaaaaaaaatttggctcaggcctttcagggatgaatgtcacatgtcaatgtagtacacagtttttgtttgattcagtgagctatctcatatccttcaaataaattcttcttttccttggtcgtattattcagagtttttctctgytatgtttcagaaacaatgaacactaactgatacacatgtcaaagtcttaaaaccacattaagtttaatcttaaagtggaaggtttaattaagggcgggctatactaaggttcgacataccatcagccaaatacaccagtggtcattcacctcttaaactttccactcttgcactgatcatcacctccacagcawatatctcacaaaatcttttcttatccaagtgtaaagacttattttttagcccagaacmttattttttgttatttactttcccacaatgtttagatgagcatttatgtgaatgactgaatagatttgcacygtgtcattatstaaacacgaaaacaggatcagtaacttttgttggatttgggcttactattgataaacactctagaatacacagttttaagcattgtctatgcaggtgattggcaatagttcgatgaatttatgaggaatgctgcagaaagagtctctgaattctctgattgaactcaggcctccttgatcccacaattaaaatgttagcataagcatgatattgtcatttttgcttaaattttattctcattttttatgtaaaattatattgtcttggagataggaaggatgagcaataatcctccatttaaatgtccataaaattataaatttaatcctgcaaaaccgactaaaaagtatttcatttgcattggatttttcctaccaccattccaaggataagtattatgctcatgttgaaaaaataaaataatttagttatttattgatttcttgtcatttatttcatgttgtcctgagattggatctaaactttgagctcctaatcatygctcagattgtgtggcctcgtaagattgtgcgtaataagtaaacaagcatctgtacacttgttaacttaatgagcttctgtatgtgacactttaagcctttttaaaaattaagtgctgggctatgcttggtgtctcatgcctgtaatctaagcactttgggaggctgaggaaggaggttcgctggaacccaggcatttgaaaccagcctgggcagcatagagacctcatctctttwaaaaaawttttaaaatagtaattatatgaaaaaaaaattttaaagaaaaaaagtgctggtcttttttgttaacgttgaacatttaccagagtcagttgcacacagatatttcttgaacttaaaaaaagctaccagccaaaataaccattaacatattgattgctttaatatattaatatactgatagataatatgctgatatctattaatatattttrgtcatattatcctattatctaaaactattggtgagcaaaatttgagcattaagagagtrgaaatgtacttttgcatgatattaaagtgtgacggtaaaagcaaacaagcaatgaaaatgaccttaaattatatttgabcagaactcacaaaggcagttaggaaatccaggtgtctagagatgactgctgtgtaagaacctagataatcttcatatagaaaaggcaaacatttctacagtgtggctgagtttactgatggtgctgggaactctgctgcccatctgagaamtgccaaggaaggatcttgcttcttcaagtgcttttgagaagggaaggtgttattaagtcatcacctccacagagtaccttccaattatcatgagagctttgtgtgacgcatgagaaaataggcttcacttgcaccagcatgatttccatagagacatgaagaacccaaccactgttattcttctaggggcagagaaytgagcttctgtctcattctgtctctgaggaagccacagtgataaagagaatgagactaaggcaagaacagaaaatgcctttgtaactgaaaggatacatayattatctaaagtaatatcctgggaccacgtggctatcacagctaccaaaatatgtgaatttgttagagtttcatgaatatttatgctattccttccccaaacattcagaaaacacttgggagatgcaaagatccatgtctaggtttgtttggcggttaaaataaaaccttgacattaattcctrcagtcatttcttttagtgtagtctgctttcccaaatacccaaaagctgttgggagaataaacttgaattccaaggtcttaatcattaggycattttacatagaaactcagacactttatttttaagcaccaatctgtagatgttggagattcattttaaataatctgtggggctcattgacctgtctagaagaagaatggataaggcataaggattgagcaaaatttacttttgaaaattttcttttttttttttgataatatctggtcctgcccttatgggaaggataaagctctgtaaaagcacagggccagctcctgttttctgaaccctttctatggatggsgatgaatctatgtattctacttatcagagtaggtttaccctcatggattatatttgaggtcccacatctgagtggttgacatattgtgccaatatacctagccaaagtgcccttgcattaggcctggcttgtttactaaggtatcagctggttggaaggacctaggagactgtatgtataagctgagagagaggcatcagtgatatagggatctgggccaactgttcattcagcctacttttgtcttttgcattttctcttgccctaaaacatattgcatccattataggatagatggttgcagtgaccattcagtcttatgacttggtagatctaatagcacttcagctcaagttggacaactccggatttatacttacttggcatgcctttctcacttagcttaataatttctagcttttaatttaatgacgttcacttgaacatttagaggacattatagggtggttaattggcttagcttcaacattgttgtgtctcagggactagggaggccagaagaggaagagagagagggaaatggcctgtcggtggagcagtcagaacacacacaacatttatcaattaagtttgctgtcttatgtggacgtgcttatgctgccctaaaataattacaatagtaacatcaaagatcacctatcacagatcatcatagcagacaataataataaacccatttaaaatactgtacagattattaaaatttgacctaggacacaaaatgagatcatgctgttggaaaaatggtgcagatagacttgcttgaggcaggttagccacaaaattttaacacaatggaaatgcaatatctatgaagcacaataaattgcagaacgataaaatgagttatgtctgtatatagaaatrgaattaatttgattgtgtttatcttaaattctgtgaccttaatggactcacttcttaatttaaggaggtttgtaaaatagatttatttggatttctatgtagaaagtcatgtctgttgtaagtagggactgttctattttttccattctgatctgtatgtcctttaattattttcttgtcttattgcagtgtataacttctagcactgttttgcataagggtgataaaagcagacatagttcctttattcttgattttagagaggaaccattcagtttttcaccactaaatatgatgttagtatagctatgtcctacataacactttggtcggtgatggactgcatatatgagagtggtcccacaagattataatgggggtgaaaaaatcatattgccaactgatgtcatagccgtaataatattgtagcacaatgcattacttacatgtttgtgggattgctgctgtaaacaatcctactgcactcccagcrtggttaaaagcaaacaactatgtattttrctatgcatttactacactctactaaactttttgtcattattttattttattttattttggaggtggagtcttgttctgttgcccaggctggagtgcagtggtgcaatctcagttcactgaaacctctgcctcctgggttgaagtgattcttgtgtctcagcatcccaagtagctgagattataggtgtgcaacatcatgcttggctaattttttatattcttggtagagatggggtttcaccatgttggtcagcgttttcttgaactcctgactgcagatgatctgcctacctcagcmtcccaaagtactgagattacaggtgtgagccactgtgcctggcctttgtcattattttagagtgcactccttttacttattaaaaaaagttaactgctaaacagtctcaggcaagtccatcaagaggtattccagaagaaggcattgctatcataggagacgacagcctcatgcatgctcttacccgtgaagtcctttctggatgttcacacaatgtcagaatcacttgaccgcacatttctcagaacgtatccgcatcattaaacaacacgtgattgtatartgttagctttttgtagatgctttttatcaagtggatgaagtttcctctattcctgctttatagagwrcttttatcatgaatggatatcgaaatgtgttaaatgtttattatgcatcaactgatataatstaactttccttcttttgtttgttaacatggtggattattttgattgactttttgagatttaatcaggtytgtttttctggaaacaatcccccgctggacatgggtaaattttgaaaaatatactatagaactctatttatcaagtaagttatacatatctttatatatatatatgtatatatgtgtgtgtgtgtgacacacacacactctctctctctctcctggttttggtatcactgtaataatagcttcaaaaaataaattgggaaatgctctctcttttactgttttctggaaaagattgtgtagaattggtgttaactttttaaaaacatgttagaattctccagttaaaccatctaagcataaatatttatttattggtagttttaaaattatgaattctattttcttaatggttatagagttattcaaatgatctattcatgcctggtgagttgagttagtttgtgttgcaggaggaacactgcattttgtccattttgtctattgtctaatttatgtgtgtggagttgtttgtaatattccttgatagtcctttkttatgtgtgtttatgtctgtagtgatatcgcctgtttcattatgatatttraaatttgttttttccttttaatttatgcttgagtttgctaaattttattaatcttttaacatagctatctctttgtttcattgatttaaccattgtttttctcttgtaaatgtaagtgttttctgttcttatcttcattaatccccaccctctacttgctttgagtttattctgctcttctttttctaggttcctgaggtggaaatctattgctcactagagacttttcctctttactaatgcgtgcatttattgctctaagtttccttctcagtactttgatatgtcacagtttcatgtttatccagttcaatgtatttttaaatttttccttgagacttctttgactgatagattattgtgaagtgtgtttttaaatttccmaatgtttagggattttcatatctttcttatgctgatttccaattggattccctacaatgatttctggttttcatctgctctggatgattacsatctcttttaaatttgttgtggcgagttttagggcctaggacagctctatcttgccatgtgtttcgtcagcactcaaaaaaaatatgtgtattctgctgttactgtgtggaatattctgtaaatgccaaatagattcttttggttaatggcattttgagttgttttatattcttgttgattttcttttttttyytctttttaaaarcatgaaatgcttcacaaaattttgtgtaatctatattcaagaaccrttttaatcttgttggcatcattctgattttagaaagtgctgccaaagccaacactccttgctgattttctgtctagttctatcaattattgaaaaaggcatgaggaaatttctaactataattgtggattcatctatatctcctttcagttttctttttttaaaaaaatcaatgaaaatttattaaattaagcataaagttactttcacatttatctacaaccacagtgaatacagttcttggcatgaagacaccacaacctttagaatttaaagcctcctcacctgcaagattacatatataaaactcccactattgtttctctaagagtggattagttcaccaagttaaaagttatatgatctagaatataataaaatggaaatgatttactcataagattcatattcaaaccatctttatttacaaaatactatcctgagaactattattccattaaacttcaatttgagaaaagtgcaatcacttaagtaacagcagttacttaaactgaaaatgagatcagtcaaaattacttttgaagaaagcaacaatattgtcaggtktcttgctgtggttctggatgtccagtagcaggctcctttgaaggcggaatcaatcctgaagggaactsgcttctaccttcagaatgtgggrttggggtaaaatccaggtctcggrtgaaggtaaggaggtaaacccctcggtggatagatgtttctcattgcaaatggagcatgtggtggacctgggaaatcccttggtggaaaataacctcgagaagctccaaacatggttcctggaggaggtggggggaaaggaggtcctcttctcatgaaygggccccttgtatccactggaaacaatggaccgctgactggagcaagaggtrgaggaataaggccagggccagttgcttcattttcagcagggagagatgaatcaggcacatttaaattaccaagatcatctttggcatcatttctactggattccatttctgaaggcattgacctatccattttatccaaagaagtcattttaaaacttctgggttctgctggtccagacagtctttcagaattagaataaaatctgtcttccctttgtggaggaagagttgaatcaggatatgattgccctggtggaggaaacatcatcctacggtcctgttccaccggagatgacagggacccagtgtcagaaggagccctgtgaggatcgattaacctgtcayagcttggttctcctctttcattggtaatctgatggtccaggggattccctgggctgcttgggcctcttcctcctccccctggaagcacaggtgagagtctgagtggatcctccaacaaagtttgaggagagggaaaagctctcgtttcagatgaaggccgacccaatggtgagggactacatggggaatgctctctgccaaatgctgtatttgaaacatcgagtgcattaggatctttttctaaaagttcaaatttcaactctgtttcagttaatttttgtttgttgtgagcattttctttccttaaatcactgaggtttctttcagcagtccgagctgccaaccaattatcatgtcctcttttctcgtaggaaataacctgcttttgataaaaatgaacagttctctccaattcttcttcaagatctttggctagctttctataggtctccagcycttcagtggcayggctgakctttycttccactytagaaagcttctcttcttcctctattcggtaattttcctccactgttaatttcctrtagagtttcatttcatyttcttgatagaattcagtcattattttaagtttctrttgaagcttctgattctcactttcaaaatatatgttttctgattgcaaagatgcttgttgagtctgaagatttttaatatgctctgtaagctcttcctttgwtttgtccacttcagataactgaataataatgtggtttctttctccttctaagctttttaaagaaacatttaacttagcagcatgaatcagtttcttcaaagctmctttcrgaggatcatctaagttagcaccattttcccattgactgttcacttytaattccaggttatcatcatccgttgtgtcttcttcaagcacagcagcctgatctttcatcattggcaagtgtccagtcagggtcttgatgtgattttctttatcattcagaacttgttctgcgtgtactttggagtcttcaaatgttattttctgtttattaagttcactcacttstcctttccatacttcagcttcttgctgaaaaagctgtttatggcttgtctgaagttgagaattttcattcaaagcatcttttattgctatagcccgtcrttcttcactcattttaaatgtcttgcagatgattttggcttcagctatttgtgatttgagggattttgactcatcttctagagactgtatactttttgaaatatccgccatcaattcatcttgttgagaatgtttagatttctcttcttttaagtctttttctagacagaggatttcatcctcaagttcagaattggacctgytcagcttttcacaggttgcctccaaacttcgtgcttcttctgctgccgccttctcaaagctggcatcctctaaagatgactctacttcatagccttcatactctttttgaataaggctaaacttttcaagtagtttacatttttcttcaattagtccagaaagcgttgcaccaagtttttgctctcttcccacgtaaagccgactcctaaccgatctaaaacttctccacaaaaaaaggagaacaacaaaaaatccaataacagctgcacataccaccagttccgatggaaaaccataaggattctcatctggtctcatactctcaggtagtgctgccacaactctgcgtagctcctccaggaccagccccaggtagggctgaggggtagcaccrggctcctccatagcgtcgaggctgctctggcggtcaccgcagtaacactggccacaacaagcggtggagaacacgcagccttgggtctggaacccgaatgcgcacgtgacaaccaaccggagcggaccactgtggagcgggctgcggggggagctggggaacgcgggcacccacaggcctcacaggcccatgttgtcccccaccacctcccctggccctcttgttacacttyacatcctgaggcagcgctggtctgagcccggcccgccttagttctggcagttttcacatcacrtattttgaagctttattttttggtgaatacacttttaaaattgctgtcttcttcatggattaaacctttgatcattayataatctctggttttggtagttttctttgctttatctgatatgcayacagacactcttgctttcctttcattaatgtttgtgtaatatatcttttttcatcctgttaatttggyctgccctgtaytggtaaaattcaagtgagtttcttgtacacagcatacaagaaacatayaagaaagggtcatacttttaaatacacycttctattatctatctcttggtagaccattcataattaaatgaattattgatactttaatgcgtaagcctgacattttttgttttctctatcaattcttgtttctctgcttatttttcatgacttcatgtgggttacttgaacatttgttttagaattccattttgttatttatagtgtttatagtgtatcttcttttttatagtttttttggttgcattttatagcttagtggttgcattttacagcttagtgtatattcatttatataaacattatcacagtcaattggtatcatctttattccagtctgagtgaagtatagcaaccttctgtcatattatgtctctttactctatcaaatttgtagtataattgtcttacatccatttagaataacactagacaatgctatgatttttgcttgaaacatcaaacataatttaggaaattagaatctatgaaaataaagtgagcattttaaagcttccagaaagaaatctgacacaacctgttttgtctttcattttttctttctttcctttatattcaycatagatgttatgatgccctatctgttaactccaatatctggattatctatgagtttgtttttaataactgatttatttcttatcagtctgttttacttgcttttttgtatatttggtaytttttttaaagtatgctgaatttatggataatatgatatagaactactcaagaattttgaattttttttctgggcagaatttgtaattacttgcagatcatcttgctgctctcaagayctagttttaagctgtgttatgrtaattatattttattttcctcttagaacatatgcctcactcctgggatactgcayctctcctaagagaatttttagagtcccaactgagtttctcagttgtttgccaacatttccccatttggctggatctgaactccagtagctttccargaagttttyagtccctgatgatctcttmtgctttctgtatcccagcagtttctttctccaaggtctcccctcttcttagccaactgtcacatagctaaggagtcacagaaggaccaaaatggcatgtatacacccatttctaggttctttctctctcccatatggtacattgrcccccaattcctaaccaatttagcagctttgaactctattcattgcttcttttggttcccaagaccactaacccctggttgggtcccattttcctgtaccaaggtcaggaagatgcctttctggaaaatcctggcaaatgtggtactaacctcatgtgcctcaccttccttaaagatctcatacctgacttgctacaacaatgttcttcaatgcctgctgatatggtttggctgtgtccttacycagatcccatcttgaattgtagcttgcataattcccacatgtagccagcccacctgaaccatgctcagcagctggtgagaggtaattgaatcatgggggtgggtctttcccatgctgttgttgtgatagtgaataagtctcatgagatctgatggttttacaaaggggagctcccctgcacatgccctctctcttgtctrccatgtaagatgtgcctttgcttttcctttgccttctatcatgattgtgagttctccccagccatgtggaactgtgagttcactaaacctctttcttttataaattacccagtcttgggtatgtctttattagcagcatgagaacagactaatacacctgccaagaattttttctatattttggccagattgtatagttttttatggtgggagggtgaatctgacacaagctatttggtgtcaagtagccaagtcacatactaatttatttttaatgtaaagctatacaaccttctttctatacctaaatttttaattaaaatataataattaaaatattactaaaaatttcttaatgattttatttcatggtgaaagagactcagtctggaatgtaaagtatgtcttaccagtatttctcgttttgcaggacattgtctaggtgtccctctcccatggatgatcattagtgtggtttatttttatgctttgagaaaataagtctgtagtatgttactayattctactatataaagatacacttcaacttatgataggattatgttccaatraacccatcataagttggtaatattataagttgatgatgctttttttaaaaaaatatagactrttgtcctgttgcccaggctggagtgcagtggctattctcaggtgtagtcatagtacactatattctcaaagtctttgagctcaaacaatcctcctgcctcagcttcctgaagagctgrgactgactataggcacacaccactatacctggcttgaagatatgtttaataaacctaacctaccaaacatcatagcttagcctagcccacctgaaccatgcttagaacactaacattagcctacagttgggcaaaatcatcttacacaaagcctatattatagtaagctgttgaatatttcatgtaatttattgaatactgtactgaaaaggaaaaacatcatggyarmatgagtacttgaaatatggtttctactgaatgaatatcactttcccaccattgtacagttgaaaatcttaagtgaaatcattgtaagttggtgactctctgcatttatttattttactactttccttttttcttttaatagttgaaagccatcataaggtaaaatattattgcctaaaaatactctgcttctctggaaaataaaaaagacagaagtttcaaagaaatctttcaagagatataaaaatcatatgaaaatgaaataattaaagaataaatctgtaattatgcatgttgtaaaatacaaatgggaggctggaagagagactgtagatgcaccgtgaaaatgaaagcagaaataaagtaggaatggaaacatttatataggagttgtgagatacagcatcatatttttgttctacactaaatagttttcatgtctagcagaggacttggaaattataagctactcaacagtgaatctcagagctttctccattcatctcacagttagtcttatataaatatacagctctgtaatgattatatrtatcaattttttttccagtcaaggacttttcctccacatgttcatttccgtgaaaaatatcacttggtactagatgatgtgaatggctatgattgaactggttacttagggtaataggytgacatcttgtttcrgcaattaaacaataaaaaagttgttctttattaagatatgaatccatttcttaaagaaatgggttccatagatttccatagcattaagcatgttggtaattcaaatgcctcatcactgaacaaaaatgctcaacctcagagactatccttgcacataaaaatttttcttattttcagttgagtatgggccaactcatatcaaacattattgatagagattggagcacctgctctggatcagggtagggtcctccacagctagaactgtggaaaacatctcaacagtaggcactggaattgtgttttccccagtcacaggccttgggcaagaggagagctgctatggctgtggtttctcctggacaatgagactttyagccagcgccagcttgatgaactagaactggtctgtgtgtgttatttttgggtgacccagcctacttccttgagactgtggtgtagcagggccttctccattctacacataagcagatcgccaagcatttaaagcacttgctcacatgggctggcagcctgggttgccccttccttcctgtgcagagatccttgtgcaaggggaccatctccacttcatgcccaggcagacatccagggattcagagtgcccatcagcrtgaatcagcaatctgagctgctccgttcttctggtgcagagattgcggtgtagtgggaccctctctgctccacagatttccaggtatttggagcatctgctcacctggagcagtagcctgagccaccccatccttcctgtgcagggatattggtgtaaggagaccctctccactccacaaccaggcagatctccaggcatttggagcagccactctcctggagtaagagattaggcttcctctggcacccttatgcagagaatttggggccaacttccacgccgaggcacgccgctggacacttggtggctgcccactggactctccctcagagttggtgctagtgcttattgttgggggacctgtagatgggcttgccaggtccagccccacccagtgttttctcggtaaacaagaatcaagtatatacccagccccactggctgcaacctgctgttacccataagcgcattctgggtaacccaggctgccagcccatgtgagcaagtgctttaaatgcttggcgatctgcttatgtgtagaatggagataccgcacaggaagacagacttggcaactgatctggcatcaggagagaagtcttattcatctcccacctgtgtcattacccagctgtggtagagaaccccagccttgatttcaactgtgttaattagacatggggaagataatggagaatttgttccaaaatatttcatatgggacttggaagttgagctaacttatgacagatagaatcaactcattttccaagtgccagctatcattgttccatatgtaacttccaaagctaaattaatgattagacatgaacatgaggaggtagagagcaaatttccaaagtttttacttggaaataaatagaaaagagagttttcaaacaatattttaatattttgcttctgaatgaaattttgcaatatttactatagtttttaaattgagctggattaggagatggaaatattttaaaaaactagatttttctgaaaatagaaaaataaccatagtacgagcattagaaaatttaccaaaaaacttagtcaaaaaacctttttctttctttcattaatgaacattctagctttccacacagaatttaaaacttaattacctcctactaaataattccattaatattgggaaaccaaatatctatgcagtaagaataaaaacatttatttatttataattaaaaaaatagaggccgggtgtggtggctcatgcctgtaatcccagcactttgggaagctgaggggggcagatcacctgaggtcaggagttccagaccagcctgaccaacatggagcaactccgtctgtactaaaaatacagaattagcttggcgtggtggcacatgcgtgtagtcccagctactcgggaggctgaagcaggagaattgctttctgaacccaggaggcggaggttgcagtgagccgagatcgtgccattgcactccagcctgggcaacaagagtgaaactctgtctcaaaaacaaaagaggagatggagtcttgctatgctgtccaggctggtctccagctcctaggctcaagtgatccacccaccttggattcctaaagtgctgggattacaggtgtgagccatcattcccagctgagaataaaaacactttttaaaacctattgttcgggctgggcatggtggctcacrcctgtaatcccagcactttgggaggctgagatgggtggaacacttgaggttaggagttccagactagcctggccaacatggcaaaaccctctctccactaaaaacacaaaaatattagctggatgtggtggcacatgcctgtagtcccagctactcgggaggctgaggcaggagaatcgcttgaacccaggaggcagaggttgcagtgagccaagatcacgccacttcactccagcctgggcgacagagcgagactcagtctcaaaaataaataaataaataaataaaacctatagttgtcatatgccagcaattttattggcattaactaagataaggaaatgaagtgacatccttaggatatcaaacttaatttccttctgaatcaggacttgtcttgctttccccattccaggtacttacctggcctctcttttcttccctctactgggtagagttgagtgagtgtggcctggtcagatttgtgatttattttttaatttgtgatttatttttattttctatttaaactgaattagagtcagttatgaatttttttaatgttgattttttaaagacactaaattactgtcctgttgttagtcgagtcgagtttgtaaaaacaaacagaaaccctgcggggggkgtgtgtgtgtgtgtgtgtgtgtgtgtgtgtgtgtgtgtgtgtgtgtatttgcccttggggtgagaggtgagggtggggaagaaaatgagagaatcttttagggccagcctttggaaataggagtcctttgttcccttcagagatcaaatttgactcagtataacattgttgctttaaaagatctaggttcatttatcgctattttccaagtatgaaaaacagctacttataaaattgttaatactgctcaattcaaaacagtattaaaatgtaggcaaaaactaattaattaaatttgaaaatttattcaaataataaagctacagcctrtggaagaaaatcacaaaggtaaacataattataataataatctctgaatttacagaatatactagcttctttttaccaagtacagttatgtgttgtataacaacattttggccaacaatgaactgcttrtgtgatggtggtcccataagattataatactatagttctactataacttttctatgtttacatgtgcttagatacacaaatccttaccattgtgttacagctgcctgtggtattcagtacagtagcatgctgtacaggtttgtagctaggagcaataggttagaccacatagcccaggtgcgtagaaggctgtaccatccaggcttgtgtaagtgtactctgtgatgtttccacaatgataaacttgcataagaatgcatttctcagaacatattcctgcccttaagcaacgcatgactggattataattaacttgccctgcctattctttattcatgctttcatattattttcctagacatcttcactggaaaacagaaattgatatttttccccagttgcaaagatttattcctaaagcattgaaatgctaaaataacatattaaccaaactattcttcagcatatagtcattgatgtgtaaaggtacacccatgagcttgaagacaaattcatttttttttaaaatatgtacctttattactagccttagtcagtatctatcagtcagagacttttgaattctatttatagatcctggaattttcctttcttctctcgtacccttctgtttgttccattatggttatgaatttgagcatgaaaataaatatatttattcattattgatataaaaatttattctgttgttgatagaaaaatatattattctgttgttgataaaaaaatttacttataaaatttacagaaactatataaaattagttaaatcttacactatggtctcatatcaatatattgatcagtgtgtaataatattttttctttataggagtaaatcaaatacaaattgtggaggaggcaaccatggttataacaatgagtttaggagcatggaggtaacttackgcttttttttttaacttttattttaagttcaggggtacatgtacagaatgtgcaggtttgttacataggtaaacatctgtcatgggggtttgtcatacagattatttcattactcagatgttaagcctagttactgcttttttaaaacagatatttattgcacacctattttattataggcaatgttcaaggttcttgaatacatctgtgaacaaaacagattaagatcctgccctcacgaagcttttattctaagagggggatacagacagtaggaataataaaataatacattatttgttatgtcagaaggtaaatgctgtgggaaataaagaaaaagtaaaggagagtaagggagaaattgggagtattttggggtaccctggggggcagtaagaaactttaaatagggtggaaagagtaagagtcattgagttgacattgagcagagatttgaaaaaggtaaaagaattcgccttacaaatattcaggagccaagtgtcccaggcaggagaaacagccactgaaaagggccaaaattgggagtgtgcctgagtctatgagtagaatgcagctgataatcccccataggtaaagctttgcaacctggttatctcatctacttccatttgtaacacacacacacacacacacacacacacacacacacacacacacattcctttccaaatagaaaaaaaaatgtattaggccttttatgaatatgtttccttttattataacattgtcatggtgagttacatctttttgtaaatatttgaaaacgatctctggagaaagagctttactattaattggggtactatgtaatagttaaattaattattgcaagaaaaatctatgcttccaattctttgatcattgtcttaatatatrtatgtatatatacacccacacctgttaccaaaacataattgcttatctgtgtttgatatttttcttctaattgtttaagtctaaaataatttgatctgttataaataatataatcaagttaacattaattaattcaatgtaaaycaaaatattgaggtctttttatcccaaaagtaaaagagagaagtgtaagtggaacaggaagttaracttcatctaaaaaaaaaagttaacattttgtgtcatgttaacatattcgattaacatatttgattaatgatatgaaacaatatgaaaagataatatgatgttatatgattaaatttctactaaatattgtgcccatattgcagaattatgctgatattgrttgtgtgccattgtttgtattctcctactttattggcacatgaggtgctatggaggtgggtagagacagaagtaaatacagcactgattatatttggttgggattggtacaacattgcaggtggaaaaatatgaaaatcattttcaaaactaaaaaaaaattccttacagaggcctaatacaaataggagagtagttacagaaggaaaattttgtctcttcctatatttgtttttgaatttggatgacatctaataataataatctgactattatgacctaggctatctttctggcacatggacccagttttaaagagaagactgaagttgaaccatttgaaaatattgaagtctataacctaatgtgtggtaagtatatttaaataagttcgccaacaaaatatggatagttttaaatatatgtgatttgaaattggtagcaaactgaatcccagaggctggatgctctgtagtgagaaggcagaaagtaaaaaagataaggaagaattattcattattcagaattattcagctataagagtgaattctttttgttttactagtaatgataaactttattttcatttttgagatggagtcttgctctgtcacccaggctggagtgcagtggtgtgatcctggctcactggaacctccgcctcccaggttcaagttattctcctgtctcagcttcccaagtagctgggattacaggtgtgaaccaccaggcccrgctacttttttttgtattttttgtagagatggtgtttcaccatgttggccaggctggtctcaaactcttgacctcaagtgatctgcccaccttggcgtctcaaagtgctaagattacgggcatgagctaccatgcccagccagtaatgataaactttagatctcagaagaccaaccttttctattagttagttactagatgataatttaatttaataaaacttaggtaaataatacttccaacttttcaaagcaagacaaacttacctaaaaacacaaacattttcttgtaattacagagagaagctctctggcataaaaacatgggaaaaaagtcctagctggatagacacttgttattatactcaatgttaaaaaaccttaaagcattaggattttaggaagcctaacctaccttcctacctacgtgcttgttgcaggccattgtattaacaaatcatttatttacctagcaaggcaatgagtaagctgcaatttcgctgttagctttagaaatttggacataaacatgcttacaactctctctcttaatgttgtcactggtttgtggtaattgaatgtgacttagagaccaaaaggtattcagtttttaaaatggtgtgttgtaggcttaacaacttacattcttgttccacatggctaggtttatggtctggactgttggccctttgcagaactggttaaaaggaactacataggactgcagttccaggagagatctgttaggtagcaggcagtcagcaggaattacttaaaaggctatgttggtgaaatatttgtatgtttcatagaaacatacaaacatgcaaattgtatgtttctatgaaacatacaaatacattttgtattatgtattttcatagaaaaaaatgaagaaaagctctcctaatattaagcaaaattcactagttccattttttaaaagtgtctatctttagagaataaatgtactacaaggaagattataaattatttattgaaacttgcttttattaagaatatagctttttatgctagaaaatcatgatatgcttacgaaacaaagtggtgatttaaggaagcttttctttggagaaacagaaaccattcatgaaagttcctctggctcatctgcagcaactgttcctattcctcatttgtttcaagagatggrgtttcagtatgtcgcctaagctggcctcaaactcccaggctcaagcaagcctcttgcctcagcttcttgagtagctgggactacaggtgcactgccgcacctggctagttctattctttagcaagactagtgattgaaaccatggagaagaaagtcagtaaactgaatggcatatagagtacatagcttcgttacagcrgaatttattaaagggagtgaaagagtaggtgtttgtttcttcccatctcccacagaggagttgttgctttccagtgtaaagctactttgaactwattttttcaaaaaacagatcttctacgcattcaaccagcaccaaacaatggaacccatggtagtttaaaccatcttctgaaggtgcctttttatgagccatcccatgcagaggaggtgtcaaagttttctgtttgtggctttgctaatccattgcccacagagtctcttgactgtttctgccctcacctacaaaatgtaagtaacaacttcatgcatccataagaacgtaaaggggcaagctattcttaacctgggtagctracaactggggtagcaacaaccaggtttgtgttccgccttggatatttacttagtaaatatatgtggtttctctgaaccttacctggaaacgagaagtgagaatgcatacattgtaagattaagtagggaaatatgctttataaactggaaagcactgtttggtaattgttaatgtcattataaactaactgtccttcaccattcaatacagtaatcttcgagctctctccaactttccttataaaccattcttcctgcggtttatgaatcagatgttcatgcctggttatttagagcagaaagaactaggagggtgtagggattgcagcctgctgtttgacatacccactagggtaggtgctgcggggtgttcctttgggtagcagggaagaatctggctgacagttgacactgggaaggtctttttagtagattaggcccttggatgagttcaagagcaggacttcagatcccaggagactttcaataaggtgaggttttagtgctaggagaggccccaagggcaaggagtcataacagcagctcaaaatataaggaccaagcctacttgtgagaatcagagcrcctggatggggttgggatttcagagtgaaattggagccccgttatcaggagtccttaaagctaaaattaatgtcaagggtcatttgatgccaagttccaaatgtgtttgtagaactaaataaaaacacctgctgcctcaggtaagaatttttccttatagtcagaagtaggtgaagacatcacaatctctattcttcaaaatagcattataccacagaaataaataaccaaccaaaggggctttacaggacaaaagcttagcaaacttctcaatgaagatcaaatccacagcaaagatcagagtaagggtgtgggtttcctaccgactgctcctgataacctcaatcaaactgccattaaaaaataataataacattacttactaggtatattatttctcattttagagataaaacatgctcagagaagttagataaattgttcgaggccagagaagcttgttctatctggctgcaaaccccaagttctatgtaaagaatgcctcttgctattcagagtgtggtctcaggaccaccatctgcatcacttgcaaattggttagagatgcagaatctcaagccctaccctaggtttactgaaccagaatccgtattttaacaaaaccctcaagtgattgtatgcatattaaagcttaaggagcactgggatgttgtcacccaacttagtcattgattccagcagtaatcagaatgctttgccccattatcaattatctttttgcaaattctctctctctctctctctctctcwctcwcacacacacacacacacacacacacacaatagggagcagtagtgtctctatatttctgaatagtggcagaatcagaatcttaagttaggctagcttctttggcagtataacatttaatcgattactacagaaacaatcttgattaccccttaaaacacatattgttgctttgacttatttcctcccctttcccatccctcattatcttgcagagtactcagctggaacaagtgaatcagatgctaaatctcacccaagaagaaagtaagtcaatagaaaacatgttaagtctttgatatttagacctaacaaaacacaatgtggcccttttaggactctccaaaataagctgacagaggttcctgaacataaagattttattgccaatatacaaaaggtaaaaaaaaaaaaactcacaacagatataatgacaacagtacaagcatggggtagttccagtggttccaggaacaaaacgaattccttgaagaggttgtgactcatctgcagtcctctgtttcctttccttagatgtaagcagactgagctgcctgggtttgagtcctacctctggtgcttcctggctgtgtgagctggggcaaatcacttagcctccctgtgcctcagtcttctcatctgtaataaccgtactcacctcatgtagttgtaaaaatttaaaaagttaatacatggaaagaatttacaattgtgcctggcctgtagcaatattattrttacctgttatcttttaagtattcttgtattaaactcactctgtttcagtttcatcgcttataaggggatacctactttatacagttgctgtgaagattacatgagttaatatatgtgcctggtttacagttaagagcttagtaaatgtactagttgttttgataatcttataatctgccaagtgttattccatggcatgaatagcctgcaggttttttatccatcactaattgatggatttttaagaagcatgcaagtaaaagtaaataaatacattagaatgttgttttagtccattccaattgctattaggttggtgcaaaattaattgtgtttttttctattaaaagtaatggcaaaaaacagcagggcatggtggctcacacctgtaatcccagcactttgggaggctgaggcagacagatcacttgaggtgaggagttcaagaccagcctggccaacatggtgaaaccccgtctctactaaaaatacaaaaaaaaaaaaaaaaaaattagttgggcatgatggtgcacccttgtaatcccagttactcaggaggaggctgaggtaggagaatcacttgaacccaggagatggaggttgcagtgagctgagatcatgccactccactccagcttgggtgacacagcaagacttggtctcaaaagtaatggcaaaaaccacaattacttttgctccaacctaatataacaagatgccatagactgggtagcttataaacaacagaaatttacttctcatagttctggaggctgggaaacccaagatcaagttgccagcagatttggtttctgatgatggcctgattcctcataaagggccttcttctcactctgagctcgtatagtggaaggagtgaaggtgtccctagggtgtctttgatgaaagccctaatcctgctcatgggggtcttatatcatgccttaatcacctcctaaaggtcccacctcctaataccatcacctttgggattaggatttcaatgtatacgttttagagacacataaacattctgattataagacataagtttataaaattccaacatcttccctatgacaattactagactaggtcatctttgttacaaagtatgtacttttgactttgaaggttttacctcttcatgtatatcctctgagctgtaaaatgtaaggaatcacagagggcaggcttcagatccttgcttaggctcttgcttggccaacttacttatgtaaaccttagttttataatctgtaaaatggagtaataacaccaatattattattattatttttaataattatacattggattgttgtaagaattgaaagaggttaaatatgtaaaatatttgttagagtacttgtcatataataagccataagagagtggtagttattatatgggtagttattacatgcaaagaagcatttgctaatttcatgaacctttttattttatgttattttaattttagtaacagcaacagtgaaagtaaatttgccatttgggaggcctagggtactgcagaagaacgtggaccactgtctcctttaccacagggaatatgtcagtggatttggaaaagctatgaggatgcccatgtggagttcatacacagtcccccagttggtaagttcctgagtccattgatccatgcaggcaagaaatatttataatcctttcatattctaagagttgaattttgttttgcagcagagattcaaagggagggaactcactggcctgtagcttgcaagacaatgtgcaagtattagataaaggttgttataggtgctacacgggtgcaaaagaggaacacattgtgttttacctggagaaaatggaaaatgtttacaggccaattggccaattggtaaggcaggtagaaaaggacattttaaacagaagcaacaggaagtacagaggaatactattcatttaagattccccatgtacatcatgggtgcatgtagaaggtgatgataactagattataaagggctttgtatttatttgattatttaacaagtactttactatttgttgtgtgttatagtaggcaccaaatatacaaggtgaataggcatagttcttctctgaaggatctggcactccagtaagtcagactagacttacatgggacaaatgcattatgtcacagatctccaggctgaggttgaggtccacttgtttaaagccccttccctcttcactgtctggcatattctcttgcactaagtagtaccaggacagtcaactacccttcaggaagaaaacagtagatccctacctcacaccacacacaaaattaaatttctggtggatttgtagacctaaataggaaccgcaagtccatattccctttgtgcatatctttatgatcttgtgatagagaaggctttctcaggagacaagaagaacaacattaaaaatgcagaggaaattgattagactacataaacattaatgtatgacaaaataacaaagttgtagatggaacaatatatctgcattgcatataagaaacaagttatgagtatccagaacagtaattagattcagaatagctaataaatttccaccaatcaacaacagaatgacaagcatcttagttactacatgaacaaaggataggagccaagcaattgaatcacaattcaggaatatgcaataaggaaaatgtaaattaaaacaaaacttagggccaggcacagtggcttatgcctgtaatcccagcactttgggaggccgaggcaggtggattacctgaggtcaagagtttgagactagcttgaccaacatggtgaaacctcatctctactaaaaacacaaaattaggcaggcggggtggcatatgcctgcaatccccgctacttgggaggctgaggcaggagaatcgcttgaacccgggaggtggaggttgcagtgagccaagatcgcgccattacactccagcctgagcaacaacagtgaaagtccatctcaaaaaaaaaaaaaaaaaaaaaaacagcaacaaaactttaaagtatgcctaaagtcagtccaaacacttctctggggcagggatgattttatttaatgcatcctcagcacaatagaattgtccagtaagtgcttattgaatgaaacgcattgaatgaattaaccacaatcattatttttagacttttaaagacaaagctataccacccaccacatgggtaaataatcagggagctgtttctgtagagaaaatcttagtattttagatccagagactgatgacaaacttatagctattaatgtttttgctaagagtaccacctcttttatggaaaggaaataattgattgcataggtttacctactcttcctgttccaattcaaaatttttggagaaagataagcatattttcctactactaattaaaactttgtatattctgaaagccagctctgttgctgtcaatggttcgattgtggtcactggtaacagtactaatgtttgtttgccagtgtgggcaaatattttaccaacagttacctgagttcatatggacggttggtgcaacattactttcttaatatgcacagtgttcagttcgtgattttcttcaacacacaacattccacaaaataacttctattttgttattgttttcgagaggagtggcatactcagggtcagtcctattatttaattttctattttgaaaattccaggtatgaggggttgtgtggcattaaagggaatgtttaygtttttagtacttttcccctgctgtcttgcattcttgaatttttatgagctttggcggaaaccaaaggcggagagattctaagtgggctcagactaggagtttaatacaattcttctttgttattgttttaaaactagcttccttgttaccaaaagttcctgtcctttcactgatcccacagaagtacttgtgtatttctccttccmtgtgacaggatggaattctagcaattttctgctttctaattcagaaattactctgttagtgtgttgtggttcaagaaaattacatacaaggatgttttgggattcacataaaaatgttgtaaatcagctctgtgtttcaaaaaatcaggcttaaataagcactttttggaacatggacccarttggtcttagcctttaagatttatagagcttttgtttttctgtggttttggtgggttttgtaatttttgttgtatctcagaagagttctggggaagtagttgtgatttgaaatcatggtcgtagaacagctgattcaaaaccattaaggttagtcagaccatacatagattttgcttctgggcctgttcagaaggaagatatgcactagtgttcctgttgctaggtgataaattgaaaataagagcaagaattgtgattactgtttaaaataggtatttcagaatttaatatgaaatcaaataacttttcagagtagaaatctagtgtactttgaaaaatgcctctctgtctccctatgtatctatgtatctctcgctctatttacctatctatagctatatgtctatctatctgtcaatctacacacatatcattccatgttaaaaagccttttttcttgtttctaaagattattttgtgagtctttgaaacaggggcattattgtgtgttgcaaacatttttgaactatgaaagaattatttttccctgtagaaaataaatcatacaaccaaataattaaaaacatacatagttattatccttaccgtaaggcaaaattgtaactatctaatcttcaaacaagtaggttttagcttgtacattcagcctacaggtaagaagcatctgtaacttcaatagaaataattttatcctctgttcaggttctactttgtttcaatgccrgactaaaagtacaagcagctcacgttcctgtctatactcatcatttacttctccagtaagattttgagagctaaaaagttcatattttatctgagtgtctgaattatatttattgctttcctgactttctattccgttgcttcaaaaattccagggaactctgataggatggcaggattgaagctgtttatgtgttggaggcggggtggtggtggtggtggttcactaaagccttttttattatagaaaggaccttcctgtacctcccctccatccttctaatgggctgcctattgcataatctcgcctggataaaggaggccacatcctcattcctagtactgatgcacttttatttgagggttcaagtttggtatgtaagaaataaatctcaagattttcggttagcagaaaatgtgactttttttttttagtactttctggctgaagctatcccagttcatttcccccagcacaaagtctaagctactttgagaacatggtaaatattttgaccaactaagttgtttaagcacaacttttacagccacagcctcattaaaaattacaataaactttcttcgttaacatttttataattttaactgttaaatataagcatctcaatttccttacattatggaaaatgcatttagggctacatttatatactgtatatttcttcaagtaaaacttactaatgtgaaatgtttgagtacaacgataaagatgtgtgttaggaaatatcaaactcacaatataccagcggtctatggggccaacttggtcagcagtcaccattccttattttctaattttacaacatacttacgtagcccttataccaagtggagaaacctggtcactcagaactgtatactatgatatgtttttgaaagaatataaacaaatgcttttagctttccagactctgccacctgaaggagagtgaaataaatggtgagaactcatccaacacatttagcacaaacgtcttcgtatttcttggtttacttcttgttttggwggactatatcactcaggagcttcctgagaaagaaaaaggggaagatacattcttgagagtttttgtgtctcaacatgtttttactctgcctatacacttaattggtgttttagctggtttcagaattttagaaataatttttcttcaaaattagtaagacaggtcaagcgcagtggctcacgcctgtaatcccagcactttgggacgctgagtggatggatcacctgaggtcaggcgtttgagaccagcctggccaacatggcaaaaccctgtttctactaaaaatacaaaaattagctgggcgtggtggcgcatgcctgtaatcccagctacttgggaagctgaggcaggagaatcagttgaacccaggaggcagaggtagcagtgagccaagattgtgccattgcactccagcctgggccagatagtgagactccatctcaaaaaaaaaaaaaaaaaattagacttcctgggctgattctctaatgtgtttgaatttttcctatttttcccatctctttgtctttaattccaccttttgagtcacgtctgcaacttcatcctctagatcttattgagtgttttcttttggctgtcgtattttgaaatcccaagagctctttctgttaccttttctctttttaaacattgcctctgttccttctttatggatgccatatatactctcagctctctgagaaaagagttttcttctggcttctgcattgtctctttttcttctcccttattccccagtgtctagtggtccttggctgtcagcttctattttaagagttaggcactaaactatatggctgggtctttccagtctataagcttcactataggttgatcaggaagagaaccagccattttgttgaggactccaaactgacagtatctagtttcttttcaggctggttgttttccaaagagaggatacttctaatctgactcagcatatacaattttcaggctaaatgggcaatgagattggggaatcttatcattcagcaatagagttttgtttaatctcatttctttcagtatggtgcacctgctcttggctgtgccttgtgtcttttagtctgatcatccctctggtttaaactctccagagagtaaacatactgtctatccctttttgcagactttttcaatctatcctctatttccagccttatgcraactcctgtctttaggactccaagttctacccttctggggttctacagtaggacttccttggtgcttttcccaaacataagctcttggtagtcagtgtttactggtctactaaatcacgttattatttatctgatttccagcttctgaatgttccctgtcatctcttgtgtgttttcattattactgtcttcttaatggaattttagaagggagcaagataaatgtatgtgtttaatcaatttgagaagttttctagctggagctttgtagtatgttagggagtacagtctctgctttgctttttctggacttttctcatcttcagctcctacttgttctatacctcagcatggtgctctcctggctacaaagacagcatacagtgtatgttgcctcttcctttgtgaattgaactcagaggtttcagacaacatagctaattttgctttcagcacaatgcagtgaataaaggaaggtcatcctaatttaacttaatcttcatttttttataaattatttcaaattttattaagaaagatatccattatgggcagtagagagcatacaaatcaaaatgtctgagaaaaataaacaaatagcaaaatgttcacttacccatgattatatgctaatcaaaatatgatgaccacataatatagtattaccttaaatactcgagttaggcagcacatttacaggatgtcctcttggtaaataaattattgtactagtctttaaatagggctacaaagaaattattattattttttaagacggagtctctctccgttgcccaggctggagtgcagtggcacgatctcagctgactgcaacctccacctcccaggttcaagcaattctcatgcctcagcctcccgagtagctgggattacaggcacccaccaccacacctggctgatttttgtatttttagtagagatggggtttcactatgttgaacctcggactcttgacctccagtgatccacccgcctcaaccttctaaagtgctgggactactggcatgagccaccaagcctggcctaagacattattattattattattattattaktattaktattattattattttcagatggagtctcactctgtcacccaagctggagtgcaatggcccagtctcagctcacctccgcctcccggttcaagcgattctcctgcctcagcctccagagtagctgggattacaggtgcccgccaccatacctggctaattgatgtatttttagtagagacggggttcaccatgttggctaggctggtcttgaactgctgacctcgtgatctgcctgcctcggcctctcaaagtgctgggattacaagcatgagccactgagcccggcctggcctaagaaattattttaaaaattcttatatttcatgatgaatgaagcatggctgtaaatttatttatattcaaaactaatttgtttagacaactacaccttctttgaattaatcttaggttgataaaaagttcttgaacagctgaagaataatatatcaatacttagtttatatcaatattttaaaagtaaatacattttactttcaatttttatttaaaagtacaatatacatcaccacataaaagttagatcttgaaaaggattttagtttttaggaatagttcccattattcctctgctctcaattcaggtttcactgtgcaaatatttttttccaaggtgtatttgatttgccctcccgatgtccttaaccagaagggaaccacagaagaaaacactgctgaagacatccattctcattgcttgcgtagacctgattcactaagaaaataggaaaagcttaaatgaaaaacattctagggaagtgacaaaccatataaggcaatgggtgagccgcaattgtgggcgtaatttttttctctctctctttgaacagggagacacatcgccyctgcctcccactgtcccagactgtctgcgggctgatgtcagggttcctccttcygagagccaaaaatgttccttctatttagcagacaagaatatcacccacggcttcctctatcctcctggttagtagaactcttttttagagcagtagcttagaaagctctcatcagctggatrtgggcatrtgccttaaacatatactccccaccaaaactacctgcttgggtaagctagctgcctgagaggcttccagtggttgtggctggccagagcagcacagcggctgtaataaagactaagacattttgcagtgggacccacacagcagctctcatctggcccagatgtttagagagttcggcaggtttaagtttaattttaaaactggagattctttgcagaaggacacaaacatctaaaaacccatttcttctgactcctgcccaagctaaggtccacctggagaatacagctgtgcccgtgaaaagaaatcaggctgggtgctcgctttggcagaacatgtactaaaataggaatgatacagagaaggtcacctagtaaaataaaataaaataaaawaagaaatcaggctggaattttggcctgtcgctcatgctgtagggctaacagttttaaactgcaggtgaagtagccaaatgaaatttaagtttttgttgttgttgttgttgttgttttcagaaagaatctctcttgggaacctgccaaagctagtgtgattttcctaaaactcaagccacttccctgtgcaacargaaacgtcatttttattaacttgcctatgagattttcaacaatttcaccttcttagagatttgtaatttaaagattccgaaatgtataatgggcaaaaaggtttaaygaaagcaagtagcgttatcaatttaaaactcctgagttaggataaattaactgataaattttatgtatctagatacaatcagggggtaccaaatttatgtaagccctgtgataaacattaaaaatttgcaacaggctgggtgcggtggctcacgtctgtaatcccagcactttgggaggccaaagtgggtggatcacctgagatcaggagttcgagaacagcctggccaacatggtgaaaccctgtcccgtctctactaaaaatagaaaaattagctgggtttgctggtgcgcacctgtaataccagctattcaggaggctgaggaatgagaatggcttgaacccggtaggtggaggtgcagtgggccgagattgagccactgactccagcctgggtgacagagtgagactctgtctcaaaaaaaaaaaaaaaagttgcaacattttattaataaaatatttgaaatttgtgtataaaattgtatctgttaggccataagatattagttaatacatcaatgtttgcctgacaaggaataaaattaataattaaacaacttgtctcaaaaaattaaggatacggccagacacggtggctcatggtcataatcccagcactttggaaggtcgaggcaggaagatcacaggctcaggagtttgagaccagactgggcaacatagtgagatcttgtcagttaaaaaaaaaaaatcaaggataaaattaaactctcttctaactctccagtataaattccaattatttgttaaaaatagaagttctattactagcacgttcttattttcctctaaaacagaggtaatgttatgttgattgactttccaactttcagggcttagttaaaaaggtagaagaggctttttgtggagtctgagaactacaaacaccatatgaaatctgaagaaaaaagagctacttgtttcttcttgtcttttggtgcctacttattggcctctcattgaataattagttacccaggcaggatggtgcatgcctgtaatcccacctactcgggaggctgaggcaggaggatcgcttgagtccaggagttcgagatcaacctgggtaaaatggccagactctgccttaatagtaattaaaaaaaataattagttaagatatccaagtacagtttaagtataaaaagtattataatagaaaattcatataagtggaattgtgcactatatgtgtttctgtgactgccttatttcactcaatgtcctcaagtttcattcatgttcttatatattacagaatctaaaatagtcaaattcatagaatcagagagtgaaatggtggttgctgggggctgggggagggagaaatggggagttcctaattaatgggcgtaaagtttcagttaagcaagacaaataagctctggggatcttctgtacagtattgtacgtagagtcaacagtactatactatatacttaaaaaattgttaacagagtagatttcatgttaagtgttcttaccaaaatgaaatcaaatgaaaaaggatttgaataaacatttacaggtttgcagcttttaatcctcacaataattctatgagatagatgccatgagacaartgaagcacagagggatgcagcactttgcccgaggagtgcagctgtgagcagcggagctggggttcccacttgggctgtctgcttccagagcaccctcgctgaacactcwctgtgctagacagcacagccataaatcctcagagcccatgatttgtggtgttcccttcagcagtctctattagtcagttctcatactgctaataaaggcatacctgagactggataatttataaagaaaaggggtttaatggactcacagttccacatgcctggcgatgcctcacaatcattagggaagacaaaggaagagcaaagagatatcttacatggctgcaggcaagagacagcgtgtgcaggggaactcctctttataaaactatcagatctcgtgagacttattcactatcacgtgaacggcatgggaaagacctgcccccatgattcaattacctcccacagggtccctcccacagcacgtgggaattataggagctacaattcaagatgagattgggggggacacagccaaaccatatcagtctctatcaagtaaaaactcattttcttcagaaaattttattttggaagacagctatctataataacattattattttgtgcacatccaataactacccatttatatctggcattctgtttgtttcctagggctgctggaacaaattaccaaaaaaggttgacttaaaacaaaaatgtattatctcacagttctggaggtcagaaggctaaagtcaaggtgttgacagccatgttctttttgaaggctctaggggaaaatccttccttgtctctcccagcttctggtggctccaggcattgcttggcgtgtactggtatcactcaaacctctgcctccatcttcacaagaccttctcccctgtgtttctcctcttcccaaatctccttctccttattaagacactagtcactggatttacagtccaccctaaatccaggataatctcatctagagactcctagctacatctgcaaagacctatttccaaataagtttatattcacagggatgaaaggaatggttaggacttggatgtatcttttttggatcacacttcaacccactacaggcataaaactgcctgcattattaacaacctctgttagaaagtactacttctgtgctttgactgttaataaatttatattaatatgtaatagtagtatgcctgttgtgcagtatgtcatattttctcttatagctagatctaataagatccatttgttttgcagccagcaatagaacatcagatagccaatatgatgctttaattactagcaatttggtacctatgtatgaagaattcagaagtaagtatgaatttagagtattaattttaaaatagttaagtgactccttgaacttccaaactaaacacatatttttttaattgcaatttgttcctgatattaagggtcattttgttctaatggtttaaatataggtataggaaggatccctcacatagtttcttttcaacttactttgactttgagtgacttgttgctagaattctgataatttgtttttaagccttaatttgattactgccactcactaaaagtaaatsaaatgtaaatgtttatccccagagtaataattaataaggcaacatgtgtgttctgatcatttttaacactcgctgtcccataagcaactcagccctagggagaaatttgaaggcatatttaactgtaatttcaagacaataactacaaaaacaaaaagctatcatcaatgtggctgtttatttttgcttgtgaagcctattctggagaattacccaatcatcactggcaattattaaggcaraatttcatgttatttaaatgtacttgtctataatagaaaatagtgtcatatttcactgaagtggacattttaaacactttatgattttatttttagaaatgtgggactacttccacagtgttcttcttataaaacatgccacagaaagaaatggagtamatgtggttagtggaccaatatttgattataattatgatggccattttgatgctccagatgaaattaccaagtaagtgatttgactttttgatttatcaatagggtctcatgaggggaaattccaatattttaagtaaagctcagtattttaaatattacataatacattcacagacaaatgttattgttgactattttcaatctagtctatctaaatatttaggaaagcttatattgcaaaaaatttaaactaatgggcaaagaaaacacttcctggaaaagtttagcaaaattttatttggaaaattgctgaattaatgggcaaagataacatgaaattttgtaaaggctaaggaggtagacaaaacttgatgtactatcaatgagtataaaaccaatccaacagtaaatgaaaaaaaagtcgagtaaaggctaaggtaaattttacaagaatagtgaaaagtcaagtaaagactaaggtaaattttacaagaatagtgaacagttcataaaagcacttcccaggagacaatgtaggtaaatttcatgcagagaactagtcctaactaaactgtacattttagtattaagcctggtcataacaggttgctaagaattagttttgaatgcagagcacagtaatagagttttagagaagtttcatctaccatttctctttattatcaaaacatatgaaggaccaaactaaacaattgtactgtctaagcctagattatgtaaagcaatgatttctacctataccttctgataaagtaacatttatgactaccaagtgtgtggcctttttctattttgttcaccatgtccttatttcagtgttgaatgaatactgaatcaatatttcagtattgactctacctttcacaatttattaattctaataattcaaactttgacagcattttctatatgctaggtactttataaagaactcacatatacatcagttaaactgcaaagataccctagttaggttccattagcccccagttagagttaaggaaactggggttaaacaacttatctaaattctgcaactaataagtggtaaagccagaatatgaacccagacagcctggctctgagtccatgttctaaatcacagtaatacatttctatttataccagcttgtattcctttggtggagtcagactttgcacttaaaacttttgaaagcactttcatgttcgttatctgaaaccgaagtactgtcacatcagttgtatggatttatccccatgtctacactgtgaagttgatagcacagaatcacttccttggaaagctgaggaaactcgaaactcggtaaatgacagaattagagggtgaatgaaagtccaaacattttgtggaagtgcacggctggaggtggaatctgggctccttcattctcagcttctgctgtattagtaaacactactgtgaagtatgaagtcaacaaaacgaggaaatgcaggaggcagaatatcatgctctgcttttttttttttttttttttttttgkattctaacattttttcatgttagaatgaccaagcttggacttctactgtaatctctattctggctgatgggagcaaaaaatatgtaagaccttgtgctttttatttattactttcttttactatatttttactttggcatttctttaaaactatataaagacatttattggcctggtgcagtggctcacgcctgtcatgccaacacgttgagaggccgaggtgggaggatcatttgagcccaggagtttaagaccagcttgggcaacaaagtgagaacccatctctattaaaaaaaaaaatccaaagtaccattagaagtaaatatatatatatatgtgtgtgtgtctttacatagtgtttttcatatatatatttacatatttataccagcttgtattcctttggtggagtcagattttgcacttaaaactttgtatgtaagttatttaaaaagtacctagcatatagtaaaatgctgtcaaacttagaattataagaattattattttacatgtatatgaaaaaaactatgtaaacacacttatcacctttagaaacaaaagtataataacatcaaaacatgttttcaattatgtttgtaagacatttagccaacactgatgttcccatcccaacacactactttgtggtgctgaccagttgtaaaaacaagagccacacaccggaaaactgccctgggtggctggatgtcctaccctttatcatccctcaccgacctaccaacgtggagagctgtcctgtgagtatgctttgggagggtccaggacccgagaaaatgagtcagagctcatttgggttctcataaaagtggctctgactaaaacattttttttaggtgtttcatgggaaaagttataacacaaatgacttcatttttaggcttttccttaggctattgatctctatgtaattaatatcaatttaaacatatatctgcatagttgaacatatatataccccatgtattttatttatatacgttttattcacattcactaataatgaaagaggtgaaatcttgttaatctcttttttctttttttatttataacatgacaattgtatgtatttatgaggatagtgagatgtttgaatgcgtgcatactttgtataatgatcaaatcaggataattaacatatctaccactttaaacatttatttctttgtggtaatagcactcaaagtcctctcttctagctatcttgaaatatacaatacattgttattaactgcagccactctactgtgtaatagaaccaccagaacttatttttattctggccacaaatcttaaagttcttcccaatgttagcactaaattaatgtttctgaatgagtatatacatgtaaaaattccatcaacttgaaccatgaggtgtgaaattgattatacacacacacacacaaacacacacacacagtgcaagtaacattctttttttaaacatcattattaggctacctcaaaatcctttttggatcaaggcagattatatgtaagtagttaattcgacttgcatataaattccttatagaaaaaatatgtatcctggaacttaggttttactgaagtcattcaacaaacatattgagtacctattaagcacatagtatcatgatagaaactctttagaatgcacaaaggaggaacacattgtccctgcttttaaagagttcatatacaacttcagtttatatatgagatataggcacacaatttagtcagtcaataatacaagaattattctaaaaactaaaaagtaaaagaggttgcaaagttgggatcaattgacaattaatgttaaaaggatttaatatttgaaattaaaatcacatttggctggaatgatcaataaagatttcataaaataaggtgtaagtagggctgtgccctgaaagatggatagaatttgagtatattgagaagactacaaagagtcttccatggagggtgggtatgaagaatgaagaggatttagtaactgattggatacaagagcccccaccccaaaaggaaactcaaagatgaatcagatttgaatgttagtaattaggaaaaaggcagaaagaggaaggttgggaatgagaactttttggcaggtagataggataagctaaggataggcattttaagtttgtggaaatgggcattgatgtggaaagtcccataggcaattagagcctgagaattgaagcttgggatctaggccagattgggattcatctatattctttcaggtgttcaatgcatgagtgccttcaccatgctgtgcactataggaggtgctcacaattagaaatccagtaaaatattagaagaaagagataagtgatgtaagagagggacagataaactgctgtagtagtatttcaaaggagaattacttcttgacagggagggtgacatttcagttgggtcatgtagatacgattttacttgagtgtttaaattgtctaaagaaggtggccaagtttagaggctgaatagtgagccactcactattcttaaaatgaggaagaagagtttctgaacaggaaactatcaggagatgttgttgaattgaatcccttcctactttttctgtcagcattttgtttggttgagacaagggtaagccattattctttacttccttttccaatgacagacatcaatgactgatacgatgtggtactctttaccatgaaatctggattaaacagttcgttattacagaggttctaggtagatatgatggagtgattacaatgagtacacaaagaaaaaaatatttgctatccctggtctgggcccttttgaccttctattaggactcttgaaaatgaatcttaagtagatttgtggtctcctctcctcttctcatttgtcagtgtgcactactaccaacttactcatcttaaaatttagtttatattttgtcatagcctctcaccccaaaacttctgattatcctgaacaacaacaacaacaacaacaaaaanacaaagaaacaaacaaaaacaacttccagcctgtacttaagtctcttcacaatttaccctcagttgaccttacaggctatawgttccaggtcaattggagtccttgaaattacttgaacacatcttgagtttgcttacctcatcactgttgcctatgttcttctctcctctagaatttcattcttttccatctgctaaaaattccatctgggcgtcaaggtaaagtgcaaataatatgaagctttccttgattattcaaagtagaagtgatctctccaaagttaacagagcatcatctctattgaataggacatcatcagtaataaattggacatatccaagattttgaggaatttgcagtatagtaataagaatgtgacatctgtatagataattattagacaaaatgcaatgagtataaagaaaacttaagccaagctatgattataaaagagattgcaaagttaataagagtagctgtcaattagatatggggaagggaaaggcaagatgagagagaggcaaagatgactaaaaatccagggcatgactgaccaggaaatgtatacgatagattatcttttgttttgagaaggatggatttgctcttggtggtcttcagtttgacagactagttgaatatttaggaggatatatgagaaatagtataaaacagaacttaaatgcatggattttggagttggacctcctgggttcagtgaatgacttcgtttctttgggcaaatatgttagtttcctcatctattatatctaataagtataaaatattcacctccttttatgaagtttgtaaagattaaacaaaataatctatataaaaccctaagacttcccaatataaaaaatggtggctattataaaggaatcatatcttaggatgaagttacattctaaagtcgacagaggccaggcatagtggctcacctgtaatcacagcactttgggaggccgaggcaggcacatcacctgaggtcaggaggtcgagaccagccttttactagagaccccatctatactaaaaatacaaaaattagccaggtgtgatggtgcatgcctgtcatcccagctactcrggaggctgaggcaggagaatttcttgaaactgggaagtagaagttgcagtgagtggagatcaggccactgcactccagcctgggcaacagaacaagactctgtctcaaaataaaataaaataaaataaaataaaataawgtcaatagagagtgaaattgaatctcctatatgcaaatcatccagaaagtgtagtacattcacaaactgtttcttagtaagtctaaaccagccaatatttccaatagcatttggataggtaattgtgctttgatgcacctgataaaatagatggctggctttaaacattgcattgtatggaaactctgtactttaaatatttgaattacacaatgtacagaagtactcctactattaagaggttccagggaactgagatcaagctataggaatgatagattcacaattttatcccacacttggtgtaaggaattagatcatatttccttatttattttgtcctttccttgttcctttcatcttttcttccctcctttttccttttccctcctcctgtcatctttgtactgtaaaattctgtcagataaatgagaatgtagccattagtccaagtgactttcattgtaagttactcagcagatatggaaaatgtaggtatggaacttggaggagaaatcagaactgcagatctagatttgggattaaatcattggtgtgaaatacaattgccaaaggggagaaagtggaaagaaaagatcccaaatcaaattgaggaaaatatgcttccaggaagtatagtcatctgaggaaasagaaggtattatcaaacaagtaaacagtagagttatggataacaaaggaggaacttcagaagcctggggtagctaactaattgaaaagcctgaggacaacccattcagtgaggtcatcattgacaaagtagttgcattagcatgataacagcaatcactggactgtaagtggctaaggagagagaataagaacgtggatagggcagaaaaatgctgaaatcaatattgcctcaaaaaatgagttgtattttggggatatacaatactcttaattctgtaacaggtcatttatacacacacacacacacacacacacacacacacmtataaatatcaaagtatatttaaatatagctcataaaactgtatagcctattctgttggcatggactagtgcagcgagagcagttgtctacagctggcttctgttcagattagttggtgccagcgacttactcaggttaaatagctgaagtatcgtctctgcataagtatagttttgtgttatgctttgtggtcatttccctgcaaatttaaaaaagggaagactgtcaggtgctgggtaaacatttagttggatggatgccaagtaagtcaggagagagtagagtcgtataaaccaaatgggagaaaatgttatggaaaaaaaagtgatcaaagatattaggtgctgctgaaatgtgcaatagtaaaggcagaagagaaaaacttctaattagattcccattgaaagaaataactctaacatggcgcatttttttttttttaatattagctcgcattgtgaatctgacacaagtgctttaatggttaggaacaaaaagtatttcctcttactcttcctctggctcagatagtggctatctgtattaagcctgcatacttaaacaagtaaaccactgcatcgaagtcaaatgagaatcatgaaaacacagtaatctgattaaataaactttgaaactttcttattatgtgaaaagttaactgaactttagcaatatcatatgaataccagaaaattattctttataataaagaataaagaatgtcatagaaacccatgtttctaaattattgaactaactttcatattgtaaaaaaaatccaaaataaaaaggtcaagaaataactgaaaagatgcataaataaacaatagtcagcataataaaatataaacagacataaaacactattttacacccacggtttggcaaagatgtggggaaatgggaattatctttcactgcctatagaactgtaaattggtacgaagactttgaggagtgctaggtttaatatctgataaagttaaaattgaatgtactcggccgggtgcggtggctcatgcctataatcccagcactttgggaggccaaggtgggtggatcacccgagatcaggagtttaagaccaccctggccaacatggtgaaaccccatctctactaaaaatattaaaaaattagctgggtgtggcggcgggtgcctgtaatcccagctacttgggaggctgaggctggagtgcagtgagccaagatcacaccattgcactccagcctgggtgacagagtgacaatgtcaaaaaaaaaaaaatttgaatgtactctatggcccaacaattttattaatatatcctagaaactcatgctcttgaacacaggaggcatataccaagttatttattatagcattatttatagtaacaaaaattttatcaatatgtaaygcaaaatttaattgttttgcatttaaatgaggaaatatcacaaaccacagctaagaacaagtcacttaacaagacctagatatatcactatagattacaaacgttaataccgaatgaaaaaaattgtagaataccacttataatattaacataagtttaaaaactcatcagtactacatattgtatagtgatgtacagtaaaagtttgaaaaaacagactggattcaccctgatataaagatgtttagttctgaacagaggagccctggggacttaacttcatctgcaatatttaatttcattaaaaaaattacatctgaagtaaacataaaaatagataaattttgacaacggtgttctatgttagttatagtatactttgtacttgtgttttctttttatttttaaaaactaaatttagctgtatcaaattaagatttaaggaggtaaaaatcatcggcaaaaagacaacttctaagcartaaaaatatttctgttcatgaaaaatactgccttgtgaaaaaaaaagtgttgtgcttttctttttcaggaaggtaaaccagaagctctttgggttgaagaaagatttacagctcacattgcccgggtccgtgatgtagaacttctcactgggcttgacttctatcaggataaagtgcagcctrtctctgaaattttgcaactaaagacatatttaccaacatttgaaaccmctatttaacttaataatgtctacttaatatataatttactgtataaagtaattttggcaaaatataagtgatttttttctggagaattgtaaaataaagttttctatttttccttaagtcccctaaaagccataatttttattattccyttttctcttttttcaattctatgaatatgtattattttaaagttatatttttcacacagagatgatgctatattacaccttcccttttttgttggtttcttaaactctaatctcatgacagattataccttccttattacttgttttatcttactcagaatctttgaatatatttttctgcccagaattatctaaacaaaagggagaacaaaagaagtatgtctcacttgggaactgaatcaactctaaatcagttttgtcacaaaactttttgtatttgactggcaatgctgattaaaattaaaaatgcacagaacttttgcgctgttaatttcacctgtaaaaactgtcccaacagatgtgcttggcacaaatgcatgaaaatgacatcttttatgatagcaaaaaccagaaaacaacctaaaagactggttaaacaaattatggaatctgtttaaacaaatactgttccatcactataaagacagaagtagatctatatatatcttgaatgtatcactattattaagtgagaaagcaagtggtagaacaatgtgtgtagtctactgtcatttttcaggggtcggtaaacttttccataagggactagatggtaaattttttaggccatacagtctctcttaaaactacttactctgctgtggcatcaagaaagcagccatagataatacaaaaaaggagtaagagtggttgttctattagtctgctttcacatggctataaagaaatacctgagactgggtagtttataaagaaaagaggtttaattgattcacagtttcgcatggctggggaagcctcaggaaacttacaatcatggcagaaggagaaggggaagcaagcactttcttcacaaggcgacaggacggagtgagtctaagcagagacaggacagagtgagtgtgagcagataaaatgccagacactyataaaacaatcagatctcatgagaactcactcactattacgagaacagcatgggaaaaactgcccgcatgatccaaacacttccctccctcggcatgtggggattacaattcgagatgagattcaggtggggacacagagccaaaccatatcacctatgttccaataaaactttatttacaaaaacaagtggagggctagattgggtccctgggctgtagtttgtcagcccctgtttcatataataaaatctgggctgggggaagcagaaattaatagtaaaaaagataacatttttattttttgctctttgtattgcctgaagtttttttttttaactcctatatgtatttctttcattttcaaaatagagttatgaaccaaagagatcccagcaattatttcagggtcaatgctattggtcagattttggggttgctagactggcaattttccagatatttctctgatataaagatcagttcatccagggacacaggctttgtagctaatgaaaaatcttgtgacctgaacttcaaggaaaacaaattcaattgctttctatttctattagaatttcaactgaattatggttattaattacaaccaattaagatgttagtttattcccactggattttttttaacatagtttcttcacatgtagaatttaggtaaaaaatttatgcagtgcaaaatgtgcaatacagagaggctgcaagttaagacacaaataggaaattatttccggatacatagcaacaatgttaatactcttcatatagagacaatttttccaatcagtgttctcctgccccaccatggcctggaaactaaataagatcacctggaatttagaactcacaataggaagacaaatggtgggtgtttacaaccctgaaatgagtttaataaccctggatttcctcattacttctgagttggtctgaaagtggctaagttgttgacataaaaataaaaagagaaaaattaaaactatgtattttttttgagatggagtttcattctgtcaccaggctggagtgcagtggcgtgatctcagctcactgcaacctccacctcccgtattcaagcgattctcctgactcagcctcccgagtagctgggattacaggtccccgcaaccacacccggctaataaaatttcattttttacacagagattgtgcaatattataccttccttttgcgtattcattattccattaaaaaagaaatatgtatatgtaaagccagtttgaatgaatgaatactagtgatttaatggatcatgaaattatagaggatttggtgtatctacttaataactttcagtatgtagcctatatttacaatgaacttgttttatttttaaaaatctgaaaatgtaaacaataaagttagttacactttaaaatattatttagaaaggattttatatgtacacaaagtttgcaagaatagtataggccaggcactgtggctcacacctgtaatcctagcacatttgggaggccgaagtgggcaaattacttgagatcaggagttcaagaccagcctgggcaacatagtgagaccctgtttctattaaaaaaagaatagtataaagaactctttataacccgtacccagctacatcaattaacattctcagtatgtacatttatatatagttttatttttctcactgtacttctgagagtacattgtagtcattatgcccattaaccctgagtactttagtgtgcaaagatcaaggacattaactcacagtaagtttaatgttggtacaatgctataaataatctaatttatgaacctatcaatttttttcatattttcaacaattctttaatgatattttcttttttggtctaggatctgaaagagaatcattcattgtattacttttttctctttggtctcttataaggtgcaacaattcctcagcatttaacaaataatgttgatacttttgaggagtccaggtcatttattttgtagaccgtccctcaaatgggtttgtctggcatttccagatgactggattaacacagtgcatttttggcagggacattacattagtgacatttgtcctcagtgcttcatatttagaagcacatgatgttcatttgtgccatcattaatccatgccagatttgatcagttggtgatgttagtgttcataagtttctcttctgtagagacagtatttttcccttagcaatttataagttatttgtagaaggatatggagaccctacacatatcctgtttctcattaaatttttacccaacagcttcagtatccgttaataatctttccctgattcaatttttacgatgatagttgcaaagggagtgattcttagagactccattattttacgtttatcagcattctactataagcaaaagtgttctctcacttattttgttatttatttatttattattgtttgtacagactcattttttttattccaacagattagaatacattaagatcattacttatgtcagtactcaaatagtcccagagttggtcaacaggagcttctttaagtggggtcctgggtcatttgtatataccccattattttttgaggactttcttattttctagtacagaaaaaaaaattcaggattattttgtactttccctgcactaactctggaatcaattcttcctccaaaatgccctggttccatttagtgggcactggtgccctaattgcttctggggtatcataacatctaggcatcttcagtcaacaaaagtggaatctatatctatgtctctttgcctatatctatcattgtgttcataaatactgtaaacttaaagtaaaatcctaagtcttccactgatagaacagaccctctgtggccaacaggaccccagaaaaaccttaaaactgagtttctggccacagccaggagagaggggaggtcagacatgcctcattctacccactctctttcatggtttagacacaattgaccagcattaatgttgaaatagatatggtaagactgacagaacagactctgtggcaataagataccaaattatatacaagaccaaaggccatgccaggcaaggatgaagtcatgcaccctacacttaaagaataaactgctctatttatttatttatttatttatttatttatttatttatttagagatggagtctctctctgtcgcctaggctggaaggcagtggtgcgatctcagctcacggcaacctctgcctcccgggttcaagcaattctcctgcctcagcctcctgaatagctgggattacaggcacatgacattacacctggctaatttttgtatttttagtagagacagggttccaccatggtgggccaggctggtctcgagctcctgacctcgtgatccacccgccttggcctcccaaagtgctgggattactgtcgtgagccacctcgcccagcctagaataaactgttctaactgccacaagggtttttctggtttgtttgttttgttttttctctcaagcacaggctttgagataagcaatattaaaacaatgacaactcgtctcactgacactgactaacagaaccactgttccaccagctataactacagctttgattggacaagggcctgatttcagtaactttcttctgatagggagaccaccgaccacggactggttctgactggtttacagaggttgctcacttgtgtgactttgtaacctgaaaagatctttcgatgtatagggcccaactgtaatacatttgacaagaacgggtgcattcaaggtggtatggccgtagacataactgtaatacttttgaatgttaagtctccacccacaagtgaacatgggttatatgttacatgcagatttgctcaatacacatgtgtcaggaccaccttcatgaatatttacagcttctcccataacctgttaaatatgtatttttagccagcctcttcagcataaaactactactccaatctttcctgctttgaagtgcttgtctggtcttagctagaggaatatttcccatcctgtggggtgaccattttgcaggctgtaaccatttacaaaaaataaagtcttttccaaactcacagatttgtgatttttttaaagttaacaccacatgaataaaaaccatgaattcaattataatccaatattgcatagtttttctaacaactttctattttataattgtatcttccttctccaatagtgagaaatttggttcccaaaatcgtcaatatatttattcatatgctccaatacacggagagtaagaattgcagactaacaccacttaaagaaggaaatctaccaagtagaatgcaagaagtgtttctaggctaagaacttggtcagaatattgttccagaattatttggacttgtttttcccccttcagtgtagttacattattcatttgaaatatagtactgctcatttgtttctatttatattctgttaaggagtttccccaaccttgttgagtcacgtttatttgttttagtgtataaaatattaacgattttaaaagccaaaattagatgaaaagtgacactcagaagaagtgtcctccctccactctttctttttccatccaccctgtgtttacgaccaacatcatttgtttctggttaatcatttctgtatttgtttttgcaaaaataggcagatagatatatttttcttattttccttttttatgcaaaagaggcatactatatattccttttgaacttttttttttaatatcttttttattttttatttattttttttgagacagggtcttgctctgttgtccagcctggagttcagtggctcaaataggactcactgcagcctcgacctcctaggctcaagcaatcctcctgcctcagccccccgagtaactggaaccacaggcatgtgccatcacacttggctaattgttttttttttaattttgtgtcgagacaaagcctcaccatgttgcccaggctgatctcaaactcccctgagctcaaacaattctcctgcctcggcctcccaaagtgttgggattacaccacgcctgggtttctttcacactttttgaaaaacttgacagtatatcccagaagtcactccatacacataggtcttcctcatcctagtttattgctgcatagtactccattgtgtagatgtatcatttcattacatcagtctcttatgtaaaagcttttaggttgtttccaacattttgtaactacaaatatccagcaatgaatattatatatatgcagttttgcattattgaaagtgtatcttctgggcaagttcctagaagtgggtaaacatatattgtggtttcatttt

SEQ ID NO: 94759 - DNA, 95832 bp, Homo sapiens
tatatatgataccaaaatcaggttccataggagaaaatattgataaattggattttataaaaataattttaaaaacttgttttttaaaagacaacattaagaaaaagaaattggataaaatatttgcaaatcataaatatgataaaagacttgtgtccaaaatatataaaaaagtttataactcaataatcagatgagaaacaaatctgataaaaatgggcaagagatttgagtaggcatttcatcaaagaagacatatagatgacagataagcacatgaaaaggtgttcaacataattcgtcattagggaaatgcaaataaaagccactttgaggtaccaccaaacacctattcaaatggctattataaaagactgagaataggaagtattgcaaagtatgtggactccttacccactgatatactgtgaatagtaagtgtaggaggggcatatggactccttacatgttgctggcaggaatgtacaatggtacagccacattgggaaacagtttctctgtttctcaaaaatttaaatatacgctttgcatatgacttaacaatgaaactcccagttatctacccaagggaaatgaaaatgcagattcacacaaagacatgtacatgaatgttcatagaagcattatttataatagctcaagctggaaataatacgaatgtccagcaactggtgaaaagataaaatatgatatatccatacaataaattactactatgtataaaaagggactactgatatttgcatcagcatggatgaacttcaaaacattatgctaagtgaaagaagacagacacaaaagacaacttagtataataccatttaaatgaattttctagaaaaggcaaagctacagacagaaagcagagaagtctttggttgggactggaatgggagtttttgattatacatgtgcagaaacaaactttttgaagtgatgaaattgttccaaaactggatcatattaatagttgcacaactgtataaattattaaaaatcactgaactgtatgcatataatgggtagatatgataataggtaaattgtactttaatcaaacttaaaattcaggttacctggcaaccctacattttgtttgaaatagaagtgtaagagataatgaaggagtggcagataccgtggttaacaaaaagtgaaggactagaaaccaacttcctgtagcaggtaatcagcgacaatctggggccagtggtgtgggggtaaaaagaatttatgaagatacttgtaggtaaagaaagtcatatttattagagcacgtatgaaaatgtgttgcaagggaacaatgggcaggccagcaagagaggagctgactgcaaggagacgaaggcttgctggggatgttctagaatggtgcttgtgctgtgtgctgaagagggctttgtgcagtactgataacaccgaggttgcagtgaattagcttgcatttttttttaatcacccgagggtctgatgatagctgagtgcaggaagattgtgagttatttgtgcaagagggctacatgttctggaccacaaagcaaggcagacttacagcttatctgctttatatttttgctttccctcggtcccgccatcctgactccttttccctaattagaaccccacactctctttggatggtacatgcgttttccattttcccaggttctattactctcctttggatcttacacttctgaattctctctattcgttttgttacctaactgatccctgtaggcatctctccttcatcccagagcagcaagaatcctttccttaccctctttgtagatgcaggcccaataacaggtctcaaaccttcccagagattatatataaaccatgcataatataggagaaaattaaatctttttattctctcccttaggggtagtgagtggttgatttacaaatgcaaatgatagatttaaatgtttgtgtaaagttgaaatgtcaaacattttgttggcatttagagatattatctgaaagagcattttacaaataaggaaactaaggctcagaggcttctggtaatctgttcaaggtcacatagttatccaagcttcttgctccaggggacatatttttgtgctttcaaaaaaagaaagaaaaatcaggatgtcatacacattcttaaaaataaattaatgccacagaaaaatgttttccctaggcctcacaaagattaaagaggcttgtgggttttttttctgtttagatttggctagatgtctttcttgttttactggcgaattagaagaaagctggaaaagctctgaaacagctgctaaaataattaccctacagcatatttcattttttaatcactaagaaaagttgtttcaaagtaatatttcaaagtaataattaaacattgataaattgtttttgtttggtgttttggccttatctacaaccaaagcttcaagcaccaagacagaaatgtctaaatatttatgttacaataaaacttaatagaaaacttacacaaaatcttaaattatcatctttactgctattccagattagagtatgcaatcactaaaacagagtgatttaggattaaggatgaaacattcattgttcacctttgcattaacccaaaaattgtgttgtggttttatatctcatgaccttattgtactttggaatgtgatggtgaagctgtccctcagatcatttagaataaagaagactgaggcaatatttcactataggctttgcaatgtctatagctaaacctgaaaatggcatatctgactcatttttttttttttttttttgagacagagtctttctctgttgcccatgctggagtgcagtggcatgatcttggctcactgcaacctccgcctcccaggttcaagcaattctcctgcctcagcctccagagtagctgggactacaggcatgtgccaccatgccctgctaatttttgtatttttagtggagactggttttcatcatgttggccaggttggtctcagacacctgacctcaagtgaaccacccgcgtcagcctcccaaaatgctgagattacaggcgtgagccaccgtgcccggccttggctcatttttattcttccgattttagacttccaattgggtttttataattacccatattaagtcccacctggcacagatgaggcatgagcattaggcagaggccacatcctggtgacgtgtgtgccaggtctgtcctgcagatgtgctacattttgtttggcttttaaacgtgctacattttgtttgtttgaagaaactgtttctctgaattttgtagacaacattttgcaaccggagaattcacacaaacatttaaatttcctgcttctcttgaaaaatctgaccatctgcccacactgggcacacaatcctgttgaatagatgctgcaacctttaacatggcacatggtttgccttttgcagtgtgtatagggctgcctcagtcaaatatggttcatggcatattgtgctttcaaaaaaaagaaagaaaaaccaggatgtcatacaaaatcttaaaaataaattaatgccacagaaaaatgctttccctaggccttaagatgtttgtgaccctggagactgcacactgtgttttccaaatgttaagtctttaaagtggttcgttgccttgagatgcagacaatacacttcttccatttgttttgtcaggtttaaaggcactttggataatgtctctgttgagttgcttttagaggttttgacactcatttgaccagtctcagtggagcaaatctttgtccttgaatctgatttttggaaagagtcaaaggaaaatttggagccaagtttggggcagaaaaatatgtgtgattatgaaacagtgaaaacctgtttctcttgggtggtttgtgagctgactcaaaggtaactttttaaaaaagttcaataatgctttgagggaaggcttttacttcttccagatgtcaactgtcctttctactaagctctcataatattgaagtagctttgttgtctatggtgacatccgaggttcttggtctcacggccacaaagatcaaatatgtggacacacacaaagggtgaggtttggagcagaatttttaataggcaaaaggaggagaatagctctgctacagagaggggtcccaaaaaatgggttgcaatacgtggtgaaatgcaggggtttttatagatgagctagtggggaggcggtgtctgatctacataaggagggaaaacccggtttcgtgcatatggcatgaaaacccggttaggaccaggtgtgtcatctgcatagggcttaagtgtctggcagccccggccccaatcttctactatataggcaggtagctactccgtgttgcttatttccttcttactgtgcatgtggtaaaaaagaggggaggtggaacccccatggtggacatgcctggccccagtagccccttctgtctgtgccgctgccggcatctcccgtgcaagcttccagtttccttacctatgtttgcagcccaatcttccaggttgctctttgttagaaaggaagtgatttcttgggctgctttttgttagaaggtaagttctgccgagggctcttttgctcatactatctgcctaaataatttctatctcctgtatcaatatcctatgtgtgactctattctgcatatatgacttaggttttaattattttgtttacgagttggtcctacccccccacccccgcttccaccacacttaaggaaagatacattttaattcattttttatatggtatgcatagttggaggccaaaagattgagttgaaggattcattacttgatgaataaatggatgggtggatggatgagtcagtataaatgaagagcatcccaagttgactattttaaagggataacatgcattttatatttgttaaacattcattctcatttgtaaacacttgtatatattcatgtattcaaaatgtattgaaaattaattgttttccttggtacctgaagtcagtcctgggtattgcaaagtagttcgaagtcactggtttccctctgtctcacttcactacacactggtgattttgctaagtgatgagccagaaaatgtacaagttccagaatcaaaggtaaaacaaaacccaccaagaatcagctcactgttagcgtcctagttgaaaaataaggcttatcaaagtatttcagattgcattaacacttttgatatagctaggtatcagtgtcaacctcaggagagggcaacgccaactcctgaaaccttcaatacagaaagtctagaaaaataagcaaatatacatacaaacaatagcgagaagactccagaaaccacataaaaccgtgggaatcgaaatatcccttacgtgtgttcagtacatgtgaacccacgtattttaagtggacgatttctctctcagagtaccgtaggtagtgggggacggggcgcagagggggagaaacagaaagtcgccttcctccatggttcatttgcatttccatccagaaactcacaggtcgaccccaagactccactctctcccgcctttgagaagccggaccggcatcggcggctgcatccttctcctcctccccgctctattttggggccccatgatctcatgccctctgcagaccacacgctgcaattccagcccagcccgcgccgcgaggccacgcagggcgattcctgcaagtgtcgggagggtggccggggcgcggggaggggacggcttggggggaagtttaagacacgcccacgtaagggacccaaaataaccgacacacagagtgcccgaaatcagacaggaagccaaataatccggggcgttgagtcgctttgccctgactgcgagagccgggtgtagggcggggagccaaggatctgaccgcgaggggcgggcgcggcggggaggggcggggcggggcgggcggcgcggggcctattaaaggcgcggccgggcagcggggccggagcggccggggccacgatggagcgcgacggctgcgcggggggcgggagccgcggcggcgagggcgggcgcgctccccgggagggcccggcggggaacggccgcgatcggggccgcagccacgctgccgaggcgcccggggacccgcaggcggccgcgtccttgctggcccctatggacgtgggggaggagccgctggagaaggcggcgcgcgcccgcactgccaaggaccccaacacctataaagtactctcgctggtaggtccgcggccaggccccggcgcccgggagggctgggagtacggggagggcggcgccgagctcctgcgctctcagcgcagtcagcaccgggcaccggagagaggcatggtccgggagtgcttcttcgcccgcgcgctctcctccgcagcctttgcaagtgccctacacagccgcccctgccaggtaccttgccagggcaggatggttcactctcacttgaattatggatgcctgtgaaagcaggctgttcaaaacggtcatccttagaaatactcgaccccctgccccaggagagtacgggtttttagaggagaaaaatgtcaaacgcgaaagttgttggtcttaagaaggtgcatcaatgtgttgcttcttttagggggctctgggcgcagtatacatgacttcacttgggttaactgattgcagttgaagagttagcggagctctttaagttttattaggaactctacggaacactttttccctttcgctccgttttggaatttccttgcaggtgctcagaaattccatggatgttcacattatgtgactgaagaaacctttatgattctttgcccactcttctaaccagaggctacacggtttgtgttgctaacaaaagctacctattactcctctgctattttgctatgacatttgcaggacccacagtcaacttcatgaaatgtgggggttggtttttattctgaattcatggtgggaagtgctgattgagagaaggcctggattcctggctgttattatttgctgaggccttgcgtaactgtccctaaacctcaatttctaatgtgtgaaaatgggacaacatcaactcccttgtgcattgcatgggattattgtgaaaatcaagctgaagaatgtaggtagggaagtaaattgaaaacagcaaggaaatagaatcatttttattgtattatatggaaatcacagatttctatgtatagtgtaccctaaaatatatccccttacatatgattgaataatgctttgtagaaaaatttctaatttttcaagtctcctttcattttgtatgcatttccattttcactatatttgggacatcatggagatgctataatactttgaggaatcaatcttcctagacttaagagatggtgccgtatgcttagtacttaaaaagaagccttagtttcacagaataagtaccccaagccacatgatgtttgcatctcaagataaaattttgcatcttgtaacactgttttgagtctataataacacaatattgatgagaacttagtctcttgagtcaccttttaaaaattttgttaatggaagaccttagcttttacaacctgatcacttaaattgtttagtattaataccttgaggtgtttcacacacgatgaggtagtcgataattgtatatggaatcagtgtgtaactcttgtgtaaaaccatttctacatgcctataaacctttacaggttttccaattgcaaaattcaggttttaaatttttcttgctcatttacttatacatccacaacagatatcagcaaaggtctagttttggaataagctgtccagtctttgagacctgcagtcaactggtcaaacagcattctgtgtgatgatgctactctgggcatttgacatggaagtgtcctaggacttacttccacaagtaggactattatggaccttttttatccattaattggggtcttttgcatctattgaattggaaagaattyttacttcatatcttttgatggaacactgtgagacattaacatacaaatgttaccaaatagacctggtgcggtgactcatacctattatctcagcactttgggaagttgaggcggttccattgcttgagcccaggagtttgagaccagcctgggcaacatgatgaaacccatctctacaaaagatacaaaaattagctgggtatggtagcatgcgtctatgtcccagctacttgggaggctgacatgggaggttcagctgagccagggaaagttaaggctgcagtgaactgtgattgtgccactgcacttcagcttgggtgacacggtgagaccctttattgttgaaattgctatttagctactgaactgaaagtgcaaactcgtattcttctttcccttccctacttcaatacctttttcccccaaccccgccccccccccaarracttccccaaataatgggcttccaaatggaaaaggccccaaaagcatcctgacaattgtsgtcaaagagctctgggatatgtcttctagaaaggagctgcaattatagaattccttttgttttcagattaaacctcagcacacttttcataaagctgcagaaacagattgaactaattgcaacctggggttgggattaggagaggcccagcactatgatcctcagctacactgttttaatttagcaggataaatagaagagttgcgttgccttgcctttcagaggcaatcatgttgcagtggcaatgtaatttttacattactctgcagttttctcagataaactaaaatgatgtagatgtgtgagagtggatgaaggagtgaggattctgtcctaccctggcttctccccattgtggtggttgatcttaggagagggccaccaagctgtgctttagaggcttttggccctgggccctggaatgcttgtgcctaggtactgagccaaactgaggaaaacagcaagagggaaaaacaagtattattctctacatgtgtcagtaggtatgttaaatattagatgcctttccttggttgtaaatgaagttttgaactgaagtgtagacttccaccgagatgtgttgacttggagatgtatttaaatatccttcttgtttcttggtgtgattttacagtsatgtaattctcaactacattgcaatacatttctccagttagctcctcaaaagcattttttttgtgttgtttgtgaccttctgctatayttatgaatacatatatctgtgtatctgtgtatgtgtaaagggcttgcgtatgggtggtggtcactgaagactactttcatgtttcagtgaaagagttctttaaaaaaacatatatctatatctatatctatatatctatatctatatctatatctatatctatatctatatctatatctatatctatatatatgtagagagtccgtttggctcaagtttgaggactgcaacccaggagcatagattcaagttgccctgagtagatgctcctattagcagcagttacaaatgggtttttaaaggaaaaaggaagaggcagttcctaagttgtttatcaagcattcatgttacamtaacgagctattggttggctatacattgttctttgtatcacacattccaggaacatgaagatagtgggtgaggcagctgtcaggaacaaaatgcttttaaagaattgcccctgggaatgggtgcagtgatgtgactgaagtcccatgctcatgtccctctgggcctgataaattttgcatagttcgcatatctcagactgctctgagcaatttttctttctcatttcctccttttaataaaaatctttctcttcttaaaatactgatgatcaacgttttggatgtaagtttgtcccacattgctgggaaggctcatttccggatagtcttgtcccatgtcagagggaatgagatgggcagaagtactatcacttaaaaacttagtgaggttccaaggctgaattggtaggcaacaattcagggattggattgaaaaataaggggacagagcagcgggatttcaggtcattcacttacactggagttgaggtatgttgggtcatttctaagcatctagctattatgatgagttttttgttatagaattttgtggtagactttagacatctagaaatacaaagcataatcaatttaagaatcaaaaggatgacacaaataaggacaattatcaacaaaacaacttgaaatacaaatatgaaaagtgttcctattcctgaaggtaaccaaatgaatattttaatccacttcttgtcctggtctaaagaacaaagtgttgaagatctccactgaggaagatgtccacttaggcagggtagcctgatattggcccttctaacgtggctaggagtcctttatttgatggtattttctattaaacaaaatcttccaggttggagaccatgatctttgatgtttttgtctcctaagagcttgctgttaaaagaatccttaattaatttagaattttcagtgagaaacttataaggccttgacaatagtgaagagtatcaccttgttaatggaaaaaccaaactctgtaaaatattttaaagagctttatcctgagccaagatgagtgactgtggctcggggaaacactttctcaaggagtcctgagaatgtgcacctgaggcagttggattactgtgtgtttttatatatttcagggaggcaggagttactggcaaagacataaatcagtacatgaaaggtatacattgattccatatgaaaaggtgggatatcttaaagcaagggcttacaggttatttattcagcatattcagagattttttttttgagacagtcttgctctgttgcccaggctagagtgcaatagcacaatctcggcccactgcaacctcccgctcctgggttcaagcgattcttctgtctcagcctcccaagtagctgggattacaggcacacaccaccactcctggctaatttttttgtattttagtagagacagggtttcactttgttgcccaggctggtcttgaactcctgagctcaggaatttcacccacctcagcctcccaaagtgctatgattataggcgtgagccactttgcccggtgattcggagattctttaatttgcaattgattaaaggagtaaggctctgtctaaaacttggaatcaacagaaagggctgttgtggctgtgtgtgatggctcatgcctgtaatcccagcactttgggaggctgaggcaggtgggatcatttgaggtcaggagttcaagaccagaatgaccaacatggtgaaaccccttcaaaaaaagggtgaaacctctttttttgtaaaaatacaaaaaaaattagcagggcatggtagtacatgcctgtagtgccaaccacttgggaggctgaggcaggagaatcgcttgaacctgggaggcggaggttgyagtgagccgagattgcaccattacactccagcctaggtgacagagcaagactctgtctcaaaaaaaaaaaagggatgttgtaagttaagcatgatgctatgtagcaaaattgatgggtgtgcagacatgacttaaccctcyccttgcatacccttaaggtcttgtttataacttggtgtcttattgccacagagacgttttcgcggtcttatttctattgtaacattaatgctggtcaattgttacgcctcaactccaaaagggagggagtagaattaagtgcgtttgacctctcttcctattttgactgagagctcagtttttgaggtttctctggggtctccttggcagagagtgggtccactcagttggtcgagggctttggattttatttttagtttacaacttttcaggagagctggttcgtagtctccttcatccaggtgcatggatctttccattcttatttcaaaaggagaaagctgatgttttccaagcagggtagaatgtaagttaagcaaatggaagagccttaggccagggaaggttaaagctttctgtaagctttgccaattaacttttcatgattccatttatttattcttccactctggaagactgagtgtggtttgcacaatggaaatgccgatccatccaatctcaatgagcttcaaccacacaagataagatttctggcggagcatagaggctaatgcctgaaatcccagaactttgggaggctgatgtgggaggattgcttgagctcaagagttcacgacctacctgggcaacagagtgagacctcatctccacaacatgtggtaggacttccaaaaatggagaatgcaatgagttcatgctggtaccaagcactgattttagagaaaaacaccaggtggtggtgggaagtcactgtgaatcctgctgacctaaagaaaaaaaaaaccaaggcaaaattaatgtaattatagagctttatttgggccaagtttgaggaatacaacccaggagcatagattcaagttgccctgagtatatgctgtgaaagacttctttataagaggcagaagctggcattatttgagatttgggtgtaaaaattataattcaattagcttccttttccttcccttatgatccattatcttaactctagaatatggaaggaagaatgttcaagctaagtctctgctcttaatcagacttggagttgacattgctcctttggtttataaaatttgttatctgtccagccatagttgaacattttaatttcagaataaccagagcatcttaagaggccagagaagtgttctctgtgtcccttatggtatttgtttcacatgttctaataaaatacataaaggattcctaggaacccaagactgttgtttttactattaggcagaggatartacctgacactcaatgtcagcttttaattgcttgaatgaatgtactgcattttttgttagactgagccacactttgatttggaaaaggggaagatgggaagactaaatacacaagcagggacccatagggtctgtgatggtcaggaatccacatagagatgacacttgggtataaattcaggggtaagattaaaactgggatataattttatttgggtatagggagatggaggagatagtgaaggaacagaagtacccaactaaggtgaaggtgcctaagaagaaggcagacggggcctctgtgataacgtggattcagaatcagaaatctagtcagtgaacattctctcaggtacagacactccaagtgtggcagtcggcatgtatgaaggagagcctccttcacttacaccaaggcctctttggttttgataactttgctgccacaccctgaattcagtctttgtgattcttcgctcttcttcagcattgctttctgtcccttcttttcttctgccttgaatcttgttctggtatttctttttcaccatttgtagctcagctgtttccactccatgttgtctctttctcagggatacgtagctactgtttcaaaagcactttgctaatttctatttcacttgtttagttaactttggacactcagttttgtcatctcctgcccccatcatatcctaatcatgactctgaagaaaatccttggtggtcacattgagagaccttatgtgttctgtataataaagaactgggggccattaacctttctagagcatttacagaaatttttatctatcagccttttttttttttttgaaacggagtttcactttgtagtgcaggctgaagtgcagtggagtgaacttggctcactgcaacctctgtctgcctcccgggttcaagtgattatcctgccttagcctcctgagtagctgggattacaggcgcacaccaccacacctggctaatttttttttttttttttttttgtatttttagtagagacagggttttgccatgttggccaggctggtctcgaactcctgacctcaagtgatctgcccgcctcggcctcccaaagtgctgggattacaggcgtgagccaccacgcccggctgtatcagcttttcatcttcatccagctgactctttttatcttaagtagcaatgttaaaggtaaatgaaaatagtttcatattcaattttgctctcaagtttgatgactaccattgtaaaatatttgtgtgacatttaagatacagcaaatgtatttcatctatattgtggcctttttgtacaagccagagaactttatcatgatttataacttctttttttttcttactatggggagaggcatttaagttccagacaacttaggaacaaataagcatttggaatacaacttgtaattagagatctgcttttggttaaaataagcatgcctccatcaaccataaaataccccccaaacaagaaaaaataaacaagaaaccttttagcaaatgagctcagggccgaacatagattactcttctaagcataaatcttgtgcaacaaaacctgatactcagaattctgacccagctcgaaaatcccttgtcatcggataaaaactaagttatgcatttaccaaggaaagacaatgtaggaacacatttaaggtttttcaaaagagtgaccagaatgttcagttaaatattaacgggaagactattttctgagtattctagttatctgagatttagttgcaagaattaagatatctgtagtgtctttgaaaaattatttttacctttttttacttttagtttttagaagaggtgttggtagaagtgtaggtggtagaagtttagatggttataatcatttttgtagcacttggcagctttaaaaagcatttcccatatatttttgattgatcctcaatactcaacaactgtgaaataggaaagtatgatgacagtcaattctgctttacagataaggaatctgaggctcagtcagggattcagtcaggtttccatgcagacattattgtgcataaaaaccacctgggaagtgttaaagacagagattcctaggctccaatctcagtgattatgatttaatagatttggaatggacccaaagaatcctcactttttaacaagcacctcaagttattcagatgtaggtggttgatttactctacttctagcaacaatgggctaaatttataggcaaaagccacaccattagtacataatagactatgatggtaactggaaggacttttatctacagatttttatyacggactaatagctaatgccatcccattcatttgctaaatgttatatcctattcatcaagcttggcctgctgttgggtttccaactctcctttgcctgcttcagtataacaatgtgtaattagaacctaagaaatttctggtgtggtgatgctaaagcttgcctctatattgagatatatatgtgtctttggtagttcagtgatgagattttcctgggtggaagccaaaattagtgcactttattagtgtgaagtcaacaatcagctgtttctgggagcttccaaagtaggtatacttttgggaaawtgtgcttttcttcttagtttgagtttccttcttggcttattttgaaatgtagtagaatagaaaaatagagagttttgatagaaagtgattttgggatgtgtggtggctcatgcctctaaaggagaccgaggcaggagaatcacttgaggccataatttaagatcagcctgggcaatataatgaaaccccatgtctatctctctctctctctcaatctctctctgtctctctttctttctctctctccatacacacacacacacacacacacacacacacacgtgtgtatgtacatatctccatattttatatatatgtataatatgcataagaaaatcattttggaggaagtaaattgtcacagcgaattgtcacaagtgtttctcatttatggattgaccattttctcaccgtatttcaggactttgcacagacttagctggcaaacatcctataacaggtgtgatttgagagtcttaaaaaaaaatcactatcttggttttcaggtgaatatttttgagaaactagcttgttcctaaagrtgtgtttcccgatccccctcctgcttagaaagctttttttgacgttagcaagcatctgggggatcttgatgctctcttatggttagagagagagaattgaaaagaaactcagtagattaagacattatttgccctttcactgtgttgacttttacaccgtggtattaaaggagtgatggcaccttagcagacgtcattgcaatgacaccaattgtacaagtagtcatgcacttgcaataaaaaaaaagccatttcactaaaaagaacaccttagatgttttattgcttagatgaagcaataaaaatgtccttgatgaggctggtcgcggtggctcacatttgtaatccttgcactttgggaggccgaggcgggtggatcacgaggtcaggagatcgagaccatcctggctaacacggtgaaatgccgtctctactaaaaatacagaaaaaattagccgggcatggtggtgggcgcctgtagtcccagctmcttgggaggctgaggcaggagaatggcatggacccaggaggcggaggttgcagtgagccgagatcgtgccactgcactccagcctgggtgacacagcgagactctgtctcaaaaaaaaaaaaatgtccttgatgaagcagatttaataatctgaaacctagattacctgtctttttgatattctatgtgacacaattggaagtatgcatgtagcatatctgctgcatactgaagtactgttttctagaggaaaagcagctgtgcggttgtttaagttgcaagctgaactaattttttttcaaagaacaccatttttatttgaaagaactgacaagctttttatttagacttatttatttgacatattttctcaaaaatgagtgatgttagcttgtcccttcaaggaaaacctatgaagctatcagctgtctatgataaaatctgagcttccaagcaaaaattagaattttgaaaaacttgtatttgccatttgagtgtaacagcttcctgatccttacacaaaaytgatgaagatagcgaggaatgtggttttttttcatgttgtttaatgacatgcgttaacatttggaagaatgatagaacttagtgaaccaatattttccaaaggatgagtggatgatgttacaaaattatgcattggtataatttccattcaaagtgcaagatagactaatggattttaatgtaacagtatgtaaagttcagtaataccttttccatttttatgccataatttacttctttcaaaagacaaatataagataaaaattaattcaagagcacagatatatrcattctatcgaaatgaatacaatgtgatttataaatgagaacaaattaccaatgaacagtatttcagaagttgaaaaggtgacactaaatgttaaatacacagccttttagttatattcttcagattcagtttttttgtgaatttaatataaagatgagttcattttgcaacctaaaaatacttacttattgaaactatattaatactttaataaactatacaaaaaagataatgagacaaacgtgcatttgtggaactgcatgtcagtcagccagttccctgcagagggaattcccagcattacctcattcatctgtgagaacacagagcagtccctatttagacacacacatttgtctactgctccagcatggccagcccccyacttcttgatggtttctttctgctatgaatatgcatgtccagttgtctgcttcatagagcagacatttaccttcctcatccaccagccattggaggaggactggggccacgcaaatgattgattcgaccaattctytggggagagtttcccagtggccctcttccatcatcatatctggaatcagatgagtttccatagcttcttttttttttttttcgcatcttgctgaagcagagttttgaaaagcaaaaccacaaactcagctgttccccataagaaatctgttatcaaagataatctccatggagactgactccagctgtccagcrcttgtccatttgcgatgtaaaccatcttgccccccttccctgcttcggagcgactggtcatagtttaagagattactacttttagaattttggtgtggttttaaagaagaatgtccataatcatctgaaaaggcatcttagggttgttagtaacttttagaagtataatgggatcctgataagaaaaatttcgtgaatatatttacaaatatttaggaaataggtgtacatccagtaatattttcagtaatatttttcagaactaggggatgtgagggcgatctggctgtgacttctatcaccccattgatcgccagggctgatttggctatctggctggctaggcgggtgtccccttcctccctcactactccacgtgtgtccctcccgaagatgtgcgctcggttgaagaagatgaccatctcccatagatgagaaccagtctttggtcaagggtatatgaataggtgcactcccctgctagaacctccaaacaaactctcaagaactagggagaggagagtgaaaattaacctagttacaatgattgtatccttacattcttttataaatttcaaaatacttctacatctcctacctcattagtccaaaccacagctctgctgttatccatccccatgttagagatgaaaaaatcatggctcagagaaagtttggagactttccaagatcacaaaatcaataattctgttaatctcatctctgtagtttattggtgaatagttttggagtcagacaaaatcaggtttaaatcctgctacggttactagctgtttgaatacagacaaaaaagtttcctaaatagtaccacaactgtagcatagagacaaaatcatattagagtgtgttaggagaagtaaattatataatgtgtacaaaatggtgcataatatgccctgaataagtggttttttcttgttattgttgataagcttcaatgtgactgagaattttttattttaccttactcagaaggcactttacatccttaactacccaaagtgtggtctgcagactgacatatcagcattatcctcttagaatttgtaagaaatgcagaatcttgggccccaccccagacctactaaaccaagatctgcattttcatagatcctcagaggtttgtctgaacaattaagtttgaatatcagcactccataaggctatgagacagcacagaaggcaccacatctggaatttctgtagctgagaattctaattaaccctcgctgtgccactgacttcatacatgatgttgtgattagaaacctaaaacaaaatgaaaaaactcaatgggcctccatgacctcaactgtggttgcattaggttgaattggtgctaccgctggttgcatttggcccctttccttccatgaacctcagtggcacatggatacaagtagccccattgctcttgcacatacagaacatggcatagtctcctccctttgcatataccatctctgtctttcaggaacctgcctgtgctctcgtgtgttgcttataatttaattgccttcttttactctgcactggcttgtcctttaattgctctttattgcccttagcgttgccaatcttctgtctttgctgttacctgataacattcagatgtttttccaattcagccatccatctatcaaaatatcatgtagatggtgctttccatcgcacgatcaatggaactatccaattccaagtttccactgcagtcccctctcaacaatcaacagtatacttgacacaaaaccaaaacaaaggaatcttataccaacgctttttcaggtgatgtaaaatcaggttaaatgtccttggcccagagtttattccataatacttcatcatccaaacacactagcttcctataaactgccacccagcaccatttcgattataatctctgggatactaggaaacaggtgaatgaaatattcatgtgggaacagtgtggtttaggagcattatgagtagactctgttggtcttatctacttttggattagtcggggaaataagcaggaaacaactctacttggacacgatttatttgaataccttactaatcagcacaaaggaggtaaatgtgaagaatattgacatatataagtatttatacatttgttatctcttagaaactttcaaagaaaaagaatattgagtattatggaatgattcaagcaaaggtcttcagagacagggttcatgtaaagggtctaaacgggaatcacatgaatcatttgctatgtgacctttgaacaattactttctttctttgactttcagtttccttaaccgtaatatgaggagttggattagatgggttccttctagttccaaaatatttgttttgagagcttacaatattttccccattgctataaaaatactatctattgcaaaaaattcagaaaatataaaaaagtataaagaagaaaatgaaaattgcttttgggttttttcccctccaggacttttctatgtgtacatatcactttttaaaaaaaaaaaacaaagatgagatcactttgtgcatattattctgttgccttttttcatttatattccattatgaaagtttaccattgatagacagctttctaatgtacttttcataagtaggattttgagacttttattttagtatcctcaattcartaggtaatctttgaaactatttctatgcatactttagacattctcagtccccaagaatttcyagctttttggtacatgtttgttttctgttttattcattcctcagctccatctctattgcttatgtctctttttcatggttaaattactagtttttctaaaataatagcttctctgcattatgtttctgctcagaatttttctgggactgccacagcacacaatgagaaaatatatactcctaagccgagactagtttttatttcccacacgcgggataacagtagacgttaatcaatgtagggctcaccatgaatagtttcatccattcgtagcagtgctgagtctgtgacatatgtgttcagtcatttatgagttaatatttgtcaaccacttagagtagacccttgctggtagtaagtgctatgtgtgtttgttaaatacatacrtatctatttgtgtttactatttgtccggccctatgctaaagacttatctcctttaatgggtacagttctgtgaggtaggagggagcaaatctgttggcttgggagtgtctggcctagctcccatacctcagtgggactcagtatcctatatgatgtatagtacatgcaatattatgtgcatactttgtattaaggagattgtagggctcagatatgtttcagtcaactgctgctgtgatggcactttgcccatttagagagtcaaaaaaggactgaagatgcatatctctcttcagcattccacacctctgaagcacgccttctatgacattcagctcagccttgtacagttctccaaatacactttgtacagattatatctgttttctaccccaccgtgattttttaacctctccttttctcacccaacatcaggcacccaccaagacccaactcaatgtgtcctctcaaatgaaacattctttagatgctctttggccccatctccctgtcccagaaccactcaattgctactggatcctgttgaggccatagagcttagtgagtaaggccagaccctggagccagagtgctggagtgtaaatcgcatctctgccaataattgcttttgggtctttgggcaggtcccttaacttctctgtgtcatagcttccttgcctattaaatggggataatagtagtagtacctcacaggtttgttttgagggttaggtggattcatatttataaactaatgagaagagtgcctgatactagatggtagatcggggttcaatattgttattgctatggtttgtaacttatttaacaaatatgtagagtttttactgtgtgggcagtctggtgcaagaggctgggggctaaatggtcaaagggaaagtttacttactgtctgttttttaggttttatctgaagggaccagatatttatcgaagaattatacaagattatctcaagttgcagctgaaataagtgcagcccagaagctgtgtacatagcgagggggaattagccttgtccaggaggtctgagaaggcatttcttaggaagtgacaggcgagcagaagaggattatgagaaaaggcagcagcaggggaaaggccctgggagaggagacaacacggcccatcccagagcttggaggaggccaggatggctggtgtgcagcgctgagtggagtgtaatggggatgaggtgggaaatgttgccagagccatctccaggcaggatttgttgttgttgttgttgttgttgttgtttgagacggagtctctctctgtcatccaggctgtagtgcagtggcgccatctcggctcactgcaacctctgcctcccaggttcaagcgattctcctgcctcagcctcccgagtagctgggattataggtgctcgtcaccatgcccagctaactttttgtatttttagtagagacggggtttcactgtgttggccaggctggtctcaaactccagacctcatgattcacccacctcggcctcccaaagtgctgggattacaagtatgagccaccgtgcccagccggtttttgttttaagagcaattggaggccgggtgcagtggctcaygcctgtaatcccagcactttgggaggctgaggccggcagatcacttgagccaagagttcaagaccagcctgggcaacatggtgaaaccccatgtctaccaaaaatacaaaaattagcctgttgtcgtggcacacacctgtaatcccagctactcgggaggctgaggcaccagaattgcttgaacccgggaggtggaggttgcagtgagctgagatggcgccactgcactccagcctgggtgacagagcgagactgtgtctcaaaaaaaaaacaaacaaacaaaagcaattgaaagcaattggaaatcactgaaatatttttctgtttggtttcttttttatttttgttcttagtgacaagttctgatttacttttggaaaaatcattttataatagctttagtggcacaaacaaatcaacgggaccctgaaaactataatrgctttagtgacactaacaaatcaaagggagcctgaaaatagaagagcacactgtctttttgttgttgttgttgttaattgaccacttcgtaactttttttattcctgctagattttgagtccgtagatgtgttcactccargatgataaccactagctacatgtggctatttaaattaaaatttcatctaattaaactttaatgaagcaaaaagtttatttcctcaatcactcttgccacatccgtagtgctatgcaatggcgcacggctagtcactttcatattgacagtacagatctgtggaacatttttagcatcttaaaaacttcacttggatagcatgtaaaaattgtgatattatagtttttaaaaaataccttgatagttctccaattaacaatgatgaaaatgtacatagtacttgttcaagaaacatttactagaagacaaattaaaagagttaagatatcaacgttcttataaatattattttaagattccttatccaaatgattattgaatatgattaagttgatttaagcctaaatatatacatgaagaggtgacacatttctaaaattgtgttccctttctaattataagctcatatattaattactaatttttttcataatagtcacccatttttcatctttattaacttagaaaattttacttcttatttaaagccctggagcatactttcaaaaatgattttgaaacatgagtctcttcattaggtcaacatttgtctaagcacgtctgtaaatattctgttacaggaagaggaagagtattgagcaaattctcttcaacaatcagacagctctgctttagggactgatatccttccagttcaggaggaagtgtttccaggtaatttccaatgaactccagatgagtaaggtttgacagctgacccacatgaggggacaaattcatcaagctacttttccccaaaggtaaacattgcagctttttgcactgaaacagcccatctggtagcatctcactgttgttgttggytacagcacagtactgcaaattactcagatactggatttcttctggaatgaaggtcaagtggttatagcttagattcaaataatgtagtttgctgcatagsaaaagctgctagggcagattctcaatattaataggaccccaaaagagctgctctaggttagataatgccccagtttatccaggaatgtaagtaatgttattgtgccataastttaagcaggaaagattctgaagatgctgacagccaatgatctcttccacagttttaaggttattttcctttaggtctaactcatgcaaattattcaggctgaaaatggagtatggaatgcattccaggtcacagctgatcagttctaggcttttcttattgaccatcattttcaagttgttcagcacagccagtttgcttccctcattatcaagggacaattcttcagtgaaggcaagaggtctgcaatgacttgtgggatctgggagaggctactctgcaagtagagggtccttggatattttaagtcctgaaagccgtctaactgcacagtactgaactgttgagggagaacacagcctccctgtgtggggcagaaaagtttctcacataggggaaagataaggttccttcagattcttcaggtgaaatacccagcatgggatttttcccatttcaggatgcttcaggcagaggattttaaaattctgctccaaaaagccagtgcaggatggtctactaccagagatgaatggtccacatctttgaggttgaccagctgtgagacggcagacggcagcttcacctccagggtctgctccaggcttagcacctccatttcggtgaactcaaagacatttgtctggaagactgttgagcataaaaagatgcagttctatcttgtcttggacattttccacaagctaatgtttttcagtttctcaactgtccattcrttactgaggttgatctgtttcagtttgttctcactgacctctgataggaatatggagaagcgtctggaataaaaaggatcatactgattagccagatgaaggatgaaggcaaagtcattcttgacatcagggatgtcactatagttgcttttttctcttaacacctcaaaggaatattgcttcatggatctcctcagcatccaccacagcctgtaggaggaggtcagactgtagagtacatccaaaatggtataaaatgaagccagaaacttcaagatttctgcgaaggaatagacacactggtaggcttatatcctgtaaaagcctacatgtcaactgaacagtcaatttaaagagtgatgtaggttaaaaaatatggaacataagttatgatgagcacaaaatgactttgactattatctgcttcagatacacactataaatgatgtccttctgctctacgtgcatgcggaatcttctcactttttcaaagatggctgtggcctcttgcccctccttcttgtccaggccactggaagttgggctttctataccagctgactccaaagcccgctgcaggtggggcaatgactgctttctggaatctatgtcagttgaacaccctgaggacgaaagcaaaatcttggactcggagagtttcagaggcctcactgactgctcggccactgtttctgacagggtgcaggtggtccgtggagaatcgaagcacttataaaggatggccacaaaatgctcaagcttggagctggtacctggggtagtgaagccataagttgctgcaggctgcaaagaacagtgtgtgcaagagcaccaggtaggggaagaacgttgcaaaccaatggagctgtttctcgtaacagacagcgttgatgtaggagtmctgctgtcagtggaggtcgttctggattccgagtgggatcggaaastgatgtcccgggattagaggatgtgtttatgctggctttcaggatgttccaaggcatggtgcaatgattgtcaaattccactttgtaagaagacagcacagaaccctgctctgtgtcagctggagagctccagccagcatgtccacatgatcagcatgatgtaataccagaagacatcctaccatgattttaagatgtgataagatgactgggtgtctgctagtaaacattttagctcggttagtgtaatcatgactttcccttgtaggaggacagaaatataatgaaaaaatattaaataaatcagaaatgcttcaatcaggtgatctataccttttgaagtttcttagacataccatctctgtgtttgtcttcattcctatgaatgctggccaactggaaccctgcaattagtctcaaattgaaaaatttcctgtctttggccacagggtcaatgatggatgaggctaatgagtgtggtattgaaaacacgggggtttcagtacctgtgggccatccaggtagagaggtccagcaggcagctggaaaacaaaccggagccctgtgtgactccagtcccgggccccaggcccacacattcccctccattaccaattttaaaattctgtctttaagttgtcactgtgattgtgattgaataaaatactaggcctttacagaaattaagtggtggtttatatctcccatttcctgtccacaggaagaattactagaaatcctctgtttagttgtctttttgtttgtttctactgagcccatctttcaaggataaacacaaggtgcccgaatgagtatgttccaaaaattatttcagaaaaaaacagcaaataaattacagaaacttaactgcacattatgttctttccaccctttgtttttcatctctgacccactatctgcataggcaagattcttgcctaggcaggaaaaactatgttttttggataagattcatgaggcttttccttgcagtccatctgttgggtcctctgcctgagggcagaaagagctgttctgcaccattaataaaactgctttcctccctttcctatcttatgagctgaactaaactttacaattcttttctaaagtaatttaatactacttttatttaacgrcatatctttcttgatagttgctgcaaaagagaccaactattttcaggattgggggacaatttttcttttctttttttaaaccaactgaagaaagatctaattaaaatatgtttttgcatcaaagggatttgagaattagaaaacaagataaccctcaaaatggagagttctttgcctatattaaatttagtttagattgtgccttgggatgtctgtctgtctatctatccatccatccatgtatttatctgtcttggtctgattatttactgtttgagtccaattagaaaaacaaagctcatactcagtaacttaatcaaaataatttaatataggaaacaaataccaaaagtgttagaagagctaacggtcaaacagggaatggtaggacccttaggcaaccctgagaagagtaacagaaggaagccgctaccacctggagagcaggaagggcaaaagaaaaaggtgatgaaaccagagcttgggagctagggcttcgctgtagcagctgggaccctgggcagatgcagccactgcaggggtcccacccggagcagggaggacaaggtagatacattctgatttctcctttcctcccaccctccartgttctctttcctgttggcctctcctggtctgatgcttggagtctgggagtctgggaartgtagtagtcaaagttacttctctgagttggcggatcaaaagaaaaggcagtaacacaacttgggtttcttgggaaacagactattagatggaaatgagcatgcctgggatttcattagagtatgttcttgagatcagcacctgtggaaggcaagacaaggaattggggtcatacagaggatgactgtgagctgcagtgctcattgggtgtgatgctctttggaggctgtgcacctgtggaaggcaacgcaagaaagtagggctgtgcagagggtgaaggtgagctgcaatgctcagtggatgtgatgctcattggaggctatgcccactctacggaccttcttaaactagtgggagaccctctagagtggtccaggagggggcaagctgccccaggaaggaggagagactttgggcaaagcggctgtctttagctgagacactccctataggtgaccactcccagcagctggaggagcagtggtgcctttatctctgaaggggagtccaggcacctgaccacagtgcccatcacaggcagggaaaggatgtgaaagcactgtctgcacattgttgatttaaaaaaatcatacattgatgaaatgtaaaaagtgaaagttcagtttgcctttttaacttaattctgtttatgatttacatatttccatgtcccagcctgttgatctacctaaattaaaatatgtatattttaaaagatttattgataagataagaaaatgtttacaaaatagtattacatgcaaaaagatgaaacaaaaattgtatatagaatcatttctcagttatatatgtatatgggtttgagtgtgtaaatgcatttaaaacaataataaaaaaaatagggccaggstgggtggctcacgcctgtaatcccagcattctggaaggccgaggtgggtggattgcttgagctcaggagttcaagaccagccgtggcaacatgatgaaaccactgtctctaccaaaaatacggaaaattagctgggcatagtggcatgtacctgtagtcccagctactcgagaggctgagatgggaggatcacttgagcctgggaggtggaggttgcagtgagccaagatcatgccactgcactccagcctgggcaacagtgtgacagcccatctctcaaaaaaaaaaaaaaaaaaaaaaagaaaagaaaatagatmaaaaaattttaaaaatgaaatggaatttttttggtagaataatatggattcatgcctgtttctsttttctcttttttctttttcctttcaataaacatactgtttgagaatagttctagatttacagaaaagctgtgaagcttgtgcagagttccatatactccatgcccaattcctctgtcattaacatcttacattagtaaggtccatttgttacagctcatgaatcaacagtgatacatgattattaactaaagtccatactttattcagaattacttgtttttyccctaatgtctttttttgtttttttgttccagtaccccatccaggaataccacattacactgagttgtcaggcctccttaggcttttcttggcgaagcgtctcagactttccttgtttttgatgaccttgacagttttaaagagtatgagtcatgtattttgtggaatgtccttcaactgggatttgtctaatgtttttctcatgattatacttgactgacgtatttttgggaagcacatgacagatggtaaagtgccattcttaactcatcatttcaagagtatctgctattaatgctattaataggtcttgtcattgatgatgttaaccttgactacccrgctgaggtagtctttttcaggtttctttgctgtaaagatactcttttttgtccctttccatactgtacctttggtagagagttacattccacctccttgatggtggagtatctgcataaattatttggaattcttctgaattggraatttgttctcccccttatatttatttattcagtctttttcagtatggagtcattaatgtctattttatactttgaattataacccagtactctgtttttcatgtttttgcttaacttgttccagccatggccacttgkcagttaatttctgtgaccctttgacgtgtgtgtgtttgtaagtgtttagcacttccttactttctggccctacaggatgttccaggcttttaggttcycttgacttgyttttttttttccttacagatttcttaatattatataaccataaaactagtgtgtataatcaaaagtcagtttctccaccctgcaaattaggagtggacttacataaacctttgtgcctgaactctgtgcatttcccagaggtgggcatcacaccacccatgcctccattgcactatatgtgtggattagttttcagacatctccctttctccaatgaagtgataaataaccaggttattccctcagaatgaagctggccagatgtgcactttaccttgggaatgatttaggcataagatctgggagaaggagaaaggcaagcatgcttcctcaggtgggcagggagccatcttggtttgtgtgaccaacttgataaattcatctctgttcagcacctggtcatcagctctgtaaactcaaaaatctctcatagtttttggtgtgtcaggagtccacgaaaggcttgactggacctgtgtgaatcagggtctttcatgcagctgcagttagatggtgacttagagttggaacagcaagggctggggcatttaggggctggccaggcatctttctgtctcttcwtgcagtcttagggcctccccatgtggtctctgtgcacggaatggttgggattcctcatagcatggtggcctccgtgtaagggtaactgcttacatggaggctgaaggctttaagagcaagtattccagtgatgggtctacataagtttaaaataattggatagtattttatgttgtttggatttaccaaattatatttgctccatgatttataaacagaaatttaggttatttgcaagtttttgcaattccaaacactgctacaataaatatctctgtgtgcatatctttgtgtgcttatgtgattatttctagcagataatagaaatggaattgcaagagtggtaaatatgcacactttgaatttaggtagattcattgaaatgaccttttagaaaggaacttacacttctgtgaaggcagtgtgaaagaatctatttctccttatgtgcttgtcagagcttgtgattatcagtctttttaatgtttgttcattttgttgggtaggaaagggactcattgatttgtagttctttgattttttttaatgaaaatgaatgttttatatttttattagctattttctttaaatagttggtttattacttttggtatttttaaaaattggattttttttctacttgatttttataccctattatctattgtcatgtaccaaaaatgtcttatccttgttcccccatcccaatgtggtggatttttgtttttttggctttacaggaatttccaatttttatgaactcaaatgtatcaacttttccattatcatttttggattttgtgtcatacttgtaaagcaaaattgtaaaaatatttgctcatcttttcttctggtgattttattttatacctttaaacatttgctccatttgccattgtattttgttatcaggaaagagagagaaattttgtttactaagcacttcaagatcttttttctcaatagattgcttttcttaagatgctgaagtaaatcagtacaatagataaagaccacaaaaacagcattttgcgacrgtgacagtcctactgaagacaggagacagttaaaaccatcagaccaagaacagaggagtgsatatttaataattctatgattacttctgggggttaactatctgtgaatctaaatagaagttccagtggctggaggctgtatctgaggagggaccctttagccttttaaagagtgattctgctgtgcagttgaggtgttttctgtcactctccttattgatgaaakgcttgtgtctcaagatacaatgacggtctacaagtcatggagtgaaggtgaacatgaaagctcaatgaaaccattactttatactatgagatggatgttttattctttgacctttaacttcagagagaaatgacctgtgaaagcacttggtgagatcttagtaaagaagtgatttgcccactgaggcagaagttataggtgctggttaarttttatctttttctttgaaaatgtttggtacttattgaaacaaaaatgaatgagcatgacagaagaggagaataattgccctagaaatatcagctgtctggagggcttgcagaaacccaggaaagatttcaaatataaagggcctgctgcaggtgagtttctggccccttttctgctttgcctggggaagtaaggctcctgggctggtgttacaggagcatctcaagacaagcttctcattctaatagcctgtgttcaaccaagaatcttatgcatgtacatatttgaggtaatagtcttttttttttttttttttctgagatggagtctcactctgtcgcccacgctggagtgcagtggcgtgatctcagcccattgcaacctccgcctcctgggttcaagcagttctcctgccttaggcccctgagttgctaggattacaggcgtgtgccactacgcccagctaattttttttttgtatttttagtagagacggggtttcaccattttagtagagacggggtttcaccatgttggccaggctggtctcgaactcctgacttcgtgatctgccctccttggcctcccaaagagctgggattacaggcgtgagccaccgcgcccagctgaggtaatagtctttaagagaagagggtacaggatgtagggtcaggggttattcaaataaaggtatgattagtttccagagagaagtaaatttgtagacattttacatttattagggaccatagaaaatatttagtccaactctttttgtttattgataaagggacataaataatgtaactttctcaagatcacaaagctccaaaagtaatacatgtcttaattcagatatgaaaccattgagagttactggtctctttgtgattatggtcacgatttcaccaaacttatatttttaattgaatatggctggaattttaatgtgtaatttacttacagtttaagtggtaaaatatgaatcattcctgctttcttaagccagtcttttaatttgatgtttcattttaacctttccttctaaaaaaattattttgtcaattgtcattaccagctcccatgagttactgataggagttttctttgagtctgttcttcaaatgcttatttatcaggataattaattaaaaagaggaatgatgtaatgattatttgcttaaatatcaggcgtactaaaatatctttttctggattactaattttagtttggagaagaatctgatagttttattttcccaagatactagtccaaccaaatctatactatgtttatctaaaataattgtttatttttatttttattatttttttcttcaacttctattttaaattcagtggtacatgtgcagaatgtgcaggtttgtttcataggtgaacatgtgccatggtggtttcccgtacagatcatcccatcacccaggtattaagcccagcatccattagctattcttcctgatgctttccctccctgcacccctgacaggcccagtgtgtgttgttcccccctcatgtgtccatgtgttctcatcatttaaagtaattgttttgagctgcaattttctattaccagtgactcctaacattatattagatttaggggattgtgttctctttcatgtacatcatatcatacttgaaaattaaaaaaatatacttgtgattatcttaatttttcatttaaagaaaggttaaaggcccagatcccctaagtgacatatgggcaccacttaaggatttccatttcgtgtcgtaatcgtaaaacttctcaaccttctctgactttatttctcttgtcttctgttcttttaaaagaaagatgtgacagaaagcacaaaagatccccaaaaagagtgtgtggttttcttttttttttttgagatggagttttgttcttgctgcccaggctggagtgcaatggagtgatctcagtttactgcaacctctgcctcctgggttcaagcgattctcctgcctcagcctccctagtagctgggattacaggcacccactgccatgcctggctaattttttgtatttttagtagagacagggtttcaccatgttggtcaggctggtcttgaactcctgacctcaggtgatctgcccgcctcagcctcccaaagtgctgggattacatgtgtgagtcaccacacccagccgagtgtgtgtgtgtgtgtgtgtgttttaatgaatactgttctctttattcacagttagcatccacttagacaaaatcttattgttctctttattcacaattagaatccacttagataaaatctattaaactcagcctgctactgattttccccacttaccaaataatagaagaacttggcgtttttttaaatgcacgagattcatgacactgacacaaattagaagcaagtactgtttgacatgatggcatacgtccagcaatttcattaatcattattgtaaaaaaatgggttgatggtggattcttggaaagtcaaacaaaattgctgtgataagtctttgaagcatgtttttgtggactcctgtcttaacattactcattttaaagccaatattcttccttttatgtttatggaaagtgcggtactggcatccatagggcagagattgtttttatccatagaagcaggaatccctttttagggaaagtgcttgtgaccttagcttgcttagagctcatgcagagaggtcctagacgtgctttagcagctgggcttgagcaggtagtgacaagtactaccttatgtgtggatctgtgcagaggcaaaggaaaccagtagggttcccctctgttatgttgccattagcctactgattgcttcttgtcaatctttacaagcagtggtttggtaataaatgaccttgtccaccaagaacaagagtgagttttctagcttatttggggttcctgttgtcattgtgtgtgtgtgtgtgtgtgtgtgtgtgtgtgtgtgtgtgtgtgkagtttgataaattacttaaaagtttataaaggccagacacgatggctcatgcctgtaatcccagcactttgggaggccaaggcgggcagatcacctgaggtcaggagtttgagaccatcctggccaacatggtgaaaccccgtctctactaaaaatacaaaacttagccgggtgtggtggcgcatgcctgtagtcccagccactcgggaggctgaagcaggagaatcgtttgaacctgggaggcggaggttgcagtgagctctcatcactgtactccagcctgggtgacagtgtgagactctgtctcaaaaaaaaaaaaaaaaaaaaaaacccaaccagccaaccaaacaaacaaaccaaagtttataaaataactcttccattacttctttactacttccccttccttctatcattgtcattttcaacctatgccagctgtaagttgataggtattcctataatgatttctgtgaatcttgaaacctgttaatgagataataaatattactattcccataattgccaagctgacataattatgaggatgtagggcattctgctctaagacaattatcatagtagatgttcccaggcatcacataggcaggcattaatatttaatctttagtgtcttctaccatgtctcttttgctcttaaatcattgagttaattttattcattttatttttcatttctagaaattttatttttttactttctagatcttttttaaaataatatactgttttctgttactattatctatcttgccttatttcttattttgaacagtatttgaataaatgacaattcaagaactcatgaaagacaccaatytttagattcaggtagcttattgaatcttaagtagaatagataaaataaatatatgttgacaacagaataacattgtagaacacaaagttgaaaataaaaaagtttaaagctattagagaaaataagacagattcacttcaaaaggatgatagtctgatgactggattctcagtggtgatgattaaagcataaggtagtgtaatgatatcatcactgtgccaaaagaaaataattgccaaactggaatttgcatatccagtagaaatatctttcaaaaacaagaataaaccaaagacatgtgcagactaacgaatactgagagagtctgctatcaggaagaatctaaaagatgtactttaggctgatgattccagatgaaagctgagaagaaaaaatgcataaagaaagtggtaaatatttggtaagtttaaatgaacttataaaacaatgatgtctaaaggggtttacaagttagatagtaatattaaaagaaaagtctgaaaagctataatctaagcatccatattaacagtaagaaaaaaaaaaacccgaaacccagaacattaagcctagatatggaaggaaagaaaaataagagtaagaccagaaattaataaaataacaataagcatacaaaagaaaagataagattactcctggttagcctgattaagtaaaaaacagacaaaaaagggtggcagtacaaatcatatcaagaatgaaaaagaacacaaatagagatgctgcaggcattgaaagtataacaaagggttattataaacaactttataaccatatgtttgaaaaggtaggtgaaatgaaaaattacaagaaaaaatacaacttatcaaaattactcaagaacaattagaaaatctaagtaattctctagcccatgaagagattgaaccacaaattaataaacttcttacacagatttttctaggcccagatatgttctccactgagttcttctaaacctccaaggagaaacgaactctaatcttaccatccttacagcctagtttatgaagttagcatggcctttcacttgaagatctttttactgtygttgtcctggaattttgcagtgatgtgaatcggtatgagccttcttctatgatttattattttggatacttgatattaggactctttgatgtgaagttttgtatatgtctttttgaatcccattgaatatacttaataagatgtctttttatttctattttttttttctattcccctctcccctttaccrttctgtgttgatcttagacttttgtcttaggcttacctccaatgactggtgaatcatggtggttcatttatatttaaggatgagagattaggtagatttcatggagctttgagtattcaggcagaatttgtttattgaagtttgcttaaggtaaataggcagagaaggagcttactgttatgctgagracccctaaaatgccagaatgaggaagagtttactctgggtcactaatacccacattagtcctgtggttgtcctgtgtactgattccaaaagtacatgggtccattggagaaactttggaaaataaatataaacactaagaagatgacaaaataacttgtaagcccatccatcaagtgtagatttatgtataaccaaaaattgggaccatattacccattctgttttatcatctgttctttatacccaataatgtgtcatttttccatgtcaattaaatattcttctaaatcatggctgtataacagttatatacagccatatatacagttatatacagttatatacagttatatacagaaggctgtataacagttatataaatggtctatatttctttagctattttcctactcttggacattatgtgtatgtctattttttcttatacatagtactgtaatgtatatatttacatctaaatatttgtacatactttcttaaccttagtataaactcccagaagtgcaaataatatagatgttttatggcatttgttttaggatttttcacagctacttgtacccaaaatgcttgaatcagtctagggctgcaatatattaaaagtgcagatagatatgaatctgtagaaatctctaatatattaatacaaattggtgtttacatggattcccttttcagtagcatgggctggaaggccactgtatacctataactaaaatgtctagtgccatcatttcctgcaaaataatttgttgtatttcttctcagattccttgctcctgcatggtcttcagctactgttgaaaacagattactgtagaactaaaacaaaaaaaggaaaaatgttaatgcactggtttatggcatttaagaaaataggaactaggctgtcgtacagttgacaaacattggtaaagttgtactatccctttggaagaatccgtagtgggcccagtcctttcagtgattggatacttctagtaggaactaccatttattcagtaaccctatgccctcgtcaccaatctaggcatgttttgtacattccgccgaaggctcctgccaactttgtgaggtgggtattatcaccacgtcatagatttaaaaatgaggcttagtgaggatttgaaacattccctactttcacagctgctggttgtctagaagtcagaagaatgcaagccgcctgagaccactgcagttgttttgtgcacaggtgtctctcccgcactaggtcagtgcttgagatgtagtaggatctcaagaaatatttgttcaatgctgaataatgaattgaaaggtggaatttgaaccaaagtcattttgaacttgaagctctttctaccaggcaggtgtcaatttctttagttttagtgtttcactgagagattgtgagatttgtccctatgtgatgtgcttgttcagtgctggatgtcccttttcctgattttcatgtgactagttatgtaaagggcttcacatcaagtttcactgcagtttcagaggatcttcttcagataaatctagcgtaactaaaatgatactgagtgcataagagaccaagcatgcatgaacaactgcttgagtggacttaggaactttttttagaagagattctaacttctgctttgagcttttgtaatgctccaaagttcttcaggaatgtgttgtctttgaatctccctttgaatatcttgtagaagtttcttggcactggatttactcaataggatcgaatccccatcctccagcaaacgaaatcccgtgaagactcccagcacsaggctggtctgaatcctcacagttctttttcagaaagcatgcaactttggtcaaagatcagaggactgataggcaatgtagtcagctgattcatttcaaatggcactttcataccgtctgacacattggaataccacatccagcaatctaccatttcctaaacaaaattttgtgtgtatatttgttgtaggtatcttttatgtaatgcagacacaatgtcacttaacaaactgactctgtcagcttagatgaggaaaattaggggatttatggtttctccccatttatgtttaattaaatcacagcttgctgatgttcagcttaacgattatttgttgaatgtttactttgtgcaaggcaccatgctagatgtggaaaacacagggttgaataaataaatccatgcctctcgggaactcacagtctagtcagagacagacaaatcttatggagcatggtaagagctgcagtaactaggggtgagggaagacctagagaaacatggtgctagcatctcctcggtgaggagggtctagcaagtccaagrcctcatttcccaccggactcataacatagccttccacaatgatcccaagggatcgttctgggattattaaatccagtcctgtcactttcatatttcagcgcctgaacacactccactgaccgcccgcaggctgcctcaggacccatttgttccctcccttttccctccagccccttcccttcccactcctacctgcctcctttacactctgcctgcctaggttcaaatcttgctgtggatgcttatcaacccccggtccttggcaagttactaacctctgtagctcaccttccttaaactgtgttaatcgtaatctgtcttgtgatgttatagtttggattaaatgatttaatataaaactcttagaaaagtgcccggcacgtaggaattactagagaagtgacagccatgattgttgttgttattttctccttcccaggctggtgttgtctttcctacctctgtggctttgcatgaagcaccatggcgtatatatggtcaccactatgtcatttcttaggttgcttctaactatgtcatatctttatcatcagcctatggcatcattccagagttgttgttgcctttattagatttataaactctgacattaggacttcacygcaaattattttttttttttgtatttccccacagaatctaaatacattgcatcttgcagatactcaaacctttgtttactgacagagggagaggtccctttttctccaaatctctctttgtaaagccttttgaaacccttttcttcttttctgctctccactgtgttgttagtatgttagcattttttacatgtttctactgaagtccattgcaatcattcgttctaatgcttcccccggccaacttcctttgtttctctgtaagggtaggagttgttttatttgtatctctggtctttagtacagggactgcacattgtggacactcgtatttcaatgaatgcctgatacagaaagaataatacacatgatattaatgccattgtatttgagggaattggtgagggaaaaaaattttttttttagtatttcttttgactcactaaatgtctaagaactaatgatttagttaactaaagaagcaggaaactccaaatattccaaaaactttgcttttactttctgtctcccagtttcttgttttctaagataagatgtatttctatggtttcttagaaaatattaaaatttgaaaaatacctaaattgttatggagattaaaatggatggtagattatgatattgatgagttaaactgctttgacaggaaaattcaaactaaattaggtttcacagctctgaaaattattgaaggggaatttcctactaaaaatcattctgattaggtgttttgtaacaaagtagtagatattctaaatttcatcttttatggatgtgactgtcaatgagaaatgatcatttctattgtcatacttttgtttcagttctatgctatgcctcatcttataaaaggtaaatcaagaacttctttttaataatgaagaggtgatttttaaaagtcagcatgtgtcttcagctacttaacaagaggataaagagctatatataaaccatgtgtattttaaaccaatggttaccatttaaatgcttgcttaccacctagtctttccatagtagttttcctgtccatctagttcttctactcatawactcatatccaatttgtcctgcccctttcagccattccacccatgccttaattctcttatccccttttgtattctgttttccccacctttccctctcccagggcatgtcgtcttttttttttttttcccccattttcccacttccactcttagaatttcaggccattcaagtttgttatattccatgatttcagattaagctgggctcccagagctggagggtctttttactcttccctcgttgacagtctttgttgtcgccactggtttgttgccatctttcacatgggatgccctaagccctctctattccttccacactcccacccagatgcttcttacttggccaagaagattgaagaggttcctcatcagctgtttctagcttcctgttgctataccttagtttgttttgtgtgtgtatgtggtgtttttgtgtgtgtgtgtatatcttcctctcagccttctgacatgcctatctctgagcctaaccctctgagagtattttattgtataagtaaaatatgacttgttcaaccagcttccttaaaatgagcttaggttgttcctagtttttttgttcatttgttttatgaatacagttttgaaataaacaccttggacaactattttggccacttgtgagagtacagttagtactagctttgcatgattctctgacatgcacaaatttcagttaccacagtttaattaaataaaaccagctcccaacaacatagttcaaatttcatttaccaagatatattaactgtgagtaattgcgtaaagtacaaactttgctgctagctcatcagtccacaaatcactgtgcaaatagcaagtgcaagttatggtcagtgaccaattgcatcatttctttcaaaatctgccagtgattagcccataggcatcttttagtcagttcatgcacagacagcaaaagcatgtagttgtgttgttgctgctttgcctctcagaggtaaacctatatgacgttttcaaaaagtggataattgaaaaagtgaatgaactgatgaagaatgaaagtaaagtaaagaaaagaaaggaggtaataatgctggaagtgaaattgaagtcaaagtaaatggagttatggaagaaacagctaaccgtgggaatgctaacactgccatggtgcaatagactccagatatgaagccagaggagtctagtgaagctgaattttttgacataaatgaggagagtggttgtgagaaaaagaatgaagatatcccagagggagtgacactgccacaaaacttcctcttggagacatttcataatgttgaaggtgcaaagcttatgtgaaaacattggaaactgatctaaacttagaaaggaatatggaatatgacaattctccaaggcacagaaaatattctcactctgtattgtgagttatgtgatagatgagaagaaggtaagtactgtttggactattctagataagtttacagataaatacaatttcaattcttcatggtttttttttttttttttttttttttttttccttgagacagagtttcactgtgtcgcccaggctggagtgcagtggtgcgatcttggctcactgcaacctytgcctcagcctcccragtagctgggattacaggagcctaccactgcacctggctaatttttgtatttttggtagagacggggtttcaccatcttggccaggctggtctttaactcctgacctcgtgatccacctgccttggcctcccagcgtgctgggattataggcatgagccaccgtgcctggccaattcttcatgtttttaatgttttaaattataatacactaaatatagatgttttactatgttttattttcttatacatttataattgacagtaaaacagtttttgttgttgttttggcttgtttttttttttttttttaattttttttgagcatcttgctctgtcgcccaggctggagtgcagtggtgcgatctgtgctcactgcaacctccgcctcccgggttcaagcgattctcctgtctaagcgcccccgagcagcagggattataggcgtgcatcaccatgctgggctaattttttgtatttttagtagagatggggtttcaccatgttgaccaggctrgtctcaaactcctggcctgaagtgatccccccacctcagcctctcaaagtgcctggccgtttgtgatgtttttgatagatatttttagagattatctttccatatagttgtgtcagtttacaccaccatcagaagtttaggagaatccattactattctcttctgataccttgttctgcttatttgcccttgttgacttgctcaagctcttcctctgatacctccttattttaaggaatatacacacacacacaaagaaaaacacatgtttttgcatccttaaagaaggctaaccttttgctttctttgcaaaaactcttcctttcttttatccattttattttgaagtaagtaagacctgctgcctcactttccttaccattcacttcctcttaagtctttgcagtcacttgacagtaggcacctcgagagcagaggtcatgtctgttttattactgaatgtccagtacatagtccgtactcaatactcttcatctgaaggaatgaattcttataaaagcctccaccaaccatctacttggtcctattcacccattcctcctgtctctattatctcttcaccttagctttccggaaatactacaccatctttccatacctccacccattgtccattcccgtttgcattttcttggtttcagctaagataggctgttcattatttatctgccaccttccatgtgcctgccttcgtggaacccttctttatgctgccctttctcctagaagtttgctgtgttctgtcctctctttccttcctccagttccacctggcaacatcacgccatcatttcccccccattcagagccatgccaaaagcttgctctaggaaactctttckgatctccctctccctaaccaccccaacctttctccttctttaaacaactgtagaactttgcaggcggtttgtagggcctaccaaatatgggccactgatgtgctgtttttaacttctcctacccaagtagaaaccccttgagctatctcttattttttccttcagtgtataacagtctttgcgcatcattggtactcaattaatattttattgaggtgccctgtaatctgacattccagggagctttcaaggaaactttgtcacactaaaaaaaattgaggattgttttgtgggttattcygctcctttgtcttctaactcacagaagttctgtcatggttcttaggggttgtagggtgtgtccacttattttaaaatgtcaaagaccagaagagtggagaatgggaaagtggcaaagtgttagcactggaaagatgtttagagatcacgtagtccaacccttaaattttatagatgaataaactggtatctagaaagcttaagtgacctgcctgaaatcacacaactagtttgtggtaacacttggtccaggaggttgtcagctgaccctcttcagggctcgttcccacaaggtaccacagtacatgtgaggatgttaggtttgggtttgtgtagaactgttaaaagaggcatataatattccacatattgcctttaatggattgatacataggaaatccagactctgtaaatagttttctctctctttcccttaataattataatttttatgactaattcatttatactaactaggagagtttctaattacattaacattggatggtatagaatggttggttgacatttgagtaaactttttattaaagtataaaatacagaaatgtatacaaatcacaagtgtatagttggaattttcaaaaagtgaacacatctacgtgactagccccagactggaaaaaagaacagcaccaaaaagtttagaaacatttaaagcaataaaacatttggagaaataaaaggattttaaaactatataaggccaggcctagtggctcttgcctataatccccccactttgggaggctgaggcaggaggatcccttgatgccaggatttcgaggttacagtgaactatgatcatgccactgtaccctagcctgggtaacagagtaagacactatctctaaaaataaaaaataagataaaatattttttaaaaaagaaaccatgtaattttctcttttctccctacaggtattgtcagtatgtgtgttaacaacaatacttggttgtatatttgggttgaaaccaagctgtgccaaagaaggtaattaggtgtgtgtgtgtgtgtgtgtgtgtgtgtgtgtgtgtatgtgtgtgcacagccttattaagaatgtgattgaggtaaacattatctcctattcctatgggtactccatagatattgtcaattcaacgctggcttgagcctttttcctgaagttcttgtattatattagtcatataaagttctacttacaaaacatggccgggggttctgatgctgttgtcctggagcccatgctccctgacttcctccagggactcagaggacattctttactgctcttttaccctaaggagttagttgctgaagcaaccctgtaggttactaggtgacagttaccatccctgggcaaccagaaacctgtcagtwtgtgctcttaaggttctaaaattgcagacattggttgtttcaaagccacaatgatatttttttaaacttctagatatatttttctttccatcaattgcagaaatctatccagcattgacaagattataataaataattaaactggatcacagtaaatcgtagtggttattatcttgtctttgaggtagttccccccccatccyctcgcaataaaatcattgatggtcattctagagaattcagctttgaaaattgaacaggttcttctgtttggctattctgtgattgtaatattaattatttaaaaaatttttagtgattattaagctatcatgtactgttgaaaagtagtaattttatgtatcagtaaactattcagaacacatgtatctaagtttaactgaagtaaacagttacagactttagtgtttacctatgtcatcttttagcatgaagtgattcactcctgagttgacacatacaaattaaaaatgaaaaataacaattttaatccaagcccaacatagtatgcatcatatttttaaaaattattaggtgcatattaatgagctccaagtaatagctattattccaatagacttccctgacccccactccaggtcaggaaagttcgtatttctgacactagaaattattattgttacttcatcttcttaaaattgcctgatttcccagtgtcaaatgagaggtaaattccatggcagtgtctttttgggtcagaacaccattaaagtcaagaactaagattatttcttttttgttgttgttggatgtcccttattttccatgtgttcctttttttctttttttctcattgtcctaattttctagctctccagtgaaacctggcttattcaaggtatctagtaatgaacttcaacagtaaaaaactgtcatgaaaagtactttcctcccatgtctaccatttattcatttagcaaaaatgtgctaatctcaactatatggcatgcacctggctgggttttagggagacagtatgctgggcaaagccagatgtggtcttggtttgccgtctaactgggatattaaccaaataacctagttacgtgtggaattaagtaattgaggggaaggacaaggttttatatgagcttaaaaaaatggaaatcaggcctagctggggagttaggaaagctttttagagggagccagtctggatctaaaggtgaaatgggtgtttcaggtcagggagggaagagctatgccagggagcatgttctgaacaaacccactacttctttacaccaggattgagagtgaggcaggctaggtaatcttttcctttctaaaatattcttaaccacttctaaaaaaaatttttcccacattttgaaattttagggaaccccatgcctgcttaagccaactttttcatagcacaaagtattcagaacaagcctttattctgacttttattttatcacaccatggttatttaagtcttatcagacccagtaacgtttgtaataataatcattaaaaagttatctttctttcctacatcaggagataaaaatcacaaaccaggcacataaggttactttctgtttgtatcactttttgtgtgtatttgtgaaaagatttttgccttactttattaccccatctgtattttctaaagtagtatttgaacctagtgtacacctaacttagttgtattcrttgatgtttactttgaattatataatgattagaaacatctgacttatcgttcaattttttcagttaaaagttgcaaaggtcgctgtttcgagagaacatttgggaactgtcgctgtgatgctgcctgtgttgagcttggaaactgctgtttagattaccaggagacgtgcatagaaccaggtaaggatgagcagggaaaaaagtggagttatggtcattaggaaaagatcaaggaaagttctgtgtctttcaggtatgtgatttacctaattcatttgaattttttttagtttagcatacatacacgttttgacattagcttttatattttctttcaacagttccttaagagaaaaaaatttacagaatttctctgttaaacattttatggatagcagaactttgtctatttttaatgtatgctgaaagcctttgtaatctaatttgcattcaaattctaaaagcctgcttgaaatatagaaatattttcattatggttctttgacggcaagagatcttatatgtccacctatatttttcaaaataaaactatcagaatatgaaaattttcttagttagatttggaattctctgcatatgacatggaataatttttaaatgagagagatttatttatttttcattagtatttattttttaaagacagggacttgttctgtcacccaggctggagagccgttgctcgaccatggctcgttgcaaccttgaactcctgggctcaagagatcctcctgcctcagcctcccaagtagctggaactacaggctcacaccattatgcccagctaatttttaaaatgtttgtagagatgaggtctcactacattgcccaggttgatcccaaactcctggcctcaagcaatcctctcaccttgacctgagagtcagacttagattaaattttagcaggtagaagaagccaggtctacatatgaattgcatatggtaaggtgcatctaaatttgaaaatgacaaaattctggacttttagtgaaataataataattggttcctacatattttaccccattagttcagagtggccatggtagtggcagattctgtgagtgactaagagctgtgaaattgttcattgttgctcatggatcatactcaggaagacagcaattctgtgttcactttggacatgttgaatttgagacataaaacacattttgctgatgtttgtttctagaacatatatggacttgcaacaaattcaggtgtggtgagaaaaggttgaccagaagcctctgtgcctgttcagatgactgcmaggacmagggcgactgctgcatcarctacagttctgtgtgtcaaggtcaggtgctcgttgggctctgcagcagcctggtatcttccagcgtcttagcggggctttacataggtgttatcttttatattaggagtcatggctattggccaactatattagctgaaaaaaataattttaaaactttttattaaagaaacttttaaacatacacatggggagagagagtatgtaatgaacrttayacccatcacccagcttcataattatgattatgtrcacacggccaataatattttatctataaccactcattcccctgccaccaccctctcatgttattttgataatagcagcacacttgatgttgtatttgtggaaagatccctcttacagtcctggctgacttttatgtcccggcttccctcctagtaaatggggacactgtctgctgtgcattgagagagtcgatgtgaaattgtttagaaagattcgagggcattttgtaaggtgatactattatgatgtcttgtccaggtattattattatttttttttcaaatttcttgacagaacytgactctatatgagagagaactaagacaccaaaataccaaggattttgatgagtggatagaaggggagggttgtaaattttggctgaaaatattaagaatttgaaaatggaaaagataccttcaagttctcacaaatacagtagtatgttttagtcttacaattgtgcatccatttttaattcctgatatcaactaactcttattttgaagcacaataattctctttattgattatacacctccagagtcatgtcctgtgttatctatcaatctgttcacatactttgtttttggaatctgtcttaatgtgtctcacaagcatcacaattattattactgttaagtgtgttcattttattttcttgaaaatattttaggtgagaaaagttgggtagaagaaccatgtgagagcattaatgagccacagtgcccagcagggtaagattatattctgaggtattaattttttcttttttagaagtacagcatcatttttttctttccaaattaagatgataaaaataataaaatcactggtttattaaacattacaggttgagtatcctttatccaaaatgtttggtatgagaactgttttggattttggacttttttggattttgcaatatttgagttataccagtttgggcatctcaaatctgaaaatcccaaatgctccagtgagcatttcctttgagcatcatgtcagtgctcaaaagttttggattttgaagcatttgagatgtcagattttcagatttgggatgcccaacctgtatttttagccagatcttgtgtttggcaatggtggaacagagatgattatggagttatccctattctggaagtttatagaaaaaagagaggccatgaatatttagtctttggtattgaagaatgctagataaaaatatttgcattttccttttcaggaaggaaggatctttacttttatttggagtttttagagctgctaaacttgtagaaaatttagcttctttttttttttgtattttggtccatttatacatttttgggataacaacctatttgtgagagatgatacatttttttaaaataattcatatttggtttttttgtccttcagatattttgtacagggtcttccatatatgacaccatcaaaaagagtatgtgtggaatttaaagggtgaagattttataaaggtgttaagtgtatttatctttgttccatttgaggtctaccatctcatacatttgaattactcatcttcagaaatgtatttttacctctttaaaatgatagttttcccagactattaaaatttttaagctgtattttagttcattttgttcatgtatgtaatttttgttatatgtcttcttttttttcttttggaaggaaaagtacttttgatttaaataagcagtagcaacagcagccaaaactaaacctcaaccaaataatttcaacagaagagcctttttttaaggaaaattttcatgtacsctaaactgtcttttaaatccaaggaatactgggaatgttagacttagtgaatttcaaatctttctttttcttctaaatattgcttataatttttcagttgtaatattgaatcttttagtggaaaacataaccctttctttacaagaagattgtaacttaggacacttattattacactggataatttaccagtaygtttaygtgatggcccactaacctgcttttatgatttctgttgattgaataaaactagttttgtatggaccgttaagactatatacactggttctacagagtctctcagtggagctatgttacagatagtagctagtgaaaattgtataaaaatgttctccttgtggggttgcttttgtgtttgtgtgtgagggtaaggtgggaggaggcagagttgaaaaggcaaggtaaggtatttcctgtcaagttttaaatttactgagtaaactttcagtgggaagtctaacagttatccagtgttatasaagttccctaccacctaccatgtatcactagatgctgaaaaatttctgagccatggccgttttggggtagccacatggccattgtccatagctattctcgtttgtcaagtatattagcatcctctgtggtttttggcctcctttttgaaatttccacactacacgttaactgtttgtatatgtatgtatgtgttgttgaaacctcattgatcattcccagctttgaattatttctttgttgtttatatatttaaatatagtatctctcaaacttttgtattaagtatttatatcttttaaatatattaagcctaaaaactaaatacagtatataggcttggtgggtggctcacacctgtaatcctaacactttgggaggccgaggtgggaagattgcttgagcctaggagttcgagaccagcctgggcaacatagtgagacctcatgtctacaaaaaataaataaataaataaattagccaggcatggtggtgcgtgtttgtagtcccagctacttgggagggtgaggcagaaggatcatttgagcccaggaggttgaagctgcagtgagctgtgatagcgccactgcacggcagcctgaggaacagagtgagactctgtctcaaaaataaaataataaaataaattaaataataaaatagtgtgtaatgtatatactatatgaagtactatttactgtattagagtccatatcagaaagtggtggttcaggaagaatatttatggaaatattatatgctgttgttttttattgtttattttcctgcaaattgggaaaacaatattatattttagtagcaattggtgtagcttttggaacagcaggaaccatgaatgatgtttctgtatggtggctcaaaatgatatgaatgcttaatatatactatgtgatgatatatatgtattacgaaatgatagagcttgtatataaatataaatgcatgtaaaacgtactttataagtatgcttgccgactttgttagttagttttcttaagatcacacagaccttagtggaaaatcttcactggacctgtgccaagaagggggtacatcttcattggatatgtcttgtctttgcttctttaaacatttttktttctttttcattacccaggtttgaaacgcctcctaccctcttattttctttggatggattcagggcagaatatttacacacttggggtggacttcttcctgttattagcaaactaagtgagtaacttcagagtttactgctggaatatcaccatttcagtgagattgactaggcaggcagtctttcttggaaaagtactggcagaacctaactgtttcactaaacttttctatggcaaagtagttgaaccttgtgtaaggcgcttatctttaatagtgtgattactctgaagctgcccttcaaaaaaataagttaatatagttatcttcgaattttaacctttggccatttttatatgtatttattctttctcagaattttgaattccttgtgaaaaagtcccttgtttatttattttacaaatattattatttttgagactgagtctcactctgtcgcccaggctggagtgcagtggtgtgatcttggctcactgcaacctctgcctcccaggttcaagtgattctcgtgccacagcctcccaagtagctgggatttcaagcacatgacaccatgcctggctaatttttgtgtttttagtagagacagggttttgccatgttgctcaggctggtctctaactcctgggctcaagcaatccacccaccttggccttccaaagtgctaggattacaggcgtgagccaccatgcctggccttattttacagatattttatttcagaaatagaatttcaaaaactaaaggtatttctgagatattacgagtacagacatagaatatttgtcagttattctgtattatcctttggattgaattggactcttcctttttttttttttttaaatcccaatcaggccttaattaagtgatttttctataaattccccataaaatagtataatggtgttttcttaatattgatgccaaagttttaaatcacgttaacaacctttaagcagctacaatgtaatactggactaaaatagatgtaagtaaatacaattactttagctttttttctggaattctaaaatattgcttaccagatttgagtatgtgaggtgctttaaacattaacatcactctttgtaaattcatatgtacgtcattatgcttgtcttatgaagtgccaaaataattttgggagagttttaaaaatttttagtttttaatttctacatggaagaagatagttttgttttgttttaatgttttgcataaaaagtctttagctttgcatggacaaagctgtgttcttcccagcaggcctgtggcctttgaagtttaaatacagccctttgttggccagtgatgatgagcattttttcatgtgttttttggctgcataaatgtcttcttttgagaagtgtctgttcatgtccttcgcccactttttgatggggttgtttgtttttttcttgtaaatttgtttgagttcattgtagattctggatattagccctttgtcagatgagtaggttgcgaaaattttctcccattttgtaggttacctgttcactctgatggtagtttcttttgctgtgcagaagctctttagtttaattagatcccatttgtcaattttgtcttttgttgccattgcttttggtgttttggacatgaagtccttgcccatgcctgtgtcctgaatggcaatgcctaggttttcttctagggtttttatggttttaggtctaacgtttaaatctttaatccatcttgaattgatttttgtataaggtgtaaggaagggatccagtttcagctttctacatatggctagccagttttcccagcaccatttattaaatagggaatcctttccccattgcttgtttttctcaggtttgtcaaagatcagatagttgtaggtatgtggcattatttctgagggctctgttctgttccattgatctatatctctgttttggtaccagtaccatgctgttttggttactgtagccttgtagtatagttcgaagtcaggtagtgtgatgcttccagctttgttcttttggcttaggattgacttggcgatgcgggctcttttttggttccatatgaactttaaagtagttttttccaattctgtgaagaaagtcattggtagcttgatggggatggcattgaatctgtaaattaccttgggcaaatcaaaaccactatgagataccatctcacaccagttagaatggcaatcattaaaaagtcaggaaacaacaggtgctggagaggatgtggagaaataggaacacttttacactgttggtgggactgtaaactagttcaaccattgtggaagtcagtgtggccattcctcagggatctagaactagaaataccatttgacccagccatcccattactgggtatatacccaaaggactataaatcatgctgctataaagacacatgcacacatatgtttattgcggcactattcacaatagcaaagacttggaaccaacccaaatgtccaacaatgatagactggattaagaaaatgtggcacatatacaccatggaatcctatgcagccataaaaaatgatgagttcatgtcctttgtagggacatggatgaaattggaaatcatcattctcagtaaactatcgcaagaacaaaaaaccaaacaccrcatattctcactcataggtgggaattgaacaatgagatcacatggacacaggaaggggaatatcacactctggggactgttgtggggtggggtgaggggggagcgatagcattgggagatatacctaatgctagatgacgagttagtgggtgcagcgcaccagcatgacacatgtatacatatgtaactaacctgcacaatgtgcacatgtaccctaaaacttaaagtataattaaaataaataaataaatacagccctttgttaccattatcaggagagcttgtctccatggtgccaaatgtggcatcgtgagtttagagttaagaggtggaggtacctgtatatgaagtttaaaataaatcattaaaccatgagcccaagccctagctttgaataattagggaatgtagcctgtaattctgaactgatggaaggcagtgagatatatagacacatgccaatttgagggacttttttaggcaaatggagtattgaacgctggaatcattagttatgtgttccctcctcaatagtagaggcaggagaaaaagaatgaggcaccagaactagatcagcagggcatcaggaatagtcggacttctgcactttcttggacttgaagccacaagatgccttttgtctttaaagcagctgagtttgtccagggttagctgcttctagatttatggcctgggaccctgtcttcccagctactccttcatccttgttttaatttatagacttagttcagttttcttattctacctcttatgatttaggtatttgaccactaagtagtatcaaagaacttacaagcatcattttattataacttgttcatcttgaatgaagtgatgttatgggtaattggcttaattattttaatgtttttctgactaagagaaaaatgaagtcatctttaagattggatttgtatccacagtgttgctttataattcatcctgaatttttatctgattaaaatccctcctgggctaattttttttacgtgatttagactgctgtggtaccactgctaaatgaggtaagccaattgtcagatgtatttaataacaatgtttatttttttcccttctagaaaaatgtggaacatatactaaaaacatgagaccggtatatccaacaaaaactttccccaatcactacagcattgtcaccgtaagctctgcatttcaacttctatctgtttgaagaagtgagatgggattgtaacattttttgagggaatagatttaagataaaagaaaaacaacttattttccaataggtagttaagtaaggaaacccaggttctgatcyttgctctgccacaaactagctgtggctttggaaaggtcactttactggctgagtctccattttctcatctgtgaaaagagatgactcaagacctcaagaaacgatttcctggtttcctttcagtgttaatattctctgattcttgtatcctagttttgaggcttactttatttgagccaaaaaaccttcccaaactcctgtgttcacaacttgtctttctaatcatcttgatgatgaatttaagcaagccactttgcctgactccaaataggattacaatcctgtttttgtttcagtgtttccagatttaatttgagtcaaataaaacagtagaactcactaagctttagaattgaagccagaaaattagtatgttagcttatattgatccaagctactctgggacctcgccaaaaaaggaatttgttctgcagaaatgctttactcagcaatttaaaaagacaacagcattgttttcaaaatttcagaggctaccttttttttttttgtttttttgagatggactcttgtgctgttgccagactggagtgtggtggtgcgatctcggctcactgcaacctccacctcccgggttcaagtaattctcctgcctcagcctcccaagtagctgggactacaggtgcacaccaccacgcccggctaatttttgtgtttttagtagagtcggggttttgtagcctgcccggacctaggggcggatggggggaatgtgggaataaaagacaaagacaaaagagtatatttggaagaaggggtcagggggtaccttgcctctagtggacaagggccctgagctttacacagccctccatatttattaggcaaaagagatagcgagtagagggcggtggttgtcggctaattgtcagttggccttttggttcacagcaggcttgcgagactacattcttttaacaataggctagatttctcagtagataacttcaaggagcctggccagggagtgaggccctcagcaaaccttttggtggcagggcagtgtgagtttgcccacatcctgcattcatgaaaaacagtttgctgtttgaccatatagcctccatggaatgctgagttggtcatgtcccacgggccttcagctccctgcagggtttcaccatgttggcaaatggtctccatctcttgacctcgtgatccgcctgcctcagcctcccaaagtgctgagattataagtgtgagccactgggtctggctgaggctgccttttttatatagatctttatccttagtattactgacttattttctcctattacataatttaaatcacaaatactacataaaatcttaagaggttgcgttttgccattacctgatttttttgtttttctttccttaaacttattataattccatgtagcttcagttatcggtttctttttgatgatttttttctgtgaatgtatttaacattaartaaacacaacttgcatataatctgttttatcttttttagggattgtatccagaatctcatggcataatcgacaataaaatgtatgatcccaaaatgaatgcttycttttcacttaaaagtaaagagaaatttaatcctgagtggtacaaaggagaaccagtgagttctttgtttttctactaaaakagttaattattctcatctatttcaatcagagtaaaataaccagattctctagagcttttaataactgatttcatttagtgtgtctgtggccattcttttgtaaatggagatgaatgctgataatcctaaacataacttgtataattgcgtaaaaggagagtagtttatttcagaggtggatttgggttgtgctgggcaatttttcttttctgatcaattcttcttctaccagtagcatatagcagtagtatgggggtaatagctttgatctacacaaaactacgttgtttttgaacgtcttggttttatttgcctgtgctaatttaggagcttctttccaattgtgatctccaatttactttccaagctgtgttctcctttttaatttttaaaattctccaattctccaatttacttttttaaattgccacaatttaaaaaaattttttaaaaattgccacaataattatataaggtctatttaaataatcatgatattcctcttagaaggacaaagagcataatagttagtttgcaggttatgaattcaaattttagctctgacatttaaagctgtgtgactttggacaaatcattctgtttctgcctctgttttatcatatctataatgtagataatattgtttactactttgtaggattattgtgaggattatgtgaattaataatgtagcatgcttgtaggaatactatttagaaccatgattggcaataataagtgcttaataaatgttagttacatacacagatatctcagcaagttaaagacatgtatattcgtgaattttttttcttttaagagacaactgttaattaggggaatagctccaaaagctacaggagttaatctctgactatttaatatgttgttgctgcttaagagtcatattacatgattattgtcatctaagtgctgaagcttgttgaccttaaaagcattctagcactagagaggaatgcattggtgtggtatgaatacatactttcctaagagatgaatgtttgcatgatttcttaattttccttcattttctgctccagatttgggtcacagctaagtatcaaggcctcaagtctggcacatttttctggccaggatcagatgtggaaattaacggaattttcccagacatctataaaatgtataatgggtatgtgaaatgaattttttctaggatctgtaatatagaacagcttattcttatgtaatctcctttttattgaatcctgagctttagcatttgagtgatatgttggctgaaaaatgagaactgaagaactctttctcaaagagtttagatagatggtaaatggacagtaaaactagacaagtgggccagctgtggtggctcactcctgtaatcccagcactttgggaggctgaggcgaggggtcacctgaggtcaggagtttgagaccagcctgaccaaagtggtaaaaccccgtctctactaaaaatacaaaaattagccaggcgtgatggcgggcgcctgtaatcccagctactcacaaggctgaggcaggagaatcacttgaacctgtgaggcggaggttgcagtgagccgagatcacgtcattgcactccagcctgggcgacaagagcgaaactccctatcaaaaaacaacaaaaacaaaaaaaaacaacaaacaaaaaaagactagacaagtgttttctagagccttttgagaaacaccgataacgtgtttagttcagatcttcgggcagacatgaaaaatgaggtcatggtggaggtagagatctgggagtgggagtactgcacatcttaactctagaaagaaaaagaactgtaactgcccaacaggttcatcttgcacacttcctagacagattgggtttatcaagacaggagaattgcaatggagaaattgtaattcatgcagagccagctgtgtgggagactggagttttattattactcaaatcagtctccccgagcattttgggatccaagtttttaaggataatttggcagacaggagttcgggaagtggggaatgctgatgcgttggattggggatggaattataggggatcaagtgagtttttcttgctatctcctgttcctgggattgcaaaactggttgagccagatgaccaggctgggtggtgtcagctgatacatggattgcagggcatggtctggtaaatatctcaagcgctcatctgagattttacactagtgatgttattcccaggagcaatttggggaggttcagactcttacagctggaggccgcatggcccctaaactataatttctgatcttgtagctaatttgttagtcctacaaaggtagaccagtcctcaggcaagaagttgtttttttttctgtgtgtgtgttttttttttctgggcggtggggaagggctattaccaactttgtttcagagttaaactatcaactaaattccttcccaaggttatttcagcctatgctcagaaatgaacaaggacagcttaaaggttagaagcaagatggaattggttaggtgtgatctctttcactgtcataatttgctgttacaatttttgcaaagatggtttcagaaccaagagaaggaaaagatgagtgtattaaagaggatacagataggaatgatctctgctatttagcatctattgcgtttgcaaatattattaaaaagaagatattaatggtacctctggatttccatttctaaattagtaaatatgctttctaatgtaagaaactgattagaataacctctctgtgatatttgaaatccatgatgcattgagaaaatacaaaaactttttaatggaagaacctctttggccgatttgagcaagattaccgaaataattttatttatttttaaattataaaatttcggtcacaaaatcaatacaacaatgcatttagaagggtgaacagaaaatatcttaaatcccagacacgaaatgcttagcaattttccttgtgatcttatgctagttagtgttctttatggttcccaggagcacagtgcaatgcctcttctccaccttcttatttgccactgtttttattccatggacagtaattaagagtttatgggctgggcgtggtggctcacacctgtaatcccagcactttggaaggctgaggcaggcggatcacgaggtcaggagatcacctggctaacacggtgaaaccctgtctctactaaaatacaaaaaaaaaaaaaaaaattgccaggcgtggtggtgcacgcctgtagtcccagctactcgggaggctgaggcaggggaattgtttgaacccgggaggtggagattgcagtgaactgagaccgcgccactgcactccagcctggtgacagagtgagactctgtctcaaaaaaaacaaagaagagtttgtgtactaagcatgggggattcaaagattaatmgtatatgatctcttggctttttaagatttagtagagtatacaactaattgtacttggggtggggcaagaactctgattagaggtgtgtaaacaaagcctgtgtccagaggaaggcatattcaattctgctcaggaaatactgcgtagagaactgctgtctgctcctcaggggcctgcttcacagctgtgctgagtcatcagtgagtgagtgcttcatgatgtatgctttgcaaagtatattaacatatgagttattcatgtggtatgcagttactgttttcaggtccatgaatattatcctcaagtagaggatagcaagcaaagttttaaatccaattgcaatttttatctgtgtaaaacctaactttcattctttcattgggaaaataaagttttcaaataaaacccttgatttcaaacacaatagatgcgaaatagcatttagtagctcttaatgacattttcaatgaaaaaaactatattttacacccaaacaattgtcagccatcttttatttttgtttgttcttcattttagttcagtaccatttgaagaaaggattttagctgttcttcagtggctacagcttcctaaagatgaaaggtctgtaggcaattaatttctattgtaaatacttcgttttgtagaaatgatatactattttaaaatagactacaacaaaactttgctatttgctatgatgttttatatcgaaataaattctttagtaaatratcataccacattttgaagaatttcaaagctgtaaattatttctcagtagaactgttacaccagtgttataaaatttaatccctatcaattgatgaattattttttccattctgtttttcaatgtgttcgtaaaatattacattttgatactgtttgatttagaccacacttttacactctgtatttagaagaaccagattcttcaggtcattcatatggaccagtcagcagtgaagtaagtacatttttatcagtaattatttcattaaacccagtcatcaaactgaacctcgctttgaaggaggctgctagaccattttataagattctatcatttctggaaaaagcaagtattatacacaatattactaaatataaggatgcactttaaacaaaataagagttgggagaattgtttagcctgtgttttccacagtgctaaattaaactgatgatcaattagcttctatattttcaatttgaaagcctttatccactccatcgccccttaccttggcctaaatactaagtgctttttgagaatgttataaacagctaaacctccagtgtgaaaatacagggtaataagtcaaatagcagaggaagcctcctatgaactctcttccttaggagataggtctttggccacctgagaccatgcttacaacagaggtcccatagaaggatgggagattttatcaaaagtgtagcgatatttgaatacgtgattttgttgaatatttcctaggaaactagaggtacgaaacagctcatggactaacactttcagtgtaacatctcgtttgacctgacaccctttcaggaacttagccagcgcctagctatgtttttaatctgtgtagcactttaaaacagcaaacactgctttcagttttcacgtggccatatcatttttgttaccattttaatggcaaaaaaacacaattacttttgcaccaacctagtattttggaacacaggaagcattagaacagaaaaggatctgaaggctcggcaccatggctaacgcctgtaatcccagcactttgggaggctgaggcaggtggatcacctgaggtcaggaatttgaggccagcctggccaacatggcaaaaccctgtctctactaaaaatacaaaaaaattagccgggcctggtggtgtgtgcctataatcccagctactcaggaggctgaggcaagagaatcgcttgaacccaggakggggaggtttcagtgagccgagatcgcaccactgtactccagcctgggcacagagcgggactctgtctcaaaaaaaaaaaaaagagaaaaagaaaatgatttgagcatatttccttgtacctctaagttgactttccttctgatatatattttgttggtgacctaagatatgaaaggaagtaaaaagtaaggatcttgactattttgggtcatgaaaaaagtgaaaagaggtattgccaggatccctcctgtcagaatccttgtgtagtgatcttgtgccccctgtgattccaaggggtcatagactattaaaaaaaacactctttcttaattttctagggcttcactcccaaattcctatcagttctcccgcccaggtagcccaggttggatagtcggtgagccttaaggactcttcagcacagcgttcagactaaagcctggcctgacatgtctgtcatggtccctgtttttgagggtgctgcttgcctaattcagcaacagcagaggaaggaagggaggcaaaaaagcatccttatttttctcacttgaatttacaacagctgcctaaaccatcttcccttcatttccctttccctgggtctgcgctagatttgcccctcttaaaaagtaggtactgcttggatcactatcaccttggataaaagagagtgaagagagaaggaagttgaccctcacctaggtctgtttttaccctttgtattctttccatcaaaatccatctccagcagctccactgtagttagtaactccattgtgccttcctttcattctgtccttcaacttggcagaaatactcctgcttagagggaggataaggaagatgcatgccagcaatgtggacatgtcataattggtcaaagggaaaagtttcttgtagctgttgtcttgatttgaacaattggctacatgctagtgtgatttttactctttcactaaagtcactgatacccaagacttgtgtctgggtcaatttggctacagaaaaatcccaggatcattttatacttgtttataaggttacatacatttgaaaatcattgctgccttttctaattcactaacagtgtgccaaagcacttgcttttctgagtcatcttcatttaaggttgagcccattacttttcaaatcatatccatcaatttgcaaactctgtgaactccaacattactggcacaccaaaacccactttatcttaatacttaaaaattccagttcatgttgcttggataactttgaatgaaagacgttgtcttgtttcatgttacagtgaaagagcttatctcatattatagtgaaataatactgacaatgaatgaagattaagctgattccacacattacagaaaatacacaaaactgcacaaaaatttttctcaaatggttttgcaaggagagaggataaaataagtgccagaaagcagtttgccaatatcatttgtcattctgtgttcttgtgatattcatatgtaaaatacatgcagtttgtaaggaaataatgggttatattcctatgagttctaatttagaaaattaaatacattgaattataagaagcatttcatgaataatttgaacatttttgaaaattaggaaacatatttatacagtgaccatttgaatgatcagaaagtataagaagaaatgaattgtggaaaatgaagtggtaattaagaacatattggtttctggccaaacactgtagatttgagctattattattttggcttaagttgggtctaatctaagtagtagcattctgacctcaggaatagatcagctaatctcattcccaaaacttaaaattgaacgtgtatagaattaggactcttgcattgttaatgatctgcagttatttactgttctttgtatctctgaccctgacctgtcttagtctaatgtgaatcagctcattgtagttgcatccactggcccttatctatctatctgtctgtctttctttctttctttgtttctttctttttttttttttttaacagagatagctttatgtataaatagccattagtgtggaaggtatcacatgaggttgttgcttcccattcttaggtcatcaaagccttgcagagggttgatggtatggttggtatgctgatggatggtctgaaagagctgaacttgcacagatgcctgaacctcatccttatttcagatcatggtaatctgaatttgcattatttactcttcaggataaagggctgaagaaagtttacttgatggtttcccaattttttctgaatgttgtagttaattcttttttaaaaatgtagtttcttatggacagtctttaggaaaaaaatacattaaatataaaatataagtgaaacacagaattcacagaaacctaagtgcctatcaagcacaatacaccaagaatttgaatagctaaaaaatatatattttcaacattaaatttgtgtaactctacaattttagatttagttggaactgattattatagcttcaatttcctttttttgttgttgtttttgagacagtctcattctgttagccaggctggagtgcagtagcatgatcacagctcactgcagcctcaacttcctgggctcaagtgattctcctacctcagcctcctgagtagctggaactactggcatgtgccaccacacctggctaattaaaaaaaattttttttggtagacatgggatcttgctatgttgagcaggctggtctcaaactcttgctctcaagctcccactgctgccttccaaagtagtgggattacaggcattagccatcgtgcccagccttcaattttctttagcttgataaatctgactttagaagcatgatatattaattttgataatattttcacttttacttactgtgatctttgtaacacgcttgtgtacagtttggggactataggagcagcgtgcctatggaaaatagaaaataggttctttttgtttttgttcttgttttttgcttcagaaataattatagaaatctgtgtttagaagcagtcctaagaagttacatgcaaagaagtaccagtcttggaatgagagtgaatcatacacatacactcccagttaatatcctaggtggtttggggcaaataactgggctttcacattcggtctaaaaatgtgataagacattcttctttgctcacataatgatattgtaatatataaataagaagaaacattaaccaaaatttgggtgacggaaaagattttgaaaaaagtgaagtgataggtacagctgaaattctgtcttacctatcagatcttcaactaatatgagtgctacacccatgtttaacgaatttaaccttggaagtgaaagaagttctgctctgcatattaaattttttgttaaagttacagcatgttttgggattttttttttctcctaggcatggaacaaggcagttgtaagaaatacatatatctgaataaatatttgggggatgttaaaaatattaaagttatctatggacctgcagctcgattgagaccctctgatgtcccagataaatactattcatgtaagtatatctctgtgataactttgaatatggtcatattaagaataccttcctttaggccgggcacagtggctcatgcctgtaatcgcagcactttgggaggccaaagtgggtggatcacctgaggtcaggagttcgagaccagcctggccaacatggtgaaaccctaaaaatacatatacgatactatactatatctatactaaaaatacaaaaattagcctggcttggtggcagctgcctgtaatcccagctgctctggaggctgaggtacaagaatcgcttgaacccaggaggcggaggttacagtgagctaagatcatgccactgtactccagcctgggcaactgagtgagacttggtctaaaaaaaaaaaaaaaaaaaaaagaataccttcctttaaatcattatatcgctaaactaaagggaatcacagttaatttttttatgattaaatctccaatgcagagcttttgtacacaaatggattttatgggactggatgcgagaacacaacttacctattggttattcatggactaagcataatatttgatgagcttagtgcaattttatgttgaagtgtgtgttttacttgtgtgtcaggataaagattatactagaaaaaatgtttaagagagaaatccaactacatttattcaagtttaattaattaatgacactccattaaaattacttagtttgggattaatattctgttgtgaggaggagtgctggcagaaatgattaattctataggcaattgattcctgtcctcccttaaaccatttcagaaacaataaagaatgtatcttttacatagggaagaatgaatttcacatctcttgaccacatgtggaacataaactgccaaaagatgttttaaaatatttattcttttgccagtcaagtgtatttcataactgtttccacctctgttacctccctctctttttgattaccatccatgataactttcagatgtgtagagcaaattttgtttgtctttttgatatgatatagttagttaactttgaaacagaaagagaataagcttttctgacaattaccggaattgggttaggttggtctatttggtaagatatgtttcaatagatagatactattgactattaatgaagaaaatagatttcactgcaggaaaatggttatgcagatagatttacacagtgtcacaaagcacaggctgcatatgcctaataccaagttttaattcgtatttttttaatttagaaaagtagtacatgactgttataaaacctgttataaaaactatacagatagactggacacgatggtggctcacgcctgttattccagcactttgggaggccgaggcgggcggatcataaggttaagagatcaagaccatcctggccaacgtggtgaaacccgtctctatgaaaaatacaaaaattatctgagcgtggtggcatgtgcctgcaatctcagctactgggaaggctgaggcaggagaattgcttgaacctgggaggcagaggttgcagtgagctgagattgcgccactgcactccagcctggtgacagagagagactccatctaaaaaaaaaaagctctacaggcaatagcagtctccagagatgtttgggatgggatagctaagctgtaccatacccttatcttaggccctcaagtttcccaaattaaagcaaaaactatatatgtatgtcactttacataaatatataaaatatatgtatataaaatgtatactcttatctggataattttctcaaatttatgtaatgtttggctaaaataaaatctaggaagctagacagttattgatttgtagtagaaagtaccctatgtaaatccatgggcatactatgcaaatgcagtttttaaactagtctacttgccttctctttgaagtttcctcatacccctcttatttgaaaattctagaactatcattgaatattgaagtatacaaagtaaaaagaaacagcttcccacctgaagtcctcctacttgacaactcatttcccctctctagaaacaaccgttgttaagcttggattatgtcttcctggataattgagatatttgaataattatttttgttgttgagtatttcctagggaacaagatgtacaaaacagccttacaaaacacatacagtttttatttttacccagtgaaaccataccagatctagatggatagatattttgagggatggatggatgatggatattggttactaactggatggaaagatggttggacaggtggatggatagttaggtggatgaatggatatgtgggttaagagatggatggataggtagatgttctgtaacttgtctttccctttawcaatatgacactatatcatgggtgtcattacagggtgatccctaaaggtctgtctaattcctttcagtggctacaatgtaatgacttaaatgaactctttaaaacctgccttggtatttaaatgcagagtttggatctgacattctatatttttgtattatgttttaattatagtatacaatcaactattaattcttatgtttgttcccctccagttaactatgaaggcattgcccgaaatctttctgtgagtatctttattttccattatctagttatttttacttttgtataatatayattgagagaaaagtttcagcatctattattgggattgaaggattagaatattttagtaatctgggccaacatggaaatgctgtgtagtttaaagatctttmaggtcgtatcccaataatccaggtttgaaaaatttttaagaatttgtctattggcattataaaatttatatgagaagaagaaataattttaaaactatttacaagaaataatttttaaagtagaaggaaaaaccctgtagctgtaccaccataaacaccattagcgttatgatatatttccttccagtctttttttatgccttaaaaaattaagtttctgtactagtgctgagttatctatactacattttatactcatacattttaagtctgcaagaaaactcttacaattgcacttacaaggatgtttgaaaatagaaccattagtggtaacttgaatataatctagtgacactgagttctggggcttttatgcagtaataattatgatttcctctaaatatttcaagtagtttggaagatttaccttgtacattatataagtggtttatttagctgttttttcatctgacttattgggccagctgatgaaatgtttgtgaaaaaaaatttcatatgaagttagaaagcaatttcaagaaaagttgacactttttatagatattagggaaatatctttccctaataaatatctttccctaaaaaagttgacacttttttagatattagggaaataatagtttttctttgctgtttgcaatttcagtgccgggaaccaaaccagcacttcaaaccttacctgaaacatttcttacctaagcgtttgcactttgctaagagtgatagaattgagcccttgacattctatttggaccctcagtggcaacttgcattgtaagttctgacagtctcccaggtaaacttagtctgatcggttagtgattcagggtaaccattgggccctttctaacaatattgttatgtgaaaactgtataagtatgattctcttcactctaacccaggatttctaatgtcggcctatggatgtttgagttagataattctttgttgtggagagctgtcctgcacattgtgggatatttgacaaggatcctttacttctccccactagatgaaagtagcacttcttctgtaatgtgacaaccaaaaatgtccgtcagcgttgccaaaagtcccatggggaggaaggatcacccagaccatccttggctaagaaccattgttctggcttttcatatacatattgattacttcttacaatctacatttgttactgcttgccattgcatgtctcctgcacattacagtatgtctaattgtgcctccaaagcctagccaacagttggtaaaagcactttataataatgagtaactatcttcattatacacgttgttttttcattcttcttatactaatccatcaataaactttagtttattggtgtgtttggcaaattatttggatggttaatagtgttaatatctcacaacttgttcattaactgttttggtggttgccaagaagctagtcatgatacatacccctgtcaagcaaaacctaagcagtgaaccaaaattcagtaaacagaattatactgtctccactcttattggagagctgggcttttagttttcaaaaaatatatatatatatgaaaggagaaatggtcctatcttcatgagagaactaatatttagtaaatatctaaacaccatgttgcaagcatttctttaggctatatcattgaatttttacaaataaccgacatgagaaattgaaatcaaagaagacagttaaatctatctaaactcacaagtagttaatcacacagccaatgttcaaaaccacttctgtcttgatgctagtggtttttcttctgtctactatattgcttatagttaatttgtccatgaaataaaagatagaggtgacttcttaatgcttttcaaagccaggtggttttatttaccgttgtgttggtttaacaaaatagttacatactttttaatcaatgaaaataatgttatgattatcaattatgttttatgaaaggactttacatttttaattcatatatgtcaacattaggaatccctcagaaaggaaatattgtggaagtggatttcatggctctgacaatgtattttcaaatatgcaagtgagtaaacctattatacttaattggattaaatctaaagaaaaaatgatatgcaaagttttagacttgaaaacatactgtgattatatgtcttgaatgagaattaatggaacatactttcataaagctatttttctttgaacattaaagaattttgttaaagttttatattcattggctattactaaaaagtcaaaaaacaacagatgtagtaaggatgtggagaaaagggaacacttatacactgtcaaagggaatgtaaattagtacaacctctatggatcactgtatagagatttctcaaagaaataaaaatgaaactacccctaatctagcaatcccactactgggtatctacccaaaggaaaaaaaataatcagtttatcaaagacacctgcactcgtatgtttatcgcagcactattcacagaagtagtcatggaatcaacctaaatatttataaatggatgattggattaaaaatgtgtgagatatatatatatatacacacacacacacacataccatgaaatactactcagccataaaaaggaatgaaatcatgtcctttgcagcaacatggatggaattgggggccattatccttagtgaaataactcaaacaaaaagctaaaaatcacatgttcacttgtaagtggtagctaaacagtaggcaaacacggacatacagagtggaataataaacattggagactccccaaaggtgggagggcaggaggagtgtgagggatgaaataccacttattgggtacaatgtacactattctggtgatgggtaacactaaaagctcagacttcaccactgtgcaatatatccatgtaacataactgtactcatacccctaaattcataaagttaaaaaattaataaaattttatattcatgtttcataaacatatgacatatctcctattatatttctaataattatttttcaaatttttgtgctctgttgagagtattgctttacagttgaagaaaaccagtgctataatagataagaaagtatcagacttatgttctgagaaggataatatcttacatttacccagcactttaacattttcaaaataaacttacaataattatttaatttgatccctgcatcactgtgtaaggtgggcaggatgaggtttatattgcatgtcatagatgaaaaaaaaatgttatcattcattctgttctgattgtcaaaccaagaattgtagtaaaactaagagacctatcctagatgtccttagattatgtgtgtgatagggttaaaactatatttcccacaaagtccactgagcgtggtagttttcctcttatcttatcataaccagtttgtatatgtacaatgtggataacagaatttttgggaccaacttgtagacagctgaaatgcactgataaacttccttttctggccatctaggccctctttgttggctatggacctggattcaagcatggcattgaggctgacacctttgaaaacattgaagtctataacttaatgtgtggtaagtgtgaacaggtgccttttttcccttctgaaaatagacctgaaataggattatcaaaagcaggtcacattgtaggcaactttgtggagatgatggtgaggcaagacagatttttaccttcttcctgactctcagactcactgaagaaatgtggggaacatgtcatcttattacttatctgtttgttccactaggctgcttgctggttaaagtacaccactcacagcagggtggtctgcacacccccactgcccagcactttgctaggccctcggcttagtgatttgattcttgactcagagcagtgatagaagccagaaaaaggagattgagggcagtgaaaggtggacaaaacttttggaacttctggtagccataatggttgaatataggtcagtgtcaaggttgcagaaatgaaggaggacccattagggagattcttggtttactttgtaccttctgaagtagtccttttgtgttgaagcattgtgtgttttaaatattagtttcttattctgataatggtcctaggcatctgcaaaaccttaaatatgtcttaagtataattcttttagtgggagtctatatagtttaaatgagttaatgtatcctaaaatacttaaaacagcagctggcatatagtaagtgcttactacataagtatttgctgttattacatttaagagcatgagtcttagactcagacaaagctggttttgaattctagatcatttagttagtaactttgagacttgggtaaaacactttgattactcatctaccaaatattgatgataacttataaaattgttttggggaataaataagaaaatatgttagtaccatgattggcaaaaatatgcattcaacaggttgtgactgtagttattgtatgctttaaatatcagaaattttgtagtgaaatacagcatacatatcagtatttctattaaaaataacctagtcttaaatactctaaaacccaagagagttttatacttttattttagttaaagagtaaatgactcatgtatttggttttaaaaaagtaaagatcatggcacaagtctactatttgtttgatttgaaacatctaagtaactctaccatcttgaaattatgcagatttactgaatttgacaccggctcctaataacggaactcatggaagtcttaaccaccttctaaagaatcctgtttatacgccaaagcatcccaaagaagtgcaccccctggtacagtgccccttcacaagaaaccccagagataaccttggctgctcatgtaacccttcggtaagtatcgtcaagaagtttggtccagtatgtatggtttgatagcaccctctgcatagcatgtgctgtaaaaatacttaataatyaaattagaatttaggagtgggggtaggtaaacatatgtttwaattctagggggcrcatgtagatcttttgtgatatatcttttctctttctagtttttgcattttccactctatttttaattcyttggagctgtgacttgacttgggtgcaggtgtggtgaagtctagttagttgacttgggtacgggtgtggagaagtctagttcagttcttgagcatcctgaattagggaatctgtgctgttaactctagcagtgaggtgatgagcacatagtaaaccaatcacaatgtacctttttaaaaatacaattcagattgtttaaatgtagggagaaaaaagatttyttggtatgaaatgaatatattacactgtccttttttacttccatgttaatatgtcattattataaaaagataaaaatactagacaagttatgaacaaaattgataacatccatgagggcacctgtaatcccagctacttgggaggctgaggcaggagaattgtttgaacctgggaggcggaggttgcagtgagccaagatcacaccatcgcattccagcctgggcaacagggcaagaccctttytcaaaaaaaaaaaaaaaaaaaaaaaaaaaaawatatatatatatatatatatatatatatatagcaatttggagagtagtttatttcatgctttacattttgttttagacttgagttagaatagaagaaagactgttggggtatatagatgagaattataaagcagcaatcatattcttattttttaattactggtgtgatgcttatactaacaattttgtcttttgcaactgtcattcctctccttctgtccttttcatcaaaaatgtaacttctgtccaggcatggtgtaccacacctgtaatcccagtactttgggaggccgaggtgagaggattgcttgagaccaggagttcaagaccagactgggcaacatagtgagaccctgtctgtacaaaaaactaaaaaaattagctgggcatggtgacatatgcctggagtcccatttacttgggagcctgaggtgggaggattgcttgagcccagtaggccaaggctgcactgagtcatgattgcaccactgcacaccagcctgggtgaaagagcaacactcttgccttgaaagagaaaaaaaaatccactaatacaagactatcataaatgatctttgttctatgttggaataatcaatctatagcggttctatgttacaaaatttaaaacatgtctctcagtccttaaaaatagttttataaccttttttagattttgccgattgaggattttcaaacacagttcaatctgactgtggcagaaggtaaggcatgctacacactcaagctcggaatgtgaagcaggcattttctcatcagtgtgaaatgcagagaactggcttgggggtattatttgagaataaccaataaaataaagggagttctggaggaccacctgatgaaacatagaggtttctttgcttgacagtttagactattaggcataaggaaaggagatattttgcagtggatattgtatgtaatgtatttagtggaagctgaatcacaccttgtgaacatgatggaggtgttcaaaaatttttgatgatttctgtaagttgataatagagactgagattcccatttgaaatacctaagtttctatctcacctggttcttaatcatacaaggttatatattgatttattgatctaaagttatttctgcatcacttttgaccaaaaatcaaggatacacagacaactgatgaaatttttcacttatgacttgaatgtttggagtcactataatacactctctcagccttaagttacttggcacacattttttttctactagaataaagaggtaaattctgcattagttctgatgtaagtttgtctctataaaatccctaggtaaatgctggagttaggaaaatctttgatatctccaaggtggcaaagtattgtggtgaatgatggcactttcagaattgagtagatccaagtttgaatatgagcttaggtactatatgttcatggaaatagtattccctgtcagctgctgtttccttatctgtaaaatgggcatataaccttaattcatagggaaatgtaaaaattagttatatgatgtgtaccaagcccttgacatttggaaaaagggcaataaataatatctatattgttattgttttatttagtttagtctcataatttcaattctgaacttctgctttccaagtacacatatcattaaaaaaatttgctttctggagtgtgtcctaaagaataagtaattaaaatagtgcttaagaatttttggtaatataactttgaattaactggaatatttagcaatttcatatagtgtcctcatggtatcttgatattacattgatttcagaatctttataggcaaaaataacagtgaacctcacttgtcttcttaattgtttatgcttctaccctttgtaatcagtttttttaatagttaaaagtaaatcttcaatataattaagtagaggaaaggattagatgagtgtatcacactatatattatcatataatgcacactaactacatttattttcatcctgtgacccaagagaagattattaagcatgaaactttaccctatggaagacctagagttctccagaaggaaaacaccatctgtcttctttcccagcaccagtttatgagtggatacagccaagacatcttaatgcccctttggacatcctataccgtggacagaaatgcaagtatttgtcacctctttatgtgtggccatttcaaattaatgattaagcagaacattaaatgcatagtttctcactgttcaccttggctttatactcagttcccgcattagaggaacactgaagagggagtcagaaaaattcagttccagttcaagctctgccactgagcagctgcatgactttgagaactcagaccaaatttcttctgtgaaatgagggtcgtgcagtaaagattctcttttgggctgtgcgcagtggctcatgcctgtaatctcagcactttgggaggccgaggcgggcagatcacgaggtcaggagatcgagaccatcctggctaacacggtgaaactccatctctactaaaaatataaaaaaattagccgggcgtggtggcgggcgcctgtagtcccagctactcaggaggctgaggcaggagaatggtgtgaacccgggaggtggtggagcttgcagtgagccaagatggcgccactgtactctagcctgggtgacagagtgagactccatctcaaaaaaaaaaaagaaagaaagaaagaaaagaattctcttttcctccccgaccccagttttaatattttatgattccaatttataattgcatgaaatcagccttaggatcagtcacagttacccatttctaaatacatggctgtgtgaggacaagtatttccctcagctgtccaaatctaagggggccctcactgtttggcaaagccattaaagctcagtaacatcattgcacgtaccatctataggaagacacgagcccaaaccagggagaggccagaatcctgcccaccaccaacaccagaggagttaggccttgaaaggagtgagggcaaatatcccagaataagagcagccttccccctcacccatggccccctgggtgctctggtagaaggaggaatggtgaaggagatggtgctggaaagagagaagggggaagatgagattttgatcttacgtggaattgaaattttaaactgggctgaaactgaaagtgactggcaaggtacaggatgccctaagggaacgacaaagggatttgagagagcatagtggagggcagcagtttgatttaaaaaataaaatgatttttactaatcagtgagacaaccaaataaaaagatagggatatgtctgtttatatataatttctatgttacaaatatataatacacacatatatttatataaratttcttgaactttgatttttaaaatttttcaatactgtcttcaaacaccaaacacttaaaaaaatttttgactttgtaattgatcagtctacaccatttttcataggcaccccatcctatttattaatatttataccttaattatgggttccttgattccattttcagttttcttatgtaattaaaatgcataactttacagtcattgcgatgcttgaggtttttacattgctgttcggtgactgtcctcctttgctccagcaacttttggcagtgtagttgactatggaagatagactcagatctctaaaaatcaacattttactatataaaagcttaaaattgaccagcgcggtggctcacgcctgtaatcccaacactttggggggctgaggagggcagatcacgaggtcaggagttcgagaccatcctggctaacatggtgaaaccctgtctctactaaaaatacaaaaaattagccrggcgtggtgggtcacacctgtaatcccagcactttgagggggctgcagcggatggagcacctgaggtcaggagctcaagaccagccttgccaacatggtgaaaccccatctctaccaaaaacacaaaaattagccaggcgtggtggcagatgcctgtagtcccagctactcgggaagctgaggcaggagaatcgcttgaacctggggggcagagttgcggtgagccgagattgcgccactgccctctagtctgggtgacagagtgagactccatcttaaaaaaataataataataaataaataaataaataaataaatatttaaaattgtgtagataaaatcattctaaacattatttcatattagcatagcagaatctgaaaatatttgcataaatatgacaattaatatctttaatattgtaaagcatttttacactttagttagaaaaaaagatgaatatactagtaggaaaatagggaaggacatgagctgacagctagagcttcataattttatgatgtagttcacctttaaatattaataaagcarttttcttctctgtgcctgatatctgagagttcttctcattttcgttcttcaggacagtttctctacggaagacttctccaactgtctgtaccaggactttagaattcctcttagtcctgtccataaatgttcattttataaaaataacaccaaagtgagttacgggttcctctccccaccacgtaagttttttcctctcctgaccttcccttttctcctttttgttttctttcttgtttataaatcctaccatacattatagggtaatatatatattacctattatatatatataaatattacctattttatatattatatatataatatatataaagtatatatattactattatatatatatagctatatatatatagctttgtttatttattggtgaaaaattgtggatttggtctagaactaccaagggaaaaattttaatcatctaaaacttgaattttataaaattttctttttgttgggagggtagttgatgtagtgcagatatggtaagcagaacacttcatggttcctttctgcatttcttttaaacaatttgagaatattgtgaaggtggaatatatatatcaagttggaagaatatatcaaggttcttaggaagataactttgttaggataaataactttsttgtttaaaaagaaaatgcgtttgtcagagaagtaggtaaaggtagaggcttacatatgcttgctttttcactgatccagaatctctagggaatggcttttttgaagctaagtattctattttttgaaatggcaaatttgtatgttgatgagaagccattttggggccagccttaaaaggcaaaaatcagaaagctccaggtgctcaactaccgtcagcatccagttcagttcccagagtatgtgtctgaagtcagaacttggctattgcattataaaaatagaccaggtccaagcctcaaattcatacagagaagccttgtatggtgtttcgagacagacatcctgtgatgttttttctgggtagcaggtgttgttctggagccagatgttctcttttttcttttcactgtgaaaaagtgtaaggaaagaagattgtcaacacaattccttttagttgaaatgagggcaataacgtttgaatatgtttaatttggggctcttgttattaaagtttatgtttcgttgacatgctsatcttgaaaagacttcttaaatattttatttttgtaaaggacttgaccaaacacattacattttcccttgaccctgtacttgggaaagttttacaggtttaagatggtactcagctaatttttaaaaatgctcccctaaccatgagaaactataatttcctatgttatttgtgaagaatgaaaaagttgtcctcttttctctttgtagaactaaataaaaattcaagtggaatatattctgaagctttgcttactacaaatatagtgccaatgtaccagagttttcaaggtaaataatgttaactctatatttgataattttaatgaatttgtgcacatataggcataattcatatgtaataggacttatggtctaaattaaatgaattaataccaaatacattcttaaaggtttaactttgagaatactagtacacaaaaattctacaaattattagaattatcatgtattctaattgtataattgtttgcaaacagttttggtgagaaagtatgtgatgcgcttcctaaagttatccagctaatacagtctgctaacacttatattaactttcattcggcttccttatttaactttttggaagttcttgataattgtctatgttttcaaatgaatagattttacatcatcattaactattgcagcatttgacttttacaggaataaaaatttagttacttaaattgatgtatagaatatcaaaatataagcatataaggagtttttagtctaatttatatctagaatacttgtgaatatttcaaagttaatattcagatattaataggaaatcggaataatatgccttgtttgtgtttgcgatgttgctatgcttaatgatgacatatgatcacaatttcaacatgatgtacttgttcagggatgtctcaaagagagttgggttcaacgtttgtctgtgagtcctttcaaaggccaaagctgaacaatgaatttttggcctcacactaagattagagccaaggctgggtgtggtggctcatgcttgcagtcccagccctttggggagtccaactcagaaggactgcttgaggccaggagttcaagatcagcctgggaaacagtgagatctggtgtctagtctctacaaaaaattttaattagctgggcatggtgatgtgcacctgtagtcctagctattctggagactgaggcaggagcatctcttgaccccaggagtttgaggctgcagtgagctatgattgtgccactgcactccagcctgggtgatatagcacgactctgtctctaaacaaaaaacaaaacaaaacgaagactgaagccaaacttgactttatctttatttactataaatgctaattttgaatcatggtgttaatttatttcacacgtcaacatggtcccttgttcttttgaaactacactggcttctatcttgtttcagttatatggygctactttcatgacmccctactgcgaaagtatgctgaagaaagaaatggtgtcaatgtcgtcagtggtcctgtgtttgactttgattatgatggacgttgtgattccttagagaatctgaggcagtaagaacatatttcattactcttaaaaataggaattaccatccagtagaaatgggattaccatccagttgagtcaacagaaccttttttatccagtgtcgtatgtttatgtgtatgacacttctgactacacaggaagcctcttgaaatatctgattaattttgatgttttgctcaatrttcagtaaaatatttttaggtaaaaaagtagtgtttctcacccattcagttcagttgaataatttttgcactcagtttaaatgctgaactcatttaagatctctgtgtggctgattgttaagatatgatcttaatatattgtgagtcagaagatgaagaactctatggtgtggctacagatatcctgagtctaggaatgaatagggttataaagctgcagtgcttggagtctggtggccttgggtgaatgttatggcttttacccaactgtggctggaggggcatgataaaaagcaaccgtctgaaggaaaccatcagtggtgcttttttaaaaaagagagggaaagaacatcttggaaactggttgatctttattgaaacaataattacagcagtttgggaagcaattttgctgttaagtccgtaggaaaaagactgagattccactgagattcagcccctctcagaactttcctactctcccaggctgacttagatatatgtgacttacaaaatacatcagaaagcacatcaatttgcaaagttacagttttttactttcccttgaggcataaagctgccttagaagctgtagcactggagaggatacagaagagaactgcatatgcttcctacccacggcttcacccagagccctctgtttaaatctgttttatagattatgtttctacataaggtcatatttgaaaacaatgattccactgccttaaattttgaaagatgttgaaaaaacaaacacagccttaaaataggagaatgactatgaggtaaagatgtttgggacatctttgataatatacttcagtttaaaaaattaagttattaaggaagaaaatccagttagaacaaacaattcatgacaacatgtcctctctgaaggggctggaatagaaaattcctaaccagttctttctctgcccactatttgtctataatcgcctagaagttaagactatcaataatggtttacactcttggtcataggtgttcaaaaatgacattttcttttctttagtgtttcaatttcaatgtctttaggtagaactaaaagaattctaaaagtcaataaacttctacagaaaataaaaattatttggagtgtgtttatctgcctgtcttctaattattgctctcaatctggcagagtatgttgaggtattgtgattactagcttcttatatttaattatttgtttgaatttgatttttatatgtattmaaagcatgctctactgaaatattcatcaaaaggaagatagttatttctttcttaaaatgaatattggcatgttttacagaaaaagaagagtcatccgtaaccaagaaattttgattccaactcacttctttattgtgctaacaagctgtaaagatacatctcagacgcctttgcactgtgaaaacctagacaccttagctttcattttgcctcacaggactgataacagcgagagctgtgtggtaagtagcttttgtatatttactttgcatgttgaaaatctagacatatgcatatttgtttatgtcacccatctgacattacagtgagagaaagcacaactgagtacacatggacttcgaaattataggatgcttttaaatttgatcttttaagatgacatatctttggggaagactacccttgtctgcttttacttttttcttttttttttttttttttttagagatagggtctttctatgttgcccaggctggtcttgaactcctggcctcttatgatcctcctgtcttggcctcccaaagtgctgagattgcaggtgtgagccaccctgcctggcccctttgtctggtaaagatactaaaaatcagatcagaatcaaactttgtatggcttaaccactaaagtctaggtttatctgaagtatggattttctctttttttaaaactggatgtataatttcaaagtgtcagcactgttataaattaaagttgttagacaacatttcaaattttctgtgtatcacttaattataaaaaatcttttcctttcttatcgtattgtcatcccagtgtgtttgggaataattgttttatattatcttatttgctcagaattttaaaaatctacattgtagattgggacatcaagactgcataacattttagcaattattttttttttttttgagacagagtctcactttggctcccaggctggagtgcagtggcatgatctcggctcaccgcaagctccgccttctgggttcacaccattctcctgcctcagcctcccgagtagctgggactacaggcgcccgccaccacacccagctaatttttttttttttttttgagacagagtctcactttggcttccaggctggagtgcagtggcatgatctcggctcactgcaagctccgccttctgggctcacgccattctcctgcctcagcctcccgagtagctgggactacaggcgcccgccaccacacccggctaatttttttttttttttttttttagtagagatggggtttcaccgtgttagccaggatggtctcaatctcctgaccttgtgatccacccgccttgtccttccaaaatgctgggattacaggcgtgagccaccgtgcctggcctttttttttttttttttttggagtcttgctctgtcacccaggctggaaggcagtggcgtgatctcggctccctgcaacctccgcttcccgggctcaagcgattctcctgcctcagcctcccgaatagctgggattacaggcacctgccacccatgcccagctaatttttgtatttttagtggagatggggtttcgccgtgttggccaggctgttctctacctcctgacctcaggtgatctgctggccttagcctcccaaagtgcgggggttacagtcatgagccactgtgcccggcccattttagcaatttttaagttttctcttatggtgagccaaaatatatttctttcagagtacttcctacatttccttttttttttttttttcattgaagtgacaccaagtaagtctaaacctgaatctgcaaaaagatgtagctttcataccagtcccaatgaatgggtggtaggtacctggagttaggatcttgagacccagtatgagctcagcaggaaagagtgctgtatccactcattcattcactactactttgattcaccattcattcctttgatatttataatcaggtgctctaggtactgaggacacagcagtgaacaaaatagtgagctcttctctgggcccaagagtagaatacaatgatccgtttgccatccctgatggtagtagtctttcyatatatcgttaaaattcatgaagatatgtctctccttaattgtttctatgataaactttcagaattacttgttcctatagaacacatttctcattatttttccctttattctttrgaattaaatacagaatagcaagattttagttggttgcctgatgattatctgactccactgaaagttgtcagttttgtgggcattgttggaaacatgcagctattccctgcttcattatttcgtttgagagattatattgtcattgaatgtatcaattagagtagggttctgcagcaaataacagaaacccctttgcagtggcttaagcaagtcagggattcctcatggaacagcaagtccagctgcacacagtcctgggatggcgctttgggtcaactgcaccattagggacccagaacttttccctctttctgctccaccattcttagcatgtggctttggcccacgtgggcttcttcatgcatctttgtaggtaacacattctcataaaaactagtatttgtgtagtacatttgcacacatcattacgtttgatcctcaaaataacccgatgaggaggatacagataaaggaatcaagacttatatgttaaataactttccttagtttacctgatacgattgtcacagaaccagcctcttttaaaaaaattttcaacttttaagttcaggggtacatgtgcaggatgtgcaggtttgttgcataggtaaatgtgtgccatggtggtttgctgtatggatcatcccgtcacccaggtattaagcccagcatccattagctattctttctgatgctctccctcctcccaccccctgccctccaacaggccccagtgtattttgttcccccacacgtgtttatgtgttctcatccttcagctccctcttataattgagaacatgagggttcgcttttctgtttctgcattagtttgctaaggataatggcctccagctccatccacgtccctgcacaggacatgatcttttatggctgcatagtattccatggtatacatgtaccacattttcttaatttagtctatcattgaccatatacaccatagtattccatggtgtgtatgtaccacattttcttgatccagtctatcattgttgggcacttaagttgattccatgtctctcctattgtgaatagtgctgcactgaacatatgcgtgcgtgtatctgtataatagaatgatttatattcctgtgggtatgtacccagtaatgggattgctgggtccagtggtatttctgcctctaggtctttgaggaattgccacactgtcttccacagtggttgcactaatttacactcccaccaacagtgtaaaagcattcctttttctccacaaccttactagctagcgtctgttgttttttgactttttaataatacgcattctgagtgattctttacattattcagatattctttcccatgccatgtaatttctgttttccccctttttttaaccccacgccattgaagtttcttaaacctatgtaatgcaggaccatctgttccaggtatagtttcttttccccaaacttgaagcatctaattaaacaaacatgcatggtatgtattagaaggaaagctactcaagaggagagatgatgcctaacaaatcatgtggcacgttccacttcagagctgaaatctcgtaaatgattaaactggggagatggagcrcttatagaagtgaactgagtgttctcttggtaacttttcttttatatttcctattctcctagcatgggaagcatgactcctcatgggttgaagaattgttaatgttacacagagcrcggatcacagatgttgagcacatcactggactcagcttctatcaacaaagaaaagagccagtttcagacattttaaagttgaaaacacatttgccaacctttagccaagaagactgatatgttttttatccccaaacaccatgaatctttttgagagaaccttatattttatatagtcctctagctacactattgcattgttcagaaactgtcgaccagagttagaacrgagccctcsgtgatgcggacatctcagggaaacttgcgtactcagcacagyagtggagagtgttcctgttgaatcttgcacatatttgaatgtgtaagcattgtatacattgatcaagttcgggggaataaagacagaccacacctaaaactgcctttctgcttctcttaaaggagaagtagctgtgaacattgtctggataccagatatttgaatctttcttactattggtaataaaccttgatggcattgggcaaacagtagacttatagtaggrttggggtagcccatgttatgtgactatctttatgagaattttaaagtggttctggatatcttttaacwtggagtttcatttcttttcattgtaatcaaaaaaaaaattaacagaagccaaaatacttctgagaccttgtttcaatctttgctgtatatcccctcaaaatccaarttattaatcttatgtgttttctttttaattttttgattggatttctttagatttaatggttcaaatgagttcaactttgagggacgatctttgaatatacttacctattataaaatcttactttgtatttgtatttaaaaaagaaaaatattcctatcctgctcactggtaattaacataggtttaaaatggcttcaaatgtggccctatagacggttaaaattgtaccttatcttggcaaaacttcagagcaccagtcagtgcatgcaaggtgccattttttattgagatgcttagaatgtttctttctgtgcacaagacttaccctaccagcagcagagccattctctgttgagtggttcattttgaagttccacagattgaagagaacatgccaccaatcacctcacatcttcttggtggacatgataaatgacacaatgaacttgatttctttactaccttgactgtagctttttgtccctacctgtgaaccttcaaagactgcattaacttttaggctacataggtccaattgaggtataatatcagtacaccaaagatttttatatgtccttcgtgtgaccattctttaacggcctaagggccagctgcaaagacttttggaaaatacaatttacaactcaaaattatttaataatttaggaagttgctttttttttttttttttttcagtcctgcagtttcctgaagctctgtatatgatatttttttcagcctgcttctctctgttgttcagattaggtaattttattcttctgtctcgaagctcactgattctttattctgtctaatctgttctgctgttgagcccatttattcctgatttttatattttagttattgtatgttttatttctaaaatttccattcagtttttctttatatcttctatttgctgagaatttctgtctctttgctgagactttctacgttttcatttgtttcaagtgcatttatacttgcttgttgaagaatttttatgatggctgctgtaaaatccttatcagataattccaacatctgtcacctcattgtttgcatctactgatggtcttttttccattcggaaacattttcctgtttcttggtgtgtggaatgattttttattgaaacctggatatttttaggtattatgttatgagactatgggtcttatttaaaccttctgctttagccaactttctcagataccaccacagcaggggaattgggagcactgcttcattattaccaggtgtggctaggagtccaggttccccagtcagcctccctttatactgagtaacagggtcccctcattactactgggcaaggtgagaattcagtttcccattaggtctttattgattcttccctggctggaatgtgcagcggcaccttttgctgcaccctgggaatctccactaatgctatgggacagagtgaccaggaagagcttcattacaccaggtgggaatgaaattcccagtagcctacacagccttctccgacaccactctggagttgtattcttccagcacacaaacatacacaatttaactcaaagcatcttagcagagcttaattaaatggatagatgcctgttccctttgctggataccaagaatacaaaagtcagggagttggggcacctctttacagcttggtgagagtgtaagtctggactccccactcagcatttgctggtatgggtggggccatggtgtttttccatggtgtttggttggagtacagccttttttacccttgcttggctacccttttctggtcctttggcaggagagagcaggactctcttagggcttttttttcccctgcatttattgacatttccaggttgctgactttttcagctccaagttggaaatatatgagctgaaaagaaaatgtagggaactcatcacagtgttgttacttgggccccaatgttcctagcctattttctgtctactattcagagtcttgctgtgttttaatataatatccaggatttttatatgcatttagcagaaggatgtctactctgcctttgtagaagtgtctcactgatttttacatatttttccagcacacaaacatacacaatttaactcaaagcatcttagcagagcttaattaaatggatagatgtctgttccctttgctggacgccaagaatacaaaaaagaacaagtgacaattttctctgtcttagggagaagagacagcagaagtgtaaatgatccctaaagagtgatagatgttatcatgaagccacaggaggggtgccaggctgcacaaaagagacactggatgcttcttggtagtagaggcagtggcttcccagccttggggctaaggcttgtagggtgaattggaacttttcagatgagcaaggcaaagaagggaccttctaacattccttggatggaacatttttgacattttcccatttacagctacttatattttctacaagtgtcactgtgaccaacttatgtacacatactttttcttgcttagttataataatctgttcttaaagaaaatgtcagtctctacattctatgctgactgttaaggaaagagcacccacatctgctcctacttagctttttttctgtggttcttacacagtattcctttttttcttttcttgaaagagactcctcctttcttttcttttcttgaaagagttttaaasagataagatggcaaaagtgactgatctctactcccccagtttgaatggtaaatttgaatggtaaattcccatgaacatatatggaaatgtctttatcctactttctccaataaaggctgttcttagcttttcaaatgcaaagtgaaacctttatttatcttgatttcttttttttttttttttttttttttttttttgagatgctctgtcacccaggctggagtgcagtggcaagatcttggctcactgcaagctccgcctcccaggttcacgccattctcctggctcagcctcccgagtaactgggactacaggcacctgccgtcacgcctggctaattttttgtatttttagtagagaatggagtttcaccgtgttagccaggatggtctcgatctcctgaccttgtgatctgcccgcctcggcctcccaaagtgctgggattacaggcttgagccactgcctccagcctatcctgatttctactgtcatgcctcacatcagtccttttttttttttttgagacagagtctcgctctgtggcccaggctagactgcagtggcatgatctcggctcactgcaacctccacctccggggttctagcaattctcctgcctcagcctcctgagtagctgggattataggcgcatgccacacctggctttttgtattttagtggagatggggtttcactgtgttgctcaggctggtcttgatctcctgagctcagacaatccccccgccttggcctcccaaagtgctaggattataggcgagagctgctgtgtgcttcttaagtgaggtaagtaacttccatagaaaatttccatcagttcattcatgaaagaacaaagaacctggcaaaacttaaaaaaacgtttccaagaatcagataaaagaggacaaaccttagggagaagaaggcagctgctcatttccagcaggggaagtagctgcatagagtacaaggactggtaggcctgttggctgttcctgtttaaggagacaagatgggcatggaacagggaccaccccctcctctgggagaagctgttacccccttcacttttcctcctctgtcattacccacaatcactctccttctttgcgctatggtaggtgtttacccatcataggaatgggcatttgaactttgaaactgaatgtggtgattacacttcatgctgaagcttttcacatgagtgctttcataagcattaagtaaaattttataatgactgcagtccaaggacattttccctggtttttggccagtctaaatattgtaagagagagagaagaaaagtgtacggaatataattgtctctaagctaagaaatgtggatgttcaaataaaacatacgtacagaactctggctgctttcctttgtggctttgtgtgtggaggatgggtaggatcatgggcgatggtgcttctctgcagacatgaaactgagtccgagggttgttgacagttaaccacagctgtaatgctgaaaggcaaaagaatccaaagttcatttcaggttcatagagtaaacacttctgatctgtgacctatatccttgttcttggtattttaattatatttagtcatacttccaggtaaaaacaaatgacaggcatatatattctttagtatttagaatggtctggaaccagacttggaacttctatagattcttttaatgtgaaatttttgtatttatcctctccattatagtgattgaacaaaaaaatgtttactagaaatcatattcataccagaaaacagatatgtgaaatacattttaatctactagaaatggaagaatccttggaagaggcattatactcatgggatgtcaaaaggaaggaatataaaagaagcctctttcatcctactcaatgctgttgttttaaatttaactttttacttgcctgtaacttctcgattcaagggatagttttaggattttaattaaaatgacattttaaatgatatatcagaaattcagaactcagaatggaatatactttggctttcacatagtagagatacaaaataattgaagaaatatataggaaataaattttttacagtgtctcatacagtgtctcataattttgccccacaatgtttagatatttttcactgttaaaaaatgtatgcatttacttagatggcattatgctggctgtgacataaaggaaataaaacagggatctctgaaccgaaagtttataacttaactaaaaattctaaaggattttaaattagactgaaattttctcagtccaatgaatggatcttgttcaaatttttatagtttaaaaaatcactggctgggcacggtggctcacgcctgtaatcccagcactttgggaggccaaggcgggtggatcacgaggtcaggagatcaagaccatcctggctaatatggtgaaaccccatctctactaaacacacacacacacacacacacacacacacacacacacacacacacaaaattagccaggcgtggtggcaggtgcctgtagtcccagctgctcgggaggctgaggcaggagaatggcatgaacccgggaggcggagcttgcactgagccgagatggcgccactgcactccagcctgggtgacagagcaagactccatcgcaaaaaaaaaaaaaaaaaaaaaaaaaaaaaaaaattcttatgacacctacaattttggattctctgttatattctatatcttgacacaatgttactgtctggagagttaaccacttgtactaaggtccaaacagaaacaagatggtaaatctatgggtcttttgtctgtgtacttgttcataagctatctctacaggtttactcaacagcacactttaagatattggcactggaatagattttcccagctcagggttgacagtagatttcaaagctgagcttactctgtgtcaggcattaggggtaagttggagaacagggcaggtggaatgcctgcccccttggtgctctcttgtcaatgttttacctttatttcaaggtccagcccaaagccatatccttaggatccattgtttatgtggtcagactttcccaacattggtggtaacagacagtacatgccctcagtctagttcttgttatgtattatggttgcaatacaactacagatgtgtaatgcagttgattattccataacccatacacagtgttggtagatggcaccgtggcctattaagaaattttacccaggacccagactccaaatccaaatacacaacttgctaaaagcagtctttgcaagcttaacacgaaataaaataatttcaaagtggtgtggttataggtataagaggattgttagcttccacttggggtttccagggacctggcgggatcttatcctacagagaacaccaacctcttaaggaaactgggaagcccagagaagctgcgccacctaaacatttcccagcctgtgatcctgtaagaaaagaaaaatagctcagggcagcctgagctgtgtgaggcatgtagaatttattaggcccagagagatgtgagtgtgagactttattcttaccacccacctcccgccatgcctaggggcagttgtttaaagtcatttcattccttattagctgcctcactcattatcctcacatgcctggagtttgtgatgcaaagaacaatgtatagcaagttatgttgtaacaatgtatagcaagcttatgttacgttgatgtaacttcttggtaaacaatttaggaactgcctcttttttcctttaaaaactcacttgtaactgctgctaattggagcacacattcagggcaaacttgaatccatccctctgggttacaattctcaaaactggcccaaataaactctgcttatattaagtttccttcagttttttcttttaggttaacatcagttacatttgcttagactgtatactttgagcatattcctgaaaactgtaaccctgatgagatttatgtgtcccaagtgtgctgtttcacaagtgtaatcacctgatgggttcttcctgcccactgactagacaaaaccaattcac

SEQ ID NO: 94760 - DNA, 17427 bp, Homo sapiens
gatttcaaacaaaacagcttacaaaagggtgtttggcatcaaaagggaatagcacaggaattatacctaagtccattacatataacactgaactatacaagtaaatgtgtttgacaataacaatgcttatttgattgttggggaaggtgacagctagtaatacgttggacttgaattatattttttcctggaaaatggtatctagagtaaatttttcgcacctacttgcccaaactttcttatcagatgctgagttgaaaagaacatacctagattctacggaaattagaaatctagcctttttaagaatataactttggaaatactggtgaatggtagatctcccatcctcatgcttggagggctattatctaccacagggccacacaacagtgccctcttaagccccttaatttcacctagtctagccaaaggcaacacaagttcaaactttccggctagacttcagaataagaaaatttttgaagtgcatttctcacttaaggacatagcatatttaaaaaataagagcaaaaggggaaattcttgtctttttaaatcaaacattatttgttgccagaagtgtaatgactttttgttggtatttgttaagtacagccagttttgataatgtgctctcttttactttaggaattgcctgtccgtactttcctttaaaagttttacctgtacatcatcctagtaagtatatggcaagggcagggaagtgaccctggatgtttatttctgaagaaacaaaaaagatgactagtagaggatacaagagaagctggaagctactgatttatcaatagaataaaaaatccacaacacaaaaacagattagagtcttctttgttcaactcactcctaaatacaaaccactggctgcaaaatgggtctggccaaaaaaaatctcctattcagaatcctgctactcattttaccttagaaataattatacatttctttaacatttagagtaaaaacaatcttaataaaaagagcaaataacagaatctaatcaaggtgtcttctgtccttaactgtttgttctactaaaaaagaatttttcattaataatcctaatcataactctgcagtgttcaaagaccaaaggggttaggtacttagttcagtaaacaaaagtcgtggaacaagcacccaatgcccctgaatattaacttcactataactataattcctagaaataaatttcaattctttcccattctgtatactaactgattcttaccaccagtcaaaacagaaaattattctggctctaatattcagttccattttgtctgactagcaaagtcacaattagtcaatgactaccagatacactctactgtgttttgcagatgtaaaacttagaaattagtgttataattcttataggaaaacctaaatcagtaaacttaattgtagtttaattcaaagtttttaatccaatattgcattcaaaaagaatctgttaatacatgttgctctgcttgttacatggccaccaagtgactataagagaaaacacacagaaaaaaaaattttaaatgcagtatctgccatcttgtggtacagtgaggaaatgcagcaattgagaagcttctaaatgctgtaatcctaaacatttctccgcattgctcatgtaaatagccaataataacaatatgatagttctattttttctgtaatctacttaatgccatttttcttgagattatccttgagtaaattacagaggcatcaagatccccccaaagttgtcaaatattattcgtatccttgctaaaatcaggtctccaaaagattgcttctctatccactatgacctagtagtcttcacactagtaggcatcaaactgcaataaaaggctcagatacaacccatctggcatctaaaggaacactcaaaaatttaacacttcccctggcaccactctcacccatctatctacctttacctcataacaatagcaagccaggcgcggtggctcatgcttgtaatcccagcactttgggaggcccaggcgggtggatcatttgaggtaaggagttcaagaccagcctggacaatatggtgagaacccgtctctactaaatatacaaaaattagccaggtgtggtggtgcacacctgtactcccagctgcttgggaggctgaagcatgagaatcacctgaacctaggaagcagaggatgcagtgagccaagatcatgccactgcactccaacctgggcaacagagtgagactctttcaaaaaaaaaagaaaaaaaaatagcagctaacccttactgagcattaactatgttattaactcaatcctcacaacaaacctattaagtagggactattattttcctcattttaaatgatgaagcaactgaggcacagaggttagtaattttcctaagattatggtggagatcctaagctattgaaatgattactacttgttttcaaaagcccttatcatttatatcacaatatgaataacaaatattatgaatcgcagttatcaaaaaaacttcagcagtattactacatcaaaaccataaaaaacagaagatgtaggtgactaacttcaatgtaagaacttcaaataattgcccattgacagaatgctagcagctctggtagaagggcaaagcttagatatgatgtaactagcttagagtaccaatgctgacttagaacagcattcacccatgccatagagaactgagacaatgtggcaccttcattaaatgaattaaagagctttacttgagttaatatcttagtttaccaaacctgacctgagtttcctcaaacacttgacaatagttgctttctaagtctgtaacatgataggtttaggccgggtacggtggctcatgcctgagtcaggagaatcgcttgagcctaggagtttgtgaccagcctgggcaacacagggagacaccatctctccaaaataaaaatgtaaaaatcagctaggtgtgatggtgcacacttgtagtcccagctacttgggaggctgaggtgggagaataccctaagcctagaagttctaagatgtagtgagatatgatcaggctaccacactccatcctgggtgaccgagatcctttctctaaaaaaaagagataaacagccaggtgcggcagctcacacctgtaatcccagcactttggaaggccaaggtgggtggatcatgaggtcaggagttcgaggccagcctggccaacatagtgaaaccccgtctctactaaaaatgcgaacaattagctgggcgtggtgacaggcgcctgtaatcccagctactcaggaggctgaggcaggagaatggcttcaacctgggaggcggaggttgcagtgagccgagattgcgccattgcacaccagcctgggcaacagcgagactccgtctcaaaaaaagaaaaaataaataaacataataggtttaaaaaactaagttaaaaaataagtctctctatagctttttatttactgaggttaaagatcttttcatatttacaaactatttatatgtatttgtttcccagttcacatccttatacattttgttcctctactatctttagatatgagccttttgacctggatgagttacaaatctgcctcccactctgtcttttgtcatttttcttgacttgtcttctaagtttttgttggtccactgaactaattttttttttgttatcaaatatatcttttatagttgagtttggtgtcacacttaggccttcttcaatccatttgctttaagagtttaggtttttggtagttttatcttttcctatttaaatcttctagtggagggcagaaaactgggttttccatttggttaccagttgttgtcccaattccacttacaaaataatgtctttccttgccaatttcaaatatcatttttatcctatatgaattttttaaagtattagggtattctgacatcttactatgttacattgaccttactagacacaagaaccatagcttctttacatattatttctaaaaattttgttattacaaatgggggtctttgttcttccaacagacttggtcactaagtgttactgatttctgtttattaatgctgtaccaaatcaccttgctgaaattgctttagatagttctcttgaggttttagttgtatataaccaactacttagaaaaacaaaacctcttaaatacacccaaggagatccagtatagtattgaagtgtacaatttcagtatgttcacacaatggaacataatacatagcagtcaaaatgaactatacttaacatgtgtcaacaggggtagatcagaatattaaatgaaaaaaagcaaagggcctttgtctcctggcacccggatactgagctcagtttccgtcttcactgttccatctcctccatccactactccaggatctcataggtgactctaccacagcccctgttgtcctgtgagctgcaggcactgggaaatccacagggaggatgccagaacatctggagcctgcgaaatggtattttcttatttaaaacaggatcatcatggtagacgggaggcatggtgggaggggggcgagggataaaagattacaaatagggtgcagtgtacactgcttgggtgatgggtccaccaaaatcccacaaatcaccactaaagaacttaatcatgtaaccaaacaccacctgttccccaataagctatggaaaaataaaaataaaaaaagcaaagttacagaattgtccaaatacataccatctatgtttcacaaacactaaatacatttcattatccccctaacgaagggactaagtttcttagttcctaatgtcataaaggtttacagattgataacaaatatgtagcaaaagtacaaaaacatgggtaaaatattcacaaaaacatggataaaataatcacaatggtgattacttcttaaggctgggagggagggaggattacaaacgacaaagtacacaaagagagcttcaatttcggtgtattttaagaaaaaaacaccgaagcaaatatagcaaaagtaaaatatttgttaagtcggggtgggtgcacagctgttcattacaaaagtctaggtgctattgtgaatgtctgaaacatttaagaggcttgtagagaaatattttttcttttaatattttactgcactgaagagaaatacttttgactgaattatcttctggcattctgtaatttttaatctcaaaagaatcaatgtgggcctgacaaaaagggagatttcactgattttggcaagttcctaaaatgttttgtcttctttgcacatcttagtagcaggagttacccccatttgtctgcttcctgctactagaatgtaagctctgagtgtaagctctgagtgaaagcatttttccattatattcagttacactcctacagtcttaaaatgggcagacacacaataagtagttgctgaatgataaatcagttgtgtttatttccttgagttagaaacctggatgtcacgtaaataataatggaacctggatgccatgtaaatgcagtaaaagaaacaggttttgtctgcaggttccattttaaaccagcaatatactataggcaagtctggtcaatacaagttctggtcagtttcttctttcaattcagaatttccatttcaattttgagaatctttgggtcaactcaaagaactcctacatctcaattgcagagtctgtattatttcataaattgtaatgggatgttaatcttcactgatactaactggctaagctatagagggcaaggtggtagaatttctattgcaaagataagtaataattactataaatactcttcccaaagaaacagcaaatagttatctttcaagctgtaatcattatctttcacctagagtgtattgtaagtctacagaaatgatgtcattagccactgaaacaagacttcatattgtagtaataaacagacaaaagataatccaagtacaattttttaataaagataattacaaaagatggaaaaatcagctcagaaaggccaattacttctttaatagatcagtttttttgacataataactcacatcaattttaaatactatcacataaagcmtggtggagaaaagaaattttgcttcataattagaaaaactcacaataaaacttgccaagaaaaacaaaaacgaaaaagccatttgaaaataaatacagtccatgccaaagtagtataaaatgaagccagaagtcttcaaaaagaaaacattttcctttcaatattttctttttaatgattttctgaaattggtgagactgtcaaattcaggggttgctgagctgttctgatttggttctgttaaaagaggcaatgtgaaatattaaaaatggcacaatcttggtttaaatgcactgacctattatattgatcaggtcctgtaggctcatgctaagaaacacattaattgataatgtcttaagtgtttctggagtaattaatgccttaatttttctagtgatttaataaactattccaagttatcctgtaaaggctggcacaaaattatgtgtgcccaaacatttacatgctttctgacactaaaatcctcaactgtttttacttaaaattgtttcttaaatttacctatctcacaacactaaaaaaatcatgtacacagaaataagaacaccatgaaaaccattaagtgcatatataaaagataacagcaaaaaagggtctcagataaactacgtacaagaatacaaactgactgatatagttatactgataaaccaataggtaagatggcatatgttgtcttatgtaccaatacaaactaaaattcagagcacctcataatgatgttctaaggttcagtctagtatttctgaagtgtgtacacaaacacacaccaataaacatgtttagtatttttatagtatgtaaaaagtacttgataaggaacatcatttaccctttggtatctgttttttcaccactgttgtccttggatttatcttcttccttaacgtctaaaaataaagattgggaaaagattaaaacctattttgaaatataaaatgtatatatattatttcaaaatatactttatttttaaaatataaaaagttatgcaatcttattattaatgaattcggtctaaataagctttgtgttgggtgtttcctaaacgatggcagtacaagctatgaatagtcactggattggggtgcagagggagaaaaggtggccctaactctaggttttgacctatagatttaaaaaaagctttctgtggtagtatttcatttttcagtaggctgaagaattttaacaactgcaaggccctatcgaaagagcctcatcaccaaatagagagtttattttttaagcacagaaaagataaagcttttaaaaatgagaacaccaaaaacagacagacaagaaaacatagtgaaaatgaaagaaaagaaaaaaagttaggaaaatcctacagctaaagttaagtcgtccttaattcagtcatggcttgaatttttggatgtcaatcagttacaaatatagactgaagccatcattgtaatacaytgggaagttaaaattataaatttctgtatgtagcctattgaggagtgaatccacaagtaaaagaacagaactaaatgtgtcagatgttatagattactaactctctagtttaaaaaaaaaaaaaaaaagctggcttattcacataacttcaatttgatagacataggaaaaattggatcattatctctaaatcagtttttcacatactacaggatcaaaattaacaggttaactaaaacgtgtgctcatcaccattacttgcattaggaaatgcatcaagtgctgagaatacaaatatttaagatactgtgttccctagccatgagcagctcagtctagtagggagacaaaatcctgtgaggtgctataatatgatgtgttaaataaaatggcagaggcatgtgtaagtgttctgggaagtcagatgaaaggtaacagattccggtagcaaattcaattgcctaaagctaacacagcgttttaaagtaaggcaatgtatcaaagtattttttcctccctaacccaggtcccaaatcccctcctagctttcctcagagtttttaatgttttcttcaatttctgaacaaaatccattatttgacctttttcaaaatggcaaaactggtctaaggatatgtaactcttctttgtgttttctcccattaaataagctttaggtagctaaaaattaccttagaagttcagttctgaccatgcactaccaatagattcataattactttgtcctctttcttaaccaatctatatcacaatgcaatgttcactattttaaacctatgttatcaagaaaataaggtttcctgtattactaaagcaaataggaacaataacatttatataaaagctttaagagctaagtaccacttatatgtaagaaaaaagagtcacctacctagcatacttcctcctgatacctgtgcaactgacttctcgatagcataaacattataatgcagcccaatttttaaaatttacaattaaaacacaattaccaagaaacaaatctgacctgtttttttgtcctctgtttctttcttatcttcttcaattctagctttctttgctcctttcttatgatcagccacatttcttcgacctccttctccttcatcctcagaatctgagaattcttcatcacaagctatccgcttgtctgatgctcgaactgcacagaatattttaataaattttgacaaaaacagtcacaggttttataatcattacagcatactcatacaaatgcactaagcagttagttaccacatttaaacgtaaagggtaacatgcctaatgattttaaaatttgaatggaatgaatggtttatttaatattgaaaactttgctttcatgtatgaagaaatggctcaaaaacacataataaaaattgggggaatctctttttctttaaaaatgctgaaactctaaaggaaaaaagtgtgtttttctaataggggatgggaataatgtcattacttaaaaagtagcattttatttcagagctgagaggtgaagtagaccaaaaaaaaagtaccaataccaaatatgttagacagtctataccattacacatactgttatgctacaatctaaccatcacattaagtgtaatgagaagttgtaaaatcaaacagatgtttagttatttagttcaccctactttagataaatgagatgtcttattaatttccaaatatactaaagttgctaatttttgaaaactttcaatcatatatgtatatccagccatacaaactgaaactgctgacacccaaatcaggttctgagacatcaggaagctaaatctctgaaagtggcaaaaatgacaatattaacagtgtgctcgtgaacatgactttatagtgaagttcttaggccactaaaaccttccatttcaattatcattttgacaaattggaaaaataaaggcattatcttactagaaattctcttgtctggatcttctccatcttcatctccactgtcttcatgaacagcatcttctggaatagcttgcatctggacaccaggtgcatgaggtaacatgcgcaaattttcaaacaaacgctgtctaaattacacatgcaaagtttattagacaaaattaaatttctttgcagttcttacatgcaagagaaaatatttagcaaaaaatttcatctttggtctagctaaacctatatattaaaaggtctctctttgttgcccagactagagtgcagtggcaagatcatagctcactgcagcctcraactcctggcaatcctcctgcctcagcctctgcgcgttaggactacaagtgtatgccaccatgcccggctaatttttaaattttttgcagacaaggtctcactatatggcccaggctggtcacaaactactggtctaaagctatcctcccacctcggacttccaaagcattaggattacaagcataagccaccttgactggccaaggaggcattattttagcctgccatttcaatgatgagaaaacataagcacaaaggcaagtgaacttatcaaacatcatacagcttgtttgtggtacagaggtgactcaaacccatgctatgtactataatgtctctactttgcttgtggagacaaagccttaacaaaatgttccagacaatgaaaataacttatagtgcaccttgcaattttaaaatacatttcaactaataaaaaaaattatttccattaactgaagaaattaaatggctgaatacggtggctcatgcctgtaagctcagcacttctgagaggcagaggtgacaggatcacttgaagccaggagttcgagaccagcctgggcaaccaagcaatatcccatcctgacaaaaaaattaaaaattaaaaaaaaaaaaaagaataatcagtaacttaatgtttcaaatcctttagaaaaaaacaaaatatctaataaagttaaaaagacccatcatacttggccctttaaagcatactaaatctttgtcaagataaaatgtttatcaaaacaattcaatgatttcttactttatcttttccatatattctggagtgttctggtttgtcatgtttgaaggactaatatgcagtttgaagtctggtccaaaatactcaaagtaatcattatatggcaactctaatgaaaacaataaaataaagttacatattacaagctcagttttcacaaaaaaccatgcacagaatccagatttaggtggtgaaatatttcctaagaaaatgtttaaaagtgaacacaaagtgaatgttctcctatttataaagaatggcacttactctaatcattcatccatctatttctatatacagacagtctctgactttcaatggcttgacttacagttttctggcttttttgtaccaacttcaatgtcttgtattcagtacattacatgaaatattcaacgttttatttttataaaacaggctcagtattagattattttgtccaactgaagcctaacctaactgttctgagcacgtttaaagtaggctgggctaagtcatgtttggtaggttaagtgtattatatccattttctacttatcatactttcaacttatgatgggtttatcaggacctaattgcaacataattagaggagcatctgtattgacagttcatacaataaagatattgtaatgagaacacttaccattgggaatctcacaatcaagggcaactgcagtctcatatgtccaacatcgagcaacattacggattgtgtagccacctcctccaagcatcagtaatggtaagttaaaagtttttacaacttctacacatttagcatgacctaagacaagaagatttgggtaacaacaaaatctgcatactgcaacagttcgaaaaataaattttaaaaagataataagtgcaaatgttactcaaccaaaatgggttttctaaatattttaaaaacaaataaaaatgtaaaaaatgtcaagtctaaaactcctttccaaacacgttatacaataatacatattaaaaaattaagatataactagctattttagcaggtgtccctgatggaaaagtcaagtacacaactatattaagattataatatgaatatacacctattttattaacacagaaagatgttcatgtagggttacatggtgaaattcatcatgttacaataaaacattatgtatcatctaaattaatttttattgacttttctttccctatggacatgtgtaaaataattatggaaagctaaacaacatagtttaaccctgagttaactttaggtagtggtactgagtagttttcctaacttaagagttaaaaacatctattaattttcaaaaacttcaacttctacgtgtagaaatttaatattaatagtaaacctaacataaaagtaaatattttatgtggataaatgtcataattcaataaacatttataagtttccagtaagttcccttctcggaatattaccagttaggcacataactcaatctttaaagaagaaaagaaaatccttcaattacaaaagacatttgtgcatactgaagagtatttgggaaaaaattaaaaagggacaatgaaaaaactaaccacctaaaaatgacattattcaaaaatcgtttttctatatttccttccatttcagagttaattttacaaagtttatctgttctcttcatgtaactgtatactgtgggaattttcattaagcattcttcaatagttgcaacatgtgatttacataattctagcactcaatttttattattgctactagaaaagtttcttttaacagataaaaaccatttggatatttttaaagaaaaaacaaacatactaaaagttaacttacaggcttccaagtaaagatagctggctaaacaaagatgtttacttttccttcatcccaaaacttgacaaaaatgactcgaaagggatttttttaaaggccaaaatttgtaaaaatgaagaatgggagacaatacaagaggaagaacatagctgatggcagcaaggagatggaaaagagataactaacttcagcagatctgaaaaagctgaatcaaagctggcagcagagaaactcagaatgaagtttaagacttggaattacaaatatccttacacgctttatgcaactgaaactctattagctgaaatacaaagtaaatttttttctaagagtgaactgctgcagtttatgattataaaaaatattaagtacaaaaacattaaggactttcaagtcaaagaggaaaactgatagttaatatacacttttaagagtacattaggtagatcattttagaaagtttataaacattttgaggcaaaagatggttattaacacattaagttacaatatgaaactgcggttcaaccactgttgacctacaaagggacaattaatttaatatcattccacttaacatagaataacagattataccataattctaatatagctggtatagtagcaatcataacattaaataaagaagcttttaatatctgtatttagttatccaattccattaagaccagcaattgttctggagaaagttctatttgagaattctccacatcttagagaatacaaagcacactgtcaacttgctacctaaaagttcacgtggaaaaaaacctctaaaatcatacacaaacactcatgataaaaatcatttctaatctacatatacattataatatcttattaaataaaatttcagatttattcttacaccctagaagttcattccagaatggtgatattttgctttggcctagccttcaatcatatgctgatttcaacacatgatcaaaatttagtatgtactgcagcactcctaatcccccacacactttttatcaggaagctacttcagaaggcactccaccaaaacatgagaaaaaaattaaggacagagaacagagccaccagggagaaccaatacaacagaaaaaaagcagagaacagctatgtgtcctgccaggtctaccaaagatagtcatccaaacatgaacagatgagaaggctgtttttcaagaaggtgaaagtgacagaatattcaatgaatctgaacacatgaagatactgagacaccagtagttcagcaataagtggagagaaaactaagcaaatgagaaacttaggaacaattatgcagcaaagaacaactggataagctgaaaagtgtttaaagatgctgccgtaaacactaagtatcacaatcaaattctgatttgtaaaaatagaggtatgggaagggtacaagtatgttgtgggcaaaatggtgaggagagctaaaccctcttcttccttaatgagaaataaataatccaattaagtaaaaaagtatgcatgttttatttacactgagtcaacaaccattcaaaaatagctgccttgggttcaaactacaataaaccttaaaaaactagtcttgtataaatgtatatataaatctgccataatgaaacaagaataactctagtcatacatacaacagacaaaaccccatgaaaaatgcagagtacagtgttaaaacagcaggcaagaaactacaatgagaacttttacggggagttcttgggtggaagaaaaaccatttttttctggaaataccaccctttgaattgcttacctttgactgttagattgaaacaacccagtctatcaccagataatgagtctgcaccacactgtaataccacagcactaggttgatacatctccatcacctttgagataatctacacacaagataacaaatgttagcatctccaataacattctgaaattccattccaattgtgaaaacaataatacttacaggcttaaatatctgcccatatgactcatcatctataccatctctcattggaaaattgacagcatagtatttgccttttccagcaccaatatcctaaaatacataattaaactgatcttagagaatattctataataaaaagtttggcatttgtttactacattttgaaaagactgaaagactaagtattaaggatccaattttgaattcatcttagaagttgagaccggaacaatcaaactgagaaaggaaataataaacaacaaataagtatatgctccaatatttatagactgcttgtaaagcatacaagaaccattttcaattaatctgtagtgattatttttgacagaaaagaaatttaacacaagaagttaaaggcaatgaaattacattacattaaaccagaaaatccatcataaatagaatatttaagatgacaaggcaactttatgagtaaacctgtggaaaataaattaagccaaaaagccctgccggacaatcatctgcagaatccttcttgtggttcacaatctgttggtatgagtttacttatgatgaaagaacgacccacactttctcgaagatttaacagctaccgactaaagcaccagatttgttctttttttttttttgagacagagttttgctcgttgcccaggctggaggcgcaatggcgtgatctcagctcactgcaacctccgcctcccaggttcaagcaattctcctgcctcagcctaccgagtggctgggattacaggcatgtgccaccatgccaggctaattttgtatctttagtagagacagggtttcctccatgttcaacaggctggtctcaaactcccaacctaggtgatccacccacctcggccccccaaggtgctgggattacaggcgtgagctatggtgcccagcctcagatttgttcttaattggacttggacttcaaacaaattttgttcctacttgttgaatgagtaccactccaggcattaatctctctcaaaagacgcaaaggttccagctacatatactcttaaatgatatatacatatattatatatacttacttatttgtatatgttatgcatttgtaggtgtgcatatgcatttctgtgtgtgtatacgtattcctagaagatactgtatagtacagacattactacaaaatagtattttaactgcaataccaaaggattggggtgtgcctctttgttgtttttttttgttttttgagatcaagtcctgctctgtcgcccaggatggagtgcagtggcatgatctcggctcactgcactccagtgagccaagacagcctcctaggttcaaacaattctcctgtctcggcctcctgagttgctgggactacaggtgcacgccaccacacccagctaattttttttgcattttaagtagagacggggtttcaccatattggtcaggctggtctcgaactctcgacctcaggtaatccactcgcctcagcctcccaaagtgctgggattacaggcatgagccactgcgcctgagtggggtggggggggggtgcctaattcttatgtgcgttgaatgataatgtctgaagatccatgaattttcaggattactagcacttgtgcaagttcttctgaacctctcatggaatgatcttagcttcagtccaattttacaaaagcaaaatttaccctcaatattagagttatgagacccaacatccaacgaggagaaagcaagcaaaattacacacctcctctcccaatttttcttgaagtctaaatttttattaagattaactaaatacaaaccatacaaatatggaaaagccaaagtattgtgaaaactttacagtcctactgcacagttaaaacacagatgaaatatattttgaccctaagatttcagaatacagaaaagttggtcagcacttctcatcctaactgctactaactagctggcaactcagagctgctgcccttgttagacatagctttctctcttccaggtttcattctgcaactgctactatgccacctttctttcttccactagactacttgaattaaagcaaacagtttcaacaatgagctaaactcagagtagccttcttttcagcatgagaatgaattagcaggcagaaaaaggagtgtttattaaattaacatccaaagatacacgtgaattacacagaaagtccaaaaacagctgtacatataatgtaatgactgattttaattctcttacgaagttatggggacatgcttaaaatattcaaatgttatcctgaaaacatcagcaactgtaaaatcttttttttttttttttggctgagtcttgctgtgtcgcccaggctggagtgcagtggagcgatctcggctcacagcaagctccgcctcccgggttcacgccattctcctgcctcagcctccccagtagctgggactacaagcgcccaccaccacgcccggctaattttttgtatttttagtggagacggggtgtcactgtgttagccaggatggtctcgatctcctgacctcgtgatcctcccacctcggcctcccaaagtgctgggattacaggcgtgagacaccgcgcccggcccagcgattgtaaaatcttaagtgagaaaaagagatgttgaaagccattctcaaatccttctaaaacagcattctctaatattttcaaaaacttcaaactgtaagaattttgaataataactgagatgagaccatagtgacatccacctgtcagaaattaaatgaagcttccattttccacttctgagataaactaggatcacactgcaaagatactgtcttattctttaagcttaaaacagagaagacttttgcttgacttccactaggatgtaatggttgttgacaaatgtattctatcagtttacagcagtggttctcaaactttaaggtgaagaatcacccagagtttctgggccctaagaatgtgtatttctaacaagttcc

SEQ ID NO: 94761 - DNA, 12438 bp, Homo sapiens
gagaagggcatagaatattccatttgttgaatcctgtgtgtgtactaaaaggtgctgaacacatcagtgtgaacaatgttagctaaatggataaaccagaaggagaaacagggagggaagagaatgatagcaaacaaacaaaagtgactattaaaagtaacgggttatttaaaaagtgagaattctattaaattatgtatatgtatataaatgaccaccaaaatgctggaggtgttatctcagggtgaaaaaattgcaggtgatttttatattcttccttatacttttcagcattttaacaggaaatataattattctataattagaaattactattttcattgagggaaaaaattaaatgattcgataacactgggagcatggaaaatgtttctgaagtcttcctagccaaaacagggcatacagaaaaactgtgcatcattgatgactaaaagaggttttcacaatcttcttcaaaatggagacagaccacaaagtccaaaattaataatcatcctaaatattttaagcatcttgaaggcagggcctaaatctaatttttaacacagtttcccaatggcttagtgtgctctgagtgctcaatcaatcctcattaattgacaaacacatttcgaatcctatgaattattacatcaaagatgctattatttgatatatgaatgctattaaaaagtaaaatctcatctaaaagagtatccaagccagagcagctccagtgaaaataatttaactatgaaatttaatctgctacaacagaagtaataaaaccctaacatataacaaaattggtctacctgctctgtttatattccatgcgtccagttttgttccctgcattcctacagtctcggggctgcctgatatctacatacccacctcagtgactgtccactcaatcccgttaccttctgtttcttacaagagtaatgacattagctaccaatcatcataaatcatctccaggccaggcccatcttcaacactctaagcagcttgttaaaattttgactctaacatgcaattgttttgcagagaggtacaactttttccttcttccaggcctgctttctctgcagggcagtgaaagcgcatgctgtgtggagagctgctcttgtaatagccatggaatagcctgtccaggacaacaggcaccaggccctcatggggtggaggtgggctatggctgctgcccttggaggccaggcacccacacctggctgtaggggcctcttgcatgccattcttttaaaactggcattaggcaatgtgaaaactaattttacacatctaacgttttcaagtaaaatacttacctggactagcaagtggcccgaattaggcaaaaatgtrccacatttcttgatgttctcatttatttgttttatcaaatttatcagtatttccacagcacctttgctgatcatttcattaagaaatcccagatttccagaaatgaactttatagaccccatacagtataaaaaagcttccatgttagtttgcaggtcttcacttcttagtacctccaataatgattctgtcaaaaagattaattaytataaatgtctgagtataacagctggagagaaatatattaaagcacttgtgtgtgaacataaaatacacttcgtaaaatatatttatcaaaatctacattcaagtgcttgttaagagttatatagtataagagaaaagcttacttttagctaagataagtctctgtaatagtaatttcagcagaaggatgggattgttaataaataaatgagaaagtattcttttaattaatgtcattccttgcctcttactaattatttattgacctttattttttgttacaaaaattttgagtcatagaatactaataatttaacacatctaagagttaaacttcaacaagcctttaagaatatatttgtaactgtattcttagtgggaaatccatgaaggggcttaaaaaaaaatctcaatcaccctagaaagataacttgaatataacgcctatccttttcccaagacaacttaagaacatttattcaaataacataccactacttggttttacgagtaatccaggcaaatccaataacgttaataatgcatatctcacatttaattatattaaagtcaatgtaataatttgacataatttgttttcagtcgacaattcttaattagttgattcaacattagacatttctttcagtactggttttgtccctatctgccaggggcaaagaaagatgaaaagataatttatcctatgttgcaaaaagagaactcaatgtattttccatgttgctgcatggaaaatactttgtattttcttttcttgtatcagcaatattaattaataaaaagatttccatttaggtaactagatatcttaattacttagaagtacaacaaaaattaggcattagctagataaggtataataaaacttccttacctacaaatttgaaacatgttgatgtcaggtttctataacagttatagatgtctttcaacttttagtcatccctagtatattaaaagactaaaattttcaactatgtcaaatactattaaatgcatttttctatatattaaatccaagtccaggaaatgaattcttaaatggggaacactttgtaaagtcacataatgttactacaggtgttgaaggaaaagagcaaactaccacaggatgcattcaactgaatgtggaaaacagagaaggatgaagtaaaaatgagcatcacataacttctgcatgtttctagaaaacaaaatattcttgctatcattgattatatattttctctccagacttctaatttttactcaagtacagcatttgctcaatagtagcactgaatgacactcacccagaatgctgtcattttgaatcaaagaatcattcttctcattcctgctaattttaaatataagtttgcagacattaagaagattctttctactcactttaagctgcagagaaagaaacacatctctattgcagaaggaaataaagacatgctgtattaaaaaaaataaaccacatctatttttaaagtacagcaacagtatttttaaacatgaagaaaagttctaaagaaatcaactttgaaaaatttagaccacatatttgccaattgtggtatctaattaactcaattagagtaaacacaatataaattatctttagaataaacattttaatgacagatcttagcgattgtgaatactgtggaataaacataggagtgcagatatatcttcgatacactgatttcctttcttctgagtatatacctggcagtggggttgccagatcatatggtagctctctttttagttttttgaggaacctccaatctgttctccatatttcttacttcataaagtctctctctctcttttcttttttacagagacagggtcttgctctttcgcccaggctggagtgcagtgatgctgccatcacagctcactgcagccttgaccacgtgcgctcaatcaactctcttgcctcagccgccagagcagctgggactataggcttgtgccactgtgcctggctaattttttcaacattttttttgtagagatgttgcccaggctggtctcgaactagcaggctcaaacaatcctcccacctcagcctcccagtgttgagattacaagtgtgagccaccacgcccagccaagtctcatatttatatatgcgattattagttacttttaaaggagtatatgaggaagaaaggggtgcagtacactgttaataaatttgattagagtaattgcattaaaacacaaaagtagaggaagatgaataccaaaatttcacattaatttagaaaagaacacatagtagagatgaaggaaagaaaagaaagggggaaagttttggtcttttttatcatttgtataaaagaaaatttaaaagtaatactgcttaatttgataatatacatatatttctttttaaggtctatttctggaatgctttgagataatcacaagtaacatctaaagttgaaaattaccttctaggctgggcgcagtagcccacgtctataatcccagcactttgggaggctgaggctggtggatcatgaggtcaggagttcgagaccagcctgaccaacgtggtgaaaccccatctctactaaaaatacaaaaattagctgggtgtggtggcacgcgcctgtaatcccagctactcaggaggctgaggtaggagaatcacttgaacccgggaggcggaggttgcagtgagccgagatcgcgccactgcactccagcttgggtgacagagtgagaccccgtgtcaaaaaataaaaaaagaaaagaaaattctcttctaaatcatacaaaaatatctaagtaaattaaacatggggtgataaggaaatatagtgtttttttttttaaaaagcaaagtataggattactgacggaatcaaatggtctaagttagctgtgtatttatctaaagtagtaaaaaagaaaaataaaaaacatcctaagtatctaatattagggaatagtttattaaattgtgggacatcaatactatcatattaagcagtcacaaaaaagcataactgtgaacattatgtctaaaaagggaaacatttataacctactgttagatggaaataatatgtgccctcattacaaaggtgtaaaaatgtatttgtaggaataaggtcatctgaacaaaaaattatttctgtttgaaaaggatggcatataggtgattagtttattattaaaaactatctttaaagttatttaattaatttattttttgagatggagtttcactcttcttccccagcttagagtgcaagggcatgatctaggctcattgcaatctctgcttcctgggctcaagtgattctcctgccccagactcccaagtagctgggattacaggcacatgccaccatgactggctaatttttgcatttttagtagagacagggtttcaccatgttggccaggctggtctcgaactcctgacctcaagtgatccacccaccttggcctcccaaagtgctaggactacaggtgtgagccaccatgcccggctacgacatttctctctctctctcttttcttttttttcagagacagggtcttgctctttcacccaggctggagtgcagtgatgccgccattacagctcactgcagccttgacttcgtgggctcaatcaactctcttgcctcagccgccagagcagctgggactataggcatgtgccaccatgcctggctaattttttcaacattttgtagagatgttgcccaggctggtcttgaactagcaggctcaaacaatcctcccacctcagcctcccacattttattaatgagttttcagttactttaaaaaaataatagaatctgtcaggcatatttgttaagtatttgttctgtgcttgatccacaagtatttactgggcacctgatgtgtaccaggcgctatgctgctcactgcagaagacaccaaaacggccatggtcagccccaagctggaggggcctggggaggggagcactgcctgtggggcagcttctgcataccctcctgcactaggccacttacaaaagttattctggaaatttggtgttgtcgttcacactttgcacttgaggagtgcgtgcctcagataggtcacagaaccatctcagcatcacctgggcatgtattaggaatgcagaatctcaggccccccccagcactaccgactcagaatctgcattttacaagatccccaggggatgcatgtgcacagtgaagtctgggaaacactgttgtggaagcttcagaaactgtaacacatggcagaatggagattccttctgttcccaggaggaaaataggaaatgggaaccttaataaatgtttaatgattaggtatttaaaataatattgtttaaaacccccagaaaataagcgggcttaagaaaacagaagaacacagcggacaccaggactctaagatagcgtcagttgtaccagtgaaggacaagaaacttctggaggtcaaactgggggagctgccaagctggatcttgatgggggacttcagccctagtggcattttcggagcgtttcaaagaggttactactggtactacaagtacatcaatgtgaagaaggggagcatctcgggggttaccatggtgctggcatgctacgtgctcttcagctactccttttcctacaagcatytcaagcacgagtggctccgcaaatacsacwgaagrggacacgytctgcacccccccaccccacgaccttggcccgagcccctctgtgaggaacacaatctcgatcgttgctgaattctttcatatcctaatggcaattaacctccaaataaaagatgactagttaaaaaaaaaaaaaaaaaaagaaagaaagaaaacagaagaacatttctatattgatggaaatatatattattcctaatatctggaaatatatttgaattggttgactaccttctactagattgtgagtccttgaggtcaaaaccacaatttattactctttctatatgtagtatgtaggatgtgttccatacttaataaaacttcatgaaaaaaatgaatacaactcactttccttttccccaacaaatcttacatttttagtaaaaagtggcaaaggaaaacaaaacaaaacaaaaccttgtatcagagttttcattaaaacaataagaagaaaaaacaaaaatgaaaacaaagaaaagaaaaaagacaactacaacttccaggcctgctataatgtcaatttacagtcagtgcaaatttgtaccgcttctccattgttaaccgtaaaattatgactttaagacataaaaagataataaaatcttacatttatgcaagggatgtagacgatcttattttaaaaattccctgttactctccctttcctttgctctgctttatttttctcccttagttctcattatctcctttggtacctgctgtgtttgctgtctgtctgccctgctactgtggcaaccccagaggaaggagctagtttattcacttgtattcccagtgtcaagaggagtctctggccaggtgcagtggctcacacctgtaatcccagcactttgggaggccaaagtgggagaactgctcaaggctaggagtctgagaccagcctgggcatcatagcgagaccccaattctataaaacattttttaaaaattagccaggtgtggtggtgcatgcctgtgatcctaagctcctggggaggctgaggcagaaggatcacttgagcccagaatttgatactgcagtgagctgtgatctcgccactgtactccagccctgggtgacaagagcgagatcttgtctttaagaaaaagaaaaaaaaaaaatgttggcacaaagtaggttcttgtggtagggtagttttcttcttatgttaaaaacagtagtttattctatttaaagtaaatttggcaaattaaagaaaagtaagaaaagtttaaaatcactcatactagtaccactatatagcatcacagttggtaattggtatttcttttctttttttaccctgtacatagggcgctagattttttccctcctaaatatagtcacattcatactgtatatatttgtttgtactcctttaaaaaatcttaatatagtaacatttaagcttatatatttttgtatattattttgtaagagtttctgacacaaagattaaaattaagatgactgtctggaaaactttcatttgccagtatttgccaataaacaggcagagagaagttgtaaaaaacttcttagtcccatatagctttagtttttgctgattttttcttcttcaacagttcttatgatgtagtcttttaacattttacatagaaccgcatcaccaaggcctaagctaaacaagatcttgtctggaatgttacaggagatccaggcagtagatgggaagttggccttgatggatttgaaggtcccttctgaactgctggttctgtagctagtcagaaggcaaacctacccagctctgcactctggagtttagcctagcatcttgctcctgattcagcaaggccgtcaatgtcaccaagagggctttatctaatcatatgtttagttcaaaacatgttcactgcctggcagatcacttagccttttgccctaaaatagttaaatttgtgtcatatatataattaatttgaatgacaccattaataaccgaaataatatttactctgcaaagcattaaaataattcatgttccttccttcctccttcctttccttcttgctctttctttctttttttttttttcctcactctttctctctttctttggcttggtatggaacaaaatgtctaggattcagattaaaatagcaaaggcaatctttgggcagctgctgcaccgccagagccctggagtgatatcactatttcaaagaagtattgctttcttgaccacatatcacaatttttaaaaagagagttaatagtttgagagctgaataagaatgtagcctccccctgatattacatagatacatgctcagaaaattctgctttatgaaagacttcattatcagaataagaaaaggtggcattcttattaactaacagtaagtacgccaacacttaccttcactgtgtactgtaagattttaaattctgtaaattatggggtgttagcacaaagcttgtacttgtatgaaaccaagaaaacaaagcttcattcatttgttttagcggctctcttagaacattctataataattgtggcttatcttttggttccaactgtttatggctgtgacaacaaagtgctcccctcaaacagtgatatcattttgtttgagacagagtttctacagactttttttttggtgtctggccttttcttctcacaccttgtgaaagccttctatgaccactgaggtaccttcctgtgaccacacgcagctgtatttcggtttcacactggttcctaaagcacctgatttattatgactgtggcctaaattacttagttatttattaaatcatatgacagaatcaagcatccaagagaaaccactgcctgcaccatctgctactgatctccagtcaagttatttgagcaaccattttgaatgtatttgcctacggttatttctttttctttcttgcctttccttccttccttcttcttcttcttttttttttttaacttagttgcagtccaaaaacgttgagtttcttttaacattttctatgtactcagccttagttccttagataatatttcctagtcaaattctgagatgtcagtttattaccttaatttttttccaagattctaaacaaatacactgcatttctaatattctttgtaatatttaaaaataaagcattaaacaaagcttttatgtgatatagtctactagaccagaggaaagaaaaacttactgctagaattatttttgcaagtttaaggctgagcgagtctgaaccaacatcaactagtttacacagggtcttcaggagaatacttcttcccttaaatttatttccaagcatgtttccttcctctaaagcatgatgaagttgtgtgcaagcagcacaaaccgtttcaatgttttcttctgtcagagcaaagagagtaaagcaacacttactaattaaggttaagtttccaagtgtgtcaaacacagacagtgtaagtaaaaaccccataattatttccttggatatcttcaaattcctgacctctatttttttcttatcttatcacttccatctacctgatttttttcatccctttgatccatctcctaccatgttgacttattgcttatcagtcattagcttatctagaatacacagtctttcaaagaggtattgaagaatgggactgctacctgcttcagttggcctcctttactccagatgccctccacctcagcccgtgatctgctcagtctcacagatgcatgccacttgcatcttgaccttcaactcttttttgcatagctctactggcctaaaatgttctccataaccctcattcctactgtttttggtccttcgaggctctgtttatgttgtagctgcttcagaaaagatgcactattccacattcaacaaacattaccttaggttacttatttttcatgtacgtatgtgtgtgttgtgttatatgaccagtgccctcaaatagatgtcatactaagtgagccagtcttacatttctttctatcaatagcacatggtacagtgagaatattgtatagaatactgtatatagcataacttcacacatattcattttctaatatatctgttgacaaaaacaatgatcagtattttcctatgagaacaatgctcattacctaagaaaagagggttctaatagaacaaaagcctgaaatgtcacaaaatccaccattatctggaggtggttattaaaaaacaggagaataaaaatatttttgtaaatccagcactttgggaggccgaggtgggagggttgcttgatgccaggatcaaggccagcctgggcaatatagcaagatcctacttccaaaataaaataaaataaaaaataaatttaaaaaaaaggagagtattttagttaggaaacagggagatcttgaacctttcatcttataattatgtttgtgaggaaagtaatacctatatttttttgagatggagtctcactctgtcacccagaccggagtgtagtggtacattcttggctcactgcaacctccacctctcaggctcaagcaatcctcctgcctcagcctcctgagtagctaggactccagacgcttgtcaccacacctggctaatttttttatttttggtagagatggggttttgccattttgcccaggctggtctcaaactcctaatctcaagtgatctgcttgcctcagcctcccaaagtcctgggaatgtaatttttggaagtggcagccacactaattgtcatacaaagaagaaaaatagcacaaaaaaatggaacatgaggggaaataaaataatctaatgtattctgtcaaataatattatctctgatagattccttcatgaaatttaaaagtaggaaaccaatcttaaataaataccataatgtgctyttagaagcccacatagaggaagtgtgtgcctgcagaaggaagtgactcaggccatttttagctcttttcaacaataacatctaagaaaaaattttaaacctcaatagctaagtaaccttcaatgtcttttggttatgcacttaaatgaatgaattgatgggaaatgacttagcctaactttaaataaagggaaaaacctgaactcctattgtatgaaacacttgtgttttgttgttttattcttctgtgactggcagtttctttacaaaccctaagtccaggctctgggccactcattggcagtgggtggtcctcaaagtattttctaagacttccttccacaaactcttcagcctggtaggttctactcaagaatacttgtttttagctttaaaaaggggttagaaagaaaggctcaagggtcaaattttaaactattgatcaaatcaatcctttataccaaatagtttgttataaatgctctatagcttcaaaagacaacttgaatctacaaactatcaagatttgcaaggggctaaatctagtgggtaaaagtttgattgtaacagagagtaacataatctcagagtaacttctatccccaagatatgtattcattacaaaggaaagaataaaaacctgacagtgggtacagctgtgggacacgaccagcaacagaacgcatcagcatcgtgtactcctggcaggaggtgctgagagggacacagcagcactcatgtgctctgcctgcccaagatgctaacctggagctcatcacgggaaaacatcagacaaacccaatttgcgggacagtctgtaaaatattcctcaaatacatcaagatcacgaaagagacgtgacaaatgatgagaacttgtgatccaggcttttattttttctacaaaggaaattattgggacaaattggcaaaatttgagtaagatttttatagtattgtatggtaatttccagatatataagagaatgtttttgtttctaagaaatacatgccagccggctcagtggctcacacctgtaatcccaaaactttggaaggccgaggcaggtggatcacttgaggccacaagtttgagaccagcctggccaacatagcaaaatcccatctctacaaaaaatacaaaaaattagcagggtgtggtggtgcgcacctgtcatcccagccactgaggaagcagaggcacaagaattgcttgaacccaggagatggaggttgcagtgagctgagatcgtgccactgcactccagcctgg

SEQ ID NO: 94762 - DNA, 87588 bp, Homo sapiens
gcatgcctgtagtcccaggtacttgggaggctgaggtgggaggatcatttaagcccaggagttttcaaggctgaagtgagctatgatcaggccgccgaactgaagcctgggtgacagactgagaccctgtctctaaaataaatcaacaaacaaaaccaaaagaaatgtctttcctctcttacacacatgggtatatgagtgtgtgagtatgcgtatgtctgagtgagtgataaaaatccactcccttaatatcatgagtatgtgtgtctatgagtgattaaaactcaataatttaacaaatttgttttatgaaatgaagagtgattgagaactgtgtgggaccctggtgcttccgagagatgatggagggtgcaaactggtagaaaggatgtgaagactaagagaggaaatctgggccacttggaaatatgtagccattgtgagagtagaaagtcttctgctactcattctcagctttttcccttccctcaggctagtgagagataggagtcttggaacacaaactataaggccaaggtggtaacaatccataataacacaaatttattcacatggtatttatgatagtcttacaaagcactacatgttagctcttagagagatagaatgagaatagggagaaatcttagtgataagtgagtatagttgctcattttacagatgaagagacttagggaaaggttaaacagcagggccaaagccatagagctggtcaggctcaggatcacactccaattcctttacttatagtccaggtgattccataactttgtgctctagcaggtagaattactgtaagagatccaagaccttgggcttttttctcagcatgtattgatgtgcacagcatttatccctaagttagaacatgcagtattctaacacacatgtagttactaagccctaagttctaaaatgctccatacagatagatgattgctttaatttattttgccaagtttattcataaaatggaatatcacatcaaaatttttaagcatatttaagtctccccatgaatattgtattttaactcaaaaataatttttatacaattttcattagaaaatatatacaaatttataatcattctttcttaggttttccttatgttaccaattatcattttattttctaaataacatttcccccatcattagaaatctgggttgccagtcagcctttattgttttgattacttcatcaaggatcaaaatgtttctctagcagaaactcactttcatttctaaagttgtagataaaaaaacaatggcagagaagtaatcaaaaagacaatctcttttaaagaatagcagcatatcctttgaaggaaatttgcttccaacttacctttggaaggtgtaattggattctcttttcaattagagccctggggtgtcctcttatctctttgaccaatgccttggaacataaatgctacatcaacatggcaagtaagccaaggttagacaagagaattactaaattcaattagggttagttcctaatagtttaagaaggtagggaataaaaaatttaatattcagacaccttacctattggcagagagatctttctctttttggagtttggcttaaaaacaaagcaaccctataaaaagaaagacgaaaagcataaagtcaaagtagccaaggagcagagaaatctgattaaccaaatattttatgggtaagcacttttttaaaaaaagatggtaggggagagaacacatttctttcaggttctaagaaatcacatcacttctctctgacctatagaaggaaaattctaaaacaacaagggggactatctactctctcccctccctcccatgagatgcccatttttgattttgctctttgacacctgatctaagaggtagacaaagaaaataaaagctgattaaatttaagcccagaaaggttccattttcataaacttaaaggaattaatactacacattaaaatgggctgggcacggtggctcatgcctgtaatcccagcactctgggaggccaaggcgggtggatcacaaggtcaggagtttgagaccagcctggccaacatggtgaaatcctgtctctactaaaaatgcaaaaattagccaggcgtgttggtgtgagcctgtaatcccagctactcgggaggctcagacagaagaatcacttgaaccctggagatggaggctgcagtgggctgagatcgtgccattgcactccagcctgggcaacaaagagcgaagctctgtctcaaaaaataaataaataaaaatgaagattaaaaaggttgaaaatagtgatgttctcccaacccgaaacttatttaaactcgaagtatctataaccttagtagtaaatagataattgcagctgtttcactctacatacttctcttcatctgataaatgcctactcatttatccattaaagtttgactcaacactcatctccttcaggaaacctttcacaattctctagccagaaattctcctttcctcgagatctctcagtacttgaacatctttattttgcattgttttaagtcactttaattgtatatcgtagttgtttatgggtgtgtctccctgagtagactgtgagtgccttcaagcacaaactgtattttatttataattgtttctccaatgtttggaatagtgctaacatacatattaggcaatcagaatatggaatgaataaatgcttgccaaataactgtcctggtaatttcccagctatgtttagtttcatattattgtttgaccagtggtagatcacccccaagttagtggtcctagtctattctaccaattctaaagtcatacatgatggatagcttatagtttttttttgtttgtttgtttgtttttttgagacagagtctcgctctgtcgtccaggctggagtgcaatggtgcgatcctggctcactgcaacctttgcctcccgggttcaagccattctcctgcctcagcctcctgagtagctgggatgacaggtgcccaccaccatgcctggctaatttattgtatttttagtagagacggggtttcactatgttggccaggctggtctcgcactcctgatctcgtgatccatccgcctcggcctcccaaagtgctgggattagaggcatgagccactgcacccggcctgatggataacttcttaaatatttcgatttctatggaaaataaaagacagaatgaaagaacgatacctaggaaaagttgtctcaggatagtgttaaagaccgctgtgcaactataaagtagccatttggattacatgttcccatttaagaactgtgccttagattcttttttctgctattgttgagacagagtctccctctgttgcccaggctagagtgcaatggcacaatcttggctcactgtaacctctacctcccgggttcaggcgattctcctgcctcagcctcctgagaggctgggattacaggcgcccaccaacatgccaggctaattttgtattttagtacagatgtggtttcaccatgttggtcaggttggtctcgaactcctgacctcagatgatccacccacctcggcctcccaaagtgttgggattacaggcatgagccactgcacacagccctgtgccttatattcttatatctgcaactagcagaagtgtgcgaaatcacatacatatttagaaaaatcatgtgataccatgacaaacctgtcattacctcctttccaaatccacctgcaattcagtaaaggaaaaaggagcttcaaaggagcaagacatgaggagtgatcagaaaggatcttaatatagggcagtggtagtaacatggttaaccatttggaactgctggtcaagtgatggtgtttgagatagaggaaggccaacagccagaaaatttcacgatgaaagagacactaaaatgttttgatatgtttaaggaccgggcgtggtggctcacgcctgtaatcctagcactttgggaggccgaggctggcggatcactcgaggtcaggagttcgagacccgcctggccaacatggtgaaaccctgtctcttctaaaaatacaaaattagctgggtgtagtggggcatgtctgtaatcccaactgcccgggaggctgaggtgggagaatagcttgaatcggggaggtggaggttgcagtgagccgagatcgcgccactgcactccagcctggtaacagagcaagactctgtctcaagaaaaaaaagaaaagaaaaagaaaaaaagcttgcagttccataaattcatgaaatagttcttaaagcttcttattcatgtaaggtctcatcccaatacagacatttgttataataccaaaaatgctttcctgaaaaatcttactttctgcaagatacataaaaataagaggtgcttatgcaatcaacaggattaagggatagaccattcaaaacctacagaacattataaccaggacaaaataaaaccagtaccatttctaataaaaatactacctttgaatctctactagcataaccttaaaccccagggcttgtcctttttccttgagatgtagtctttaaaagcactgcttctcataaaccgttttaatcaaaataaaaaatcagatccatgacatagccttcttcatcaatccattgttttaacatagggagaatgtagcttcttcatgtgcatttttcagctttctcagacagcttaacttcaggggcttcccgctgcacttacaatagaactcaaggtcttactttttgtggtccagaacagcgctgtccaacagaactttctgtaatgatagaaatgtcctatatctgcactatctaaaatggtagctgcagccacatgtgatgattgagcacttgaaatgtggttagtgcaacggagaaactgaatttttatttaatcttactttattttaactcaaatttaaatagccacatgtggtgagtgactaacacattggacaatacagctctagggcttatcttcttaccaactacactatgtcttgcaatttcttgccatctaggtagccaacatgaggaggtctataagatatcccaccacacacacccgcatccacattactttttcattctcatttttcatgacgctcccactctttgtctactttctgattatgatttttaaattcctctaatatgccattttatttctatcttctgggccgaagaaacatgctgttctctctgccctcctcgccctaatccttaacctaacttctactcatttttcaggtctcagcgaaagggtcactttctccaaaaagcctccgctaacccccgacaacctatattaggttcttcccactcttctgttgtctgcctagaactcttttccttgctaacacttaaaatttgtgatcgtcagtttatctatgtttaccgactttcttgactgcagaaactgaatctgttttgtttaccactgcatcttggtacctaacggagtgcttggcgcacagtatttgtgagatggaaaaatgagagactgggccacatcatcaggacatccgacctccaccaaccagaacttaaaaatcctcctagccataccacaaggcagatccgcgtcctcgctccccaagcaaagttggcctcaactgatctggagcaaggacgcctcagctcagtacgccgctccctccctcccctccagccagggaagggatgcctacgtaacctcggcttcatcccttcttcaaaggggaatgaggcagcggtagagccacagtgcgcatcggccaccacataccttagacatcgaggacgtagccatggtcttactgactctgcgtattccagatgcactcgggatttcccgcgcgccctcgcggctgcagggcagaggttagtggcgagccacacggctccttgattggctggcatcaccctccggggcgggtttccggcgcggggaggcgggtcgtataaggaggtggggcgaggccggaactggcggactgcggcgcacttccgtagaggtggacatggcgtgcggctttcgccgcgctattgcttgccaggtatggatcccggagcgcgcagaggagtccctgaggagctagggaccccaaaggcctttcaccgctgcgggccagtcctcagtcagctggagggtgggtcccacggaatcctgttagtttctaccacctcctcccccttctctggagctggtggagcttcagaagtcctgtggagcgtcggctgggatcagtwtgtctcggtgaaaagtaaactttgaaaggtacctggtgctttcttctctccttcccaccccacagctatgaatgctttacctgggtggcggcaagtcattagaccatgattagaccccatagaagttagtgttcttkacactttagtgacattgatgatggatctggattgttcttcagaaggacctcattttaaagctgcttatttctcttgcagtcacttaggcagcctaccctagaattgtttttggtaacgcccaaagatataagagctatctgagactcagtttttcttggttcagggtcgtatttgaacagctctgttgtgaggaagggcttacaaaattgcaatataattgctttgttttgtttttcctttttgtggagaacggggtctcgccgtattgcccaggcaggcctcaaactcctgggctcaagctgtcctccctcctctgcttccctaagagccgggattacaggcctgagccaccgcgctgggcaaaattgcagtataaatgtggaattaatcaaaaagaatttttaagactcattggccacccttgcaaggaaactttctattgtggtcttggctaacccatttccttctgattaatggatgtactagtggacgtaattagcctggtgtataatttatcttggctcatttttacagtatttctagacatttgtggggaaatccctctgccttgtctttatgtttatagatgtactgccctgtccggtgataattcgccaaatatcaccaacatgacattttgttaagacagctgaatttattgctcactgggataaggaagaacaccactgagagctttggtagtgtattaaactgggaaagcaaggtcagattttactgatgggtatggcttaaggctggtctttcagagggagagggtaggagggtgttggaggaagatggcttgattagggttggactctgatctgatacagcggtttaagattgataggaaaagcaaagagtgcaagaagccttaaggcataaactattgagkttttctattggaagaactaataggcctggcatgtggttcatgcctataatcccagcactttgggaggccraggtgggaggatggcttgagcccaggagttcgagaccagcgtggacaacataggtagaccccgtctcaacaaaattttttttaaaaagtagccaggcatgatggtgcacctctgtagtcctagctgcttgaaaggctgagtctggaggatcacttggacggacccacgagtttgaagctacagtgagctatgattgtgccactgcactccagggtgggtgacagagcgagaccctgtaaacaaaaaataaaaataaaaaacgtgaaaagctaatagatttctcatgaagttcttataatgaatgattaagttatttgggcagaagtcttctagaacagtaaagttatgctaatgaagacaaaaaataataaattcatgttaatgtagacagtaaaccatatcagggaaggtagttttggaccttagtatctaagctgtgtgtaagggtggacgttttccattcttagcccttaagtaaagatagtgccatgatgagaaacaaattgtgtttagttttgcaaaggctgtgttctttgtaaagactgtaaattggaccaggcatggtggctcacacttgtaatcccagaactttgagaggccgaggtgggaggatcccttgaactgagacgttcaagaccagcctgggcaacatagggagacccccatctctataaagaaataaaaaacaaaacttaggtgtagtggcacacacctgtggtcccagctgcttgggaagctgaggtgggaggatcgtttgggcccaggtggctgaaactagcaagctttgattgcaccgctgcacttcagcctgggggacaaagtgagtccctgtctcaaaaaaaagaaaaagataagttggagaaacaagaactaatatattgagtatatatttgtgctagttactacacattcacatttaagctcatggcaaccctgtgatatagaagtattaaccttattatataattgagtcagttgagatccacagagattaaataacttacccaaagccacatcatcaatacattgtagagttggtttatgaacagaactctaactttaaaattagatctttcctatatactgtgctctttgtgaaagcaagaagcacagtccaatcattgaacagaatctaatggatttatacagcagtgtaaattatgcagatatatatgtatttctctgaatatagagtcattggggaatgatctgaaacttgaggataaataataatattttcaatacgttaggacatggggaaaaaagagcaaagaaaaaacatgttcagtacagtttgagcatccctaagctggaaatctgaaatgctccaaaatttgaaactttttgagtgctgacatgagactcaatgttcattgagttcattggagctcaattggaaattggaaatgttcattggagaattccagattttcagattaggagctgggtatggtggctcatgcctataaccccagcacttggagagactgagacaggcagatcacttgagcccaagagttcaagaccagcctgggaaactaattagaaaattagttgggcatggtggcaccctcctgtaatcccagatacttgggaggctgaggtggaaggatcacttgaacctgagaggtggaggttgcaatgagccaagattgtgccactgaactccagcgtgggtggtaaagcaagaccctgtctcaaaaaataaataaataaataaataaataaataaataaccaaccccacagattttcagtttagggatgctcaacaggtaagtataaagccaatattccaaaatctgaaaaaattcaaaagttgaaacacttgtggtcccaaggatacccagcctgtatttaatacctttgcgaatgagcatcgttttgctataatagtttargaatgaaggaatgtgtaacgtgcaatggcaaatgcatttagctaactttgattaattagtcgacagttttctaagcactgtcatcagtcccaaggctaaaagtgaacggaaaatagtttctgccctgaaatggcctcagacatgcttggaaaacgatgtaaaccggtaattgcattgcagcctgtaatcactgtattagaagcatgtgcaaagtgccaagggaacttgaaagctcctaagggtcagacaaagttttgtagaaaggtgatgttaggtctcagttttgaaagggatatgggtaggagtgtgccaagtaaatagagtgagagcttggggagaggtcaggtattgcaagaggaggatgtgcatagacacagacatctggaaagcatgatatgtacatagaatcacaatatttggattcctttcttcagcaagtcctgttgattttatctttatatcttgaatccatctacactattgctgctgcctccccctctcctttctctattccacaccaagcccccattatcacctatattgactgcttacaacagccttctgatggggtgtttgtttccattcttgccctccctccagttcattctccatgtatcaagaaaggtgacatctaaattgtgaatcaaatcatatcacttatctttctttgttgcacgagtctctaccagaaccttaacttsttcaacttccattcwtgccccattctatcatttttgtaggaacctagctacaatgttaatttgtttttctaacatagcagggtctttccattcccattgcgtagattattccttgtgcctaaaagaaatgcattttatactatcactctttatgcacgatgaaagtttcatgaaacaatacttatttatactgtattctgtcctgttttatacgtattttttaagactggtggttgggactcaacagaatttatttttatttttatttatttatttatttattttgagatggagtcttgctcagtcgtccgggctagagtgcaatggcgtgatctctgctcactgcaagctccgcctcctgggttcacgccattctcccacctcagcctcccgagtagctgggactacaggtgcccgccaccacacccggctaaatttttttgtatttttagtagagacggggtttcaccgtgttagccaggatggtctcgatctcctgacctcatgatccacccatctcagcctcccaaagtgccgggattacaggcgtgagccaccgcgccaggcaaaggaatttatttctaactggcaacctataatttgaaaagtgtgtcctctagttctcttagtcccttgtttgcttctatgatgacaataataagagtaattgttttgttttacttgttttagtgtctgtttcctctataagcttcatgaagacagaacatgtcttattcactcttatttcctcagcaccagcaaagtgcccgaaacataagtgtttaatgtgtatttgaagaatgaatacctgagtatctctgttgtgatctcatataaaatatgcagcttcactgaatgagttcataattttaaatctatggagatgacgtggtgtggtggctaaaggaactccatcttggatgctaatctgccatgttgacttttgattatccccagttccaggaatacctgtaagatttctattttatctactgtttatagtacttaagggcaggatttctattttatttactgttwatagtacttaaggacaggatttataattcttgcccttaagcaaatgataggctatgacatagcattcttgattttttctaaggggttgacttcggttgtcttagacatcccttctgaagcatggttaccccttctctatggtatataccatagagaagccckgggtcttggggtagataactgcacaaggattcatcatcttgtctcttagcttcctgagatatgacttctgttcataaatccatattaaatgtttctttctgagaagctgggtttgtcagctgctttcttcagtctctcagcatcctcagtcttttgagggtagatttgtatagacctgcttaccatggagcacttaataatggtgggaaggattagaattctagcwtcactatttgtrtaactaactcttggcaagtcagctgtaagatgatggttttgattccaagtttacaggattgctgcaaggattaataatgatgttgaagattataataactactatttatgggatacctcacttgtacggtgccgtattttgctttgctttatagggctattaataaaatgtaatgagataaagataacagtgcttaatgtcaggagttgcaaagggtctgtgattttaccctcttaagtttctaccactgttccatggatggtagcagaaaacatcagacccctgaatgagggaaaaggattttactattcatagcaatagcagtagccacagtatcaacatattttgtgtgtcaatttcccaagttctttttcttcccatgccgcaatgtgaagataatacctctatataagctgtgtactgtgttacaggagagaaaccttgagtcttttataatgggcagtaagcatgcctgccctttgctctggagtgaggaaccatctttatcttacaaatctgtatccttgaaagatagtccagaacaaaggcaatttgtgtcttgtttacatacgcagaaatgttggagtcccacgaggatttgtcgctcaacactaagcacagtggtatattgtgcttagtggtacacatacaatgtacagtacttgaaattttcatttcatcatctcagtcatgccattgctatttgtattgtatccttattttacagaaaaggacactgagattcaggaacatgaaaggaataacctaaggtcactcagctataaaattctagagttgaactactaacctagctatttgcctcaaagccagaattctttgtattctatatgtagagttaaatttgtaaaatggccagtacgtgtctggctccgaaataatgatggaatgtagatttgtctccctttcttacttgcttttcattttgctcattaaacttaaattcagctggttctgtttttttttttttgagacgcagttttgttcttgttgcccaggctggagtgcaatggcacaatctcggctcaccgcaacctccacctcccaggttcaagcgattctcctgcctcagcctcccaggtagctgggattacaggtatatgccaccacacccagctaattttgtatttttagtagagatggggtttctccattttggtcagtctggtctcaaactcccgacctcaggtgatctgcatgcttcggcctcgcaaagtgctgggattacaggcaagagccaccattcctggctcagctagttcattttaattttgtatacttttaattttgaaataatttcagacttataaaaagttgtgataatagtaccaacaactccatatcctctttatctagattcagcagttattaacattttgccacatttccttcatcgttctgtataactttttcctgtgtcatttgagagtaggtttcatacataatgctcctttacctcttaatatgtaattgtttatttcctaagaacaaggcttgttttacatgaccatagtacagttatcagattcatataatattgataaaatgctttaacttacagtccatattccagtcttgttgatttttttccccatataggatcacaaattgcatttagtttcttgtaactggtacattttaagtagctttacgctctcgttattaacttacatctgcatagcttgatagaggagctaccctgctaatggtgagcaggaagaccggctttcttgactctgctgatgagtttattatcaaatttcaggtgtggcctcaagaagcaattaaactagttgtctaattgttgtcatttagtcctgaggtgcaatatgtatgttgggcagatattcatccacattaaggtaaacagcaggactgactgaattatctacgtttgtactgttctttgcttccaatctattctcacagacccaccagcattccattctgcttagaagcacaagttgtataataatwaccatactacagcaaaaaacaaacaaaaaaactatcatcagagcaaacaggcaacctacagagtagcatagaattttcacaatctatctgacaaaggtctaatatccagaacctacaaggaacttaaaacaaccccattaaaaagtgggcaaaggacatgaacagacacttctcagaagaagacatttatgtggccacaaacattcgaaaaaaagctcaacatcactgatcgttagagaactgtaaatcaaaaccacaatgagataccatctcatgccagtcagaatggtgatcattaaaaaatcaagaaacaacagatgctggtgagattgtggagaaataggaacacttttacactgttggtggaaatgtaaattagttcagccattgtggaagacagtgtcatggttcctcaaagatctagtaccagaaatatcatctggcccagcaatcccattgcagggtatatacccaaaggaatataaatcattctgctacaaagatacatgcatgtggatgttcactgcagcactattcacaatagcaaagacatggaatcaacccaaatgcccatcaatgatagactggataaagaaaatgtggttggtacatatacaccatggaatactgtgcaaccgtaaaaaggaacgagatcatgtcctttgcagggacatgaatggagccagaaaccattattctcagcaaactaatgcaggaacaaaaaaccaaacactgcacattgtcacttgtaagtgtgagctgaacaatgagaacacatggccatggggaggggaagaacacacaccagcgtttgttgggggtggggtgggaagagtgagagctttaggaaaaatagctaatgcttgtggtgcttaatacctaggtgatgggttgataggtgcagcaaaccaccatggcacacatttgtctatgtaacctgcacatcctgcacatgtaccccggaacttaatttttaaaaagaaccatgctaaatttattatagtcataatttgccttccaaattgtttgggatattctcttctaagccccaaagttttaattcttactttgtttgcttcttgtttgtgtcttgaaactaatgcagacctgttcctgaggaaaatttctgcaaatttgggagggcttctgcactggtcttggtggcaaacctacagtgcctgacttggtagtgttggagaatcagaagtgaggaacaactggggtaattgcctttttagactcatggcctatagattatgttaatgtggataaaaatacagagctaatcttcataagatgatgtcagttttgccacctgaatgtctggttgctaaagatatggatccctttttcattagcaaaattaggtttttatgcaattttcacagattttgatcctgaacctggcaagtttagctcctagctgaatttagtacctatctagagccagactgagaatattttttgactttgtgctcagttatctgagtactagcggtaagaatcatatttgccattgtatcagaaaaataaatggttgaggactgctgacaagctaattgattgatgtgctttcctagtgaatgctctggagccaaagattctattatattagaatctctgatactaggttcctaaatctaaagtttagaattgtgcttggtacattgtaagcactcactacatattagccattcttatattacatattagaatctctgatcttaggttctcaaacgagatctggcagttgtgaattttcacttgatattcccttaagtgcttcctcttaaaaataagtaagcaaataaataaataaataaaaggccaggtgcagtggccaatgtctgtaatttcagcgctttgggaggctgaggtgggaggattgcttgagtccagttcaagaccaccctgggcaatatactgagatatagtgagacttcatctctacaaaaatctgaaaaataaaaaaaagtccttttttttttttttgagacagggtttcactctcaaattcctgacctcaggtaatccacccgcctcaacctcccaaagtgctggaattacaggcatgagcaactgcacctggcaagaagtgcttcttgctttcaacctcagatttgctcctcattcaatgtgttgtttagtttatttctcaaggactgtgcctaattttgtggatgttatttctctgttaaaattttcaggtttactgtcagtcttttattatttggttcgcattgtgtaacctttttaggatattttattctgtgaaacttttattactttgaggcctaaagaagatagttatcagtagaccttcttttcgcttgtgctagtcctagatgaagcccaatgccaggtgaaacagccctacccgaagggagcaaaagaaaataaaccctgaagctaagcaaacccattggtcacattctgatccaagaaagctccaaatccaatctcagagacagttgaagaaagtcgtattactcccagaataattctaaacctgtgagaatacaagtgaacttaaaaccatgctccaagcctggggcggtggctcgcacctgtaatcccagcactttgggaggtggaggcgggtggatcaygaggtcaagagatcaagaccatccagcaacatggcgaaaccccgtctctactaaaaatacaaaaattagctgggcatagtgggtgcctgtaatcccaggctgaggctgtagtcccaggtactcgggaggctgagacaggagaatcgcttgagcccgggaggcggagtttgcagtgggcagagattgcatcactgcactccagcctggcgacagagcgagactctgtctcaaaaaaaaaaaaaaaaaaaaaaaaaaaaaacatgctctatgctcggtggctctcaatttgttttattttctctctctctctcttttttttttatgctgcacccatttgagagaaagataaacctctaattaaaaacattcactactttgggcattgttaaaatgggaggcaactgctctctccctaagccgtggttcttaaacactagctgcagacttgaatcacctgagaagcatttaaaactgcttaagcccaggccctttagcctgaggttgggcatcggcctagaagttataaaaattatcaggtgattcagatgttcatccgagcttgataaccactaccgaacggctacccaggggcagaaaggtgtagtacagtggtctctctgcacattagatcacctggggaatgttttacatccttctgcccagagcccacgttgtactaattaaatcaaaatatttgcacatgggagccaggcgggttttcctgaagatttccggtggtcattcccatatacggcaaagtattggaactgctggtgtagtgactaagaacattgaccatggaagactcaggtttaaatccagcttctcctctgatagatttttaagttttcttcacctcgtctgtaaaatctggaaaattatttagctaccgtatagatgtgtcatcaggatgcaaggtattaatacatatggagtgctgagaattgtgtttggtatattgtatgtattcagtatcagtaaatattagtcttttttttttttttttttttttttttttgagacagtctctcgctctgtctccaggctggagtgcagtggtgcgatctcagctcactgcaacctctgcctcccaggttcaagtgattctcctgcctcagcttcctgagtagctgggactacaggcaccagccaccacgcctggctaattttttgtgtttttagcagagacagggttttgccatgttggccaggctggtcttgatctcctgacctcaggtgatctgcctgcctcggcctcccaaagtgctgggattacaggcgcaagccactgcgtccagccaatattagtcattattatgttattttagaatatctcagggtggggtattttgaatacctctccccgcctcaccaccatcctaggcttagcaccatgtggagttagtaaacagtacgtgtctgagccatactgcttaacattcaacaggaattccttaaacatacttttataaagttgtggtttggtaagcgaaaagttctcatttttgcaaaataatgcctgctcattttaaataattaagcaatacaaaaggatgcaaakaattttttaaactaccccataaatcatcaacactgacttttatttttaggtatatttctatgcagatatacaggcagaaaaaaggaaggaaaataggaaggaaaactggataaatatgctttttacaaaatccaggctgtattataatgagtttttattttcagagtgttatttttaagttttacaatggaaaaatgtccaacatattgaaaagtaaaatagtactattattcctcatgtgctcattactgaaatgctgttttgtttttattatttttatttttaaatagagatggcggggggggtggtctcgctatgttgccccaggctggtctcgaacttctggcctcaagtgatcctgcacctcgacctcccaaagtattcggattacaggcatgagccaccgcgcttggcctgaaatgctgttttaaataaaaatgttaaaagtagttttgtttgaattcagtgaaaaaccaaagtgcagttcaaaaaattattgatgtatttcctaaatgaggtttttacagtaagaaaagaaattgtgaaaaacattacaattcgtagtgtttttacaaaaagatcttcatgtttcaaatttagacagcatcaccgtctaccataagggatgaagacattggcactctcacaaatgatataattttcttccacctttaccaatttatgttgggtaactttctcactcaaagtttataacatttatagtctgtttagtaaccatatctgcacaacctctactgttcattttatgttgaaccagataagatgcttaccaccaatctttttcctgatatatggcttaattggctgtatttaagaaattatgacttctcagaaaaagtaatcctagaaatatcaaaaggaggcttaatctttagaaaattaccatgtttagaaataagactgagtgcagtggctcacacctataatcccagcactttgggaggctagggcaggatgattgcttgaacccaggagtttgagaccagcctggacaacaarggtgagatatgccgtctccacaaaaaaatacaaaaaattagccaggcatggtggtgtacacctgtagtcccagctactcaggaggctggggtgggaggactgattgagcccaggagttggaggctgcagtgagccatcatcatactgctgcattccagcctgggcaacaaagtgagaccctgtctcagaaaacaacaacaacaaaagagtcaaaatctttcttttagaaataaaggaataacactgattgtttagttcttatctcacattttttcttctgataccatggatgcaaatgcgtagggcaatcccagtgtaattgtaaaattttccaatcttcctgtgttgtcaattaattcaaattaaaaaacaacaactgagcaggtgaaacacactactttgcaacttctttatcgaatgaatctattcctatataatatcaccgttaaattatctgctttgaccagatcatgatctttgtgatttaatgtgactacaaagtaaagtacatttatttcatttcccatggagttttcttgattgggtgctttattttcaaaatttagcaacttatccagcatacatctgtgttgaattttctgtatattttcttgatataatttatcttgatatgtagattcagtttctcttttttaattgaaatatgttaatcatagaaaagaatatagttaatacttatatgccccacacccagcttcgaaaataaaatattacaaatacttttaaattcccgagagtacccatctctggcaaactcttaccttacacaataggtaatgtctatcttgaaatttgtgttggccgggcgcggtggctcacgcctgtaatcccagcactttgggaggccgaggcgggcggatcacttgaggtcaggagttcgagactagtctggccaacatggtgaaaccctgtctctgctaaaaatacaaaaattagctgggcatggtgggtgcctgtaatcccaggctgaagcaggagaattccttgaacccaggaggcagaggttgcagtgagcgatcacaccattgccctctagcctgggtgacaaaagcgaaactccatctcaaaaaaaaaaaaaatttatccacaatgatgcatggaggtctagttctttgattttattgctgagtggtgtgccatagcagtagtgtaccacaatttagatttggttctttatttcgtggaagtttttccctttattgtttatattgtgccctgtctcccatcaccttggtcacacctctgattccagctgccacagttgtaaatacaggtttacaactatttacacaggtgtaaacagttttgtgtgtgcttccattcacttattgctaatagcacctcatcctctctggagcctgctggtcccagcacatacatagctccagtgtggtggaattattttggatagacaattctggtagacactatgtatgtattttacgaggtaccatggaaattaagcctccattgcttatagcaatgactttgatggcataatcttgtattaagttttcttccttccctctctctcatcacttctgccctcaggaaccatctcccaaataaactacttgcctgcaagtctttttctcaggccctgcttttgaagaagccaaggtgtgtgtgtgtgtgtgtgtgtgtgtgtgtgtgtgtgtgtgtgtgtgtgtgtgctttctattttttagggttcatctctgtggcttctgataagtgagatcaagttaggagccctgccaaataaggctgctccattctgcttcataatctgtattatcttttcttggagatctcttttgaagtttatggctttgaattttgtctctctatccttatgactggttgctagggaagcagtctaccttccttccttcctgtctgcatgtttgtttgctagtcttcattctttttgtattttarggacaccaattttcctaaggttggattatctttcttcaattctgtttatttttctgattacattaatctttgtattctctgattagttcttctgtgtcatagtatttttttcaattatgactatactgttatgtttcttaattattagttttatggtaaaaagtttggtcactaatttttagactccttataaaattcactcctgttttttcatcttgtcttttagttcttgtttattttattcacattctcagtaagttccaaatcctgaagcatttgtgaataatgttcttcgtattcattgggttacatttttctcctgggcagagttctttkatctgttgtatgccacattttttccagctgtctatcttctggtctgtgcctccctccctattctctctctccctatttttgtttatttcagtttgatcacctattggtgatgcctgttctttttcttcttgctcatgcttgacagctctgccccagctttccatttgtttgcacattgtgtggatgacttcttcactcctcatgtcacgtttgtttttggcttacctcacctttgtggttgcaaaaatataaactcctccccctttccattcctcttttgtctctctctctagtaggtcatggtgacctgtacacattattcctcaactctgacatggtatattaaatttttgcaaactagccctgatatttttctgtcttcctgtaaaaactacttctctgattcttactgctcacacaacaccatatcaaggtttgctttctgcagtaggagaatgtattgtgttttcattggaaaggccattggtgtgttaccctagaatttttacttttgctggaaagtgctggaattcatttctgtcttactaattgtttcccacagcttgggcagcatctcttagttgcaagagggaaaaaataatggaatttattcaatttgtttttctccagatttggggtgttaatgagaattgttaattcatctctgacttctgatacatgaggactgagttagccttgccaaacagggctgttccattctcctccagaagctattgtatttttacttgactatcaactttgaagtttgtgactttgagctctttctgtcttgtgtatttgctgctggagaaccaacctacctacctgtttactctctaattactttccttccttttctttttgatgttggttgaagatgggagattatgtgaagaagctttcatttcactactttatcccggaagtcttcttggtttttttktgtgtgtttttttaaattgtgaaaaaatacacataacgtaaaatttaccatcttagccatttttaagtatacagttcagtggcattaggtacatttacattgtgcaaccatcaccaccatccgtctgcggaacagttttcatcttgcacaactaaaactctctacccattaaacaataactccacattcaccccaaccccctttttcttgtttgttttaaaatttacattatgtaagaatgtttctatactgatatagtttggctctgtgtccccacccaaatctcatgttcaattgtaatccccagtgttggaggtggggcctggtgagaggtgattggatcatggggatggtttctaatggtttagcaccattcccctagtgctgcctcggtgatagaattctcacaagatctggttgttcaacagtgtgtagcatctccccattcacacttttcctcctgctcccaccgtgtgagatgtgcytgcttccctttcgctttctgccatgattgagttttctgaggcctccccatacgtgcttcctgtacagcctgtggaaccatgagccaagtaaacttcttttcctcatgaattagccagtctcagttatgtctttatagcagtacaagaactaattatacatgtatcttttgtgaaactgctattgaaactactgtcttgttatttatatcttcatatgagtaagataaactagtcttagaattactttcaggaaaacttcattcctgctatttactgagtatrtatatatatatgtttaccctgtattactaggkgtaaaacatgctgtgtagatagattccctttgtaccttgattgccaagaagcgttaagtaccttgagcttagagttttctggtataaatttatacctccatttcattttatgtgcttaagtcccccatttcatttttggtagcaaatgaaatatagtaagataatacatgaggccagccatggtggcgcagttccttggagtcccagctactcaggaagctgaggtgggaggaccatttgagaccaggaggtcgaggctacagtgaagtatgattgtgagccgctgcactccagcctgggtaacagagtgagaccttttctctggggaaaagaaaaaaaaagaagaagaagaaattattaagtagcttttagtttagccaaaagaattctccaaatgagaaytgcatgttgttcatttaaatgtaacctttttattgctacccaggttcacaacctatttgtcagctgaaatgcttcaaaattgacctaataactgagtttttttcagccgaattgttatatttaagatagacataaaatcttagtgattatggttaagtttggaagatgtgtccaaaataaacaaactttttaaaaggagaaggaaatatttattacatgtttattatatgacatatttttcttagtcatcacaagagccctagtttattatttaacagatttattatccccgtatttcagctgtgaaaactatagctcattcatgtaaaattactttctcaaggtctcttaactaataaaagtagaactggaatttggaatttggatcctttttttttttttctgagaaattacgatagaacctttattactgatgtttctgttctagaaacatttcgtactataaacatgaactgtttgagcctttatcctataaatgctttggaaatatttacctacttctgtaaatacatcctaaagaaatgactttttagtaaggaatacagtaatttacttcctaaagtctagaaaataaaaatattgtaccctgagaggaaactttaaaaaatcaatctgtaccaagccaaagtggaaatgtacaagyctcttaaagaaagtgacgtctccaggtctgcargtttgggcaagtttttacggttaatatgtttgtgaaattcaacaaataacttctgttgacaacaggagagtatatgttgttattaatcaagagacagtggttttaattttattgctctcctgaacagtcacaaacacccttgaagatgatttcttcttaaactcttcttacattcttactttttctgtttcccccatcattcccttctctttttcccaattctacagccatgtatagtcctttgcagaggctatatgagtattggagaagtgggggaaaagttgaagacagttgtaaatttatactggctatgctgttatttcactattttgtttttatgcatttctcaatgaaaggatatacatatgtgtattagtctgttctcacactgctaataaagacatgcgtgacactgggtaatttataaaggaaagagatttaattgactcacagttcagcatggctggggaggcctcaggaaacttacaatcgttgcagaaggggaagcagacacattcttcacatggcagcagcaaggagaagtgttgagcgaagggtgggggaaagcctcttttaaaaccatcagatctcgtgagaactaactcactgtcacgaaaacagaatgggggaaaccaccccatgattcagttatccccacctggtccctcccatgacacgtggggattatgggagctataattcaagatcagattttgggaggaaatagaaccaaaccatatcaatatggcataggggttgagtataggttctgtttttagatagcctgtgttcacatcctagcttttctttccacttaggcaagttaagtaaattccckgtacttcagtttcatcatttataaaatgagggttgaaatagtaggaaagtctgggattgttgcaaagaaaaattaaggtacttaagacatgcctgtcagataggaataattcaggactggtgcagtgctcactcttgtaatcccagcactttgrggggcggaggtgggaggtttgcttgaggccagaagttagaggccagcttggtcaacatagcaagactgtctctataagaaataaaaaatctggctgggcatggtggtttacgcctataatgtcaacattttgggagtctgaggcgggtggatcatctgaggtcaggagtttgagaccagcctggccaaaatggcaaagccccgtctctactaaaaatagaaaaaattagctgcgcttggtggtgtgcgtctgtaatcccagctacttgggcggctgaggcaggagaattgcttgaacccgggagatggaggccgcagtgagccgagatcacgtcactgtactccagcctgggtgacagagcgagactctgtctcaaaaaaaataaatcattcagtacatgggaatgtctcttccacctaactttgagtgtccaattagggtaatagttcacaactttggctatgtattaacagtcgtgcgaggagcttttagaaaatacaaatccagcaaggcacagttcctcacacctataatcccagtactttggggagttgatgtggaaggatcacatgaggccaggagttcaagaccagcctgggcaacatagcgagactttgtctgtgctacaaaatatatgtatataacacatccaccccrctattctaatgattaagcctttgatagggacggggatcacattttccctgttatttacttgtttatttgtaaatgccatgaggttttgttttgttttgttttgttttttgtctgttttgttcactgctgtatcccyaatacctggaataatgcctggcacattaagtagccactcaatttttttaatgaaaaaaataagtaaattatctgtggattctcagtggtttatctcctctcttgccatacttttttttttttttaatttacgaaggtaaagttcattctttttgctaaacagttctgttaatttatggtcaaatcctccccttaacccttggcaaccacagatttattcttcatccttagaattttgggttttccagagggtcaaataattgaatcatacactatatacctttttgaatctggcttccttcacttggaatgcatttggagctcattcgtgttaagtgtrttaatagtttattcttacaagtggtattccattgaatggaacaaatatgtgaacaatcttacactgttttgttctttttgatttttagctttccagagtgttgaatcttccaccrgaaaacttgatcacatcaatatctgcagttccaatttcccaaaaagagttaagtataatacacttgtaacaatctataaaatgttgctgactttgttgatacaccaaaaaagcaaaaaagaattgttactcttcagtttgtggaatagtccttgaaattaactgtaagatatgattcattatactcagcctattactcctgttgacttaaataataaaattaaaatctgtattttaaatactctgatatggcagattgtgtattcttatgttcattattttagttatgctagtaactataattgtggcaaagtctttgggaatgaggttcaaattcaattctgtaacaataaataaaataactaaaattgtggttagaatctcagggtttttgaagggatattaaagattgtacagccatctggtgcttgaatactgttgtaccatatttatctactaggtttttaatgttgtttttgtttattgagtttccttttgagtactcccagtgatagaaaactgttggttaggactacacacaactaatagttgctttctcagttacagagaggtatctctttgtgagtttggtcatcctaaatgattcttgtttacgatttgggtagaaaacttcaatacttggatagattattgtctgtcaattaataatgacaagaaattagctacatagtagtcatttaagtcctaagctttgaaaagaagttaagatataattaccagtaccattctgtccttgtattttattcacttaactttgtcaggactttaagagtagaatgaatattcttctcagaatagaacaaagaagtaagtggaaaagaaagagaaaggctacatttggccttctagtaaaagcacctttaaaatggcccactgcggctttttatattgactttctgtaagagaggcagccactaccaagaggatctcatgattatatgtaaatagatgtaaccttccaaactagttgcctatttcgtaaaatctataaatgacattctgcataataagggaaatgttactggtttggtgtttgtttgttttgagaccaggtctcattctgtcgcccaagctggagggcagtggtgtgatctcggctcactgctgcctcaaactcccgtgctcaagtgatcctcccacctcagcctccagagtagcttggactacaggctcacgccactatgcctggctgacatttttgtatttgttgtagagatggggtttagtcatgttgcccagggtggtcttgaactcctgagctcaggcagtccccttgccttggtctcccaaagtactgggattacaagtatgaaccaccacacccagcctgtttgtttccattttcatttaatgtgtcaaaggtctttaataagctgaaccatcttggcccatcttttgaataggatttcctttgcctgcttccactttaacaatctgaggtattaactttagtttatagaaaataaatattggggccgggcacggtggctcacgcctgtaatcccagcactttgggaggccgaggcaggcagatcgtgaggtcaggagatggagaccatcctggctaacatggtgaaaccccgtctctactagaaatacaaaaaattagccaggcatggtggcatgcgcctgtaatcccagctactcaggaggctgaggcaggagaaccgcttgaaccggggaggcggaggttagagtgagccgagatctcgccactgcactccagcctgggtgacagagcgagactccgtctcaaaaaaagtaaataaataaattaaatattggggagggcctcaagatttttctggcctacaaatctgaaattcttcatattaagtttacttaaaacaaagggaacctctagtgctttgccataataaattcaggtttcctttacagtatgtaactaagcctaaccgttctatatttctaactttattccagagtgcttacaagtgccaggagaattaagaaatagtatttttgttaacatggtttaattaatataatgaattaatttactctgatctaattctctcgattttattttctgtctactatctgatggtagtaaacagaattaacaactttattataagccaatggctatcaagtctgtggatttcacactaaccaatatcacaactcctcagaattaatgggaaaataactattgctttttaaacttttttaagtataaagaatgagtgtacagggactagtttaatgaaccctgtgtgtgcccatcacccaccatcatctgtatgggaccagttttttctttgtttgtttttttgaggcggaatcttgctctgtcacccaagctggagtgcagtggcacaatcttggctcactgcaacctccgcctcctgggttcaagccatcctcctgcctcagcctccccagtagctgggattacaggcacacaccaccatgcccagctaatttttgtatttttagtagagacggggtttcaccatgttggccaggctggtctcaaactcctgaccttgggaggccaaggtagaaggattgcttgagctcaggagttcaagaccagcttgggcaacatgcgcctgcctcagcctcccaaagtgctgggattacaggcttgagccaccatgcctggctcagttttgtttcttttacacgccgtctgctttccttgtccacatttttttttttttttttttttttttgagacaggacctagctctgttggttgctgaggctggagtgcagtggcagaatcacggcttactgcagccttaagctcccaggctcaagctatcctcccatctcagcctgtcaattagctgggaccagaagcatgggccaccacacttggctaattttttaaattttctgtagagatgatgtctgcctrcattgcccaggctagtcttgaactcctcagctcaagcaattctcctacctcagcctcccacactagaattacaggcttgagccactgtgttgkgctctcctcatccacagttgtttattttgatatctactgcttttcatagcttagatgttttgtctttttaaaggttttatttttaaatgtgtttttctattataaaagcaaaacagataatcttcttaaggaaattcaggaaaatacagaagaataagaaaagataaaagcccccaatagtctactacagtaagacaactgattttagcaagttgatgtattttttacttttttgtttgaaatttttttagcgtttaaaaagacatagctataaaactacatagaaaaacataagatatttgaatccttttcctgacataattctgtttttaaaatgaatatcgcttttagcaatattgtaacattcccttgttgctagacatttagattgttttcattttttaatataaattttttttcttagagattgggtcttgctatgttgcccaagctggtcttgaactcctgagctcaagcaatcctcctgccttggcctcccaaatgttggaattacaggcatgggcccctgtacctggccaaagtgtaatacatagtaggctgctggatgatgtattaaggctcaggagaattcttaatggtcattgtggactgggtttttaaatgtgatgttaaccagaagtcacacaggaatttttagttatttccctgagtttcataagtgttaatgaaggaaataatttgtgccttctcaaaaataagttttttcattccagtgacagatgggctggataaataaagtttcaaccctcttactctgcccatcgagtctcattctctagttccatattaaacaccagaagataaattagtgtgagtagttatatagatgcttatatgttgattaaaaaaattttttttgcaccttgaactatttcaaacctacagaaaaattcatagagaatgatgtaatgagtactgtcatggtcactttctaagttgtcaagtcctttttccaaatttacttcaagtcttattttgtagggaaagggagagcttttgatttttgttaagcattacagataatgttgaagtcactgatatatatttgtttgactgcattccctaccctgcttccctagagagaactgatctcatgatgcaaatgatttattttcacgaatcagttgctttgtgtttgtttctttgtttttgtatttttttttcacctacccagtgaaaaggataaatggcattgtccatctctttaatgaactactgagtgttaagaagaatattcttctttttctcatgttgaaactcaaattacaacatttaaaaaatatgtcatttggaggtcagtggagaggtttgaattagaagcatgtatttggagtagtagaggaagcattgtagaagaggtaaagagacctgggcttttttctcartctgtttttatttgcagtaggattttaaaggagacatttagcttgccagacatcagttttcatgtctataaaataaggtggctagtataagaggaagaattttttgagactaggtsttgctctgtcacccagactggagtgcagtggcatgatctcagctcactgcaacctctgcctcctgggttcaagcaattctcgtgcctaagcctcccgagtagctgggcttaacgggcacatgccaccacgcctggctaatttttgtatttttagtagagatggggtttytccatgttggccaggctggtctcaaactcctgaccttaagtggtccacttgcctcggcctcccaaagtgctgggatctgtgcccagacagaagaggaagaattttataagatgataagaaaaacattctgaataaatactaggttatttctcattttcttgcttttaattttgttttttatttatttattttattttatttacttttttgagacagagtttcgctcttgtcacccaggctggartgcagtggcacaatcttgactcgctgcagtctccacctccaggattcaagcgattcccctgcctcagtctcccaagcagctgggattgtaggtacacacmaccatgcctggctaatttttgtgtgtgtgtgtgtatttttagtagagatggggttttaccatgtggccaggctggtctagaactcaacctcaggtgatccgcctgccttagcctcccaaagtgctgggattacaggcatgagccaccgctctcggcccccttgcttttaattttgaaagtacacataacaccttcttctggtaaaggtatgtctcaatggagaactcatagtgattagtctttgtttaacaactaatgcttttaaggtaacagttctatctyrkttcgatgtctgtctttagagaagtagctgattttcagctttctgtggattctttattggaaaaagacaatgaccattcaagaccagatattcaagttcaagccaagagactagcagagaaggtacgttagcactattatctctttttgacattgtaataaacttgttattaaaaaaagtactttgcaggctatctcagccataatagtgaatttaatagtgtttctttgaggcatcttgtgtaatataatttaaattcattttagccatgtactataaggttataatgatttttcagattagttataaagcactcctcttgagctgacattgttcaattttttgattaaccacttacaggaagactgaagtgttaattaaatttacagattgaagctggatggacttttgaatttaggagaacaagcttgataaattagagcagtgagttgcaatttttaaaatgagtttctgaaaagatgaacattgaaatatgagaagaaatgattagatgtaaatagaatcatgattacagagaagaggtggttagatgatttaataagcctctttcatttctaagttctctgatgggtttgatatctaacagaggaattgaaaggattgcaaggaattactaaacataaattgttagtgtaattccctcagaaaaggcagataatgttggacaaggttattaacatacatccacagagtcagtgtctgggaactcaaaagaattggaacaatgaaagtcactatcatagaaaaagatgcttatttaaagggtgactatgataaaggagcattggtagcttagtaaatatttatttgatcagaaaatcactcccagatatttaccaggaatagaattattcaaaatacagtatttagttccttttccccatttcttgtaagttcttaaaaataaagactagttgctctttagtgacagcagatatctcttcaagttccataggtttttcatgagatggcttcgaacatctaataggttaaaaagtgaaggcatatgcatagaagacaaactatctaaattacatcttatctgttggtgcaggtgctttagcgtagaccctgacagaatgtcatgttctgtggctctcatgaaagctaggtgagataaaaagtgttcatcgtatgtcagagtaggtagaatatgggtagagtgatttttcttacttgttacaaggtgaatttgaggggagggaaagagaatgaggaagagagagactgaatacagaatagcatgttagttgggaaaaaaagaaaatgtgtttacttaaatagaagtatggaactaaagagattgcctgagaactgggacccgatatagggaccatgaaagatgacttacttgtgtctttgtaagccaaaaatagcattagaactacctatctcattaggcctattatataacatacctactttgtgtgatttgttcttttcagctaagatgtgatacagtggtgagtgaaatcagtactggtcaaaggactgtaaatttcaaaataaacagagagctcttaacaaaggtaagaataagttaatatccagccattgtgctttcattctgtctgcttcagccacagtggtcttcctccagtttttaaattctttatgcctcctctggcctcaaaacctttgcacatactgatccataacttggagagtaccaccccaagttaacacctactcatcctttaaatcttgatatttctttggcagtagctttctgaccccttcatttatatgctctcatagcactgtatagtcatataccacataatgacatttcatacacaacgtgtatagatgatggtcccataagacaataccatatttttactgtacctttctgtgtttagatatatttaagtatacagacactattatgatacagttgcatacaatattcagtacagtgacatgctgtacaggtttgtagcctaggagcaataggctgtagcatacagcctaggcgtatagtagactgtatcatctaggtttgtataagcacttgggaggctgaggcaggaggatcacttgagcccggaagttcaagaccagccctggcagcatatctctacaaaaaaatttaaaaattagccacacatgatagtttgcgcctgtagtcccmactgctctggaggctgaggtgggaggatcgcttkagcctgggagtttgaggttgcaatgagctgtgattgtgctattgcactccaaccttggtgacagagcgagaccttgtctcaaaataaaaatttcaatggccatgaattttcaagctttattgcaattaacaaactaaagaatttttctgatttaaggatacccattagctcacttattaaaaatattcccaaatccttctcaattgacattgaagggacaagagtcagggctttgaagtccaactactctttctcacatgggaattcttccgtattgcagccttgaggatctgaatcttagtgagaatttgaataaaggagcaagcggactgcttacagttgccctgctcagtgtcacagtaaaatcagatcctggagcagtgagcactcatgttcagaaaaagactattgaatgtacctctgctttgtgttacaattttaatgataattcttctttactgaaaatttaatgtattctacatttggctgtcaacctaaaaggaggaaactgaggcaaaattaatataagtagagagtttacttgggccaggcttgaggattgcagctgaggagcacagattcaagttgccgtgaatataccctttgataggcagcagttacaagtggatttttaaagggaaagaagagggagtttgagttgttaaccagaatttacattaaaataatgtaagctattgataggctgtatatttttctttgtgtcacaaatgccagtaacatgaagataatgtgtgaggcagctagttgggaacaaaatcacataaaacaattgcccccacccataggaggaagagtttgtgcataactgatgtytgatatgcatgtctttctgggcctgcatacctcacatagctgagactactctgagctatttttcttttctcaagcttatagcatctgtttttctcacgtattggatctctagttttataattttaactgttttacagtccattttttaataagtaggataatactctaaaataatgattaaaagtaaatatataaatcactaacatagtcatttataatgaagtattatgtactgtacataattgtatgtgctatactttyatacaactggcagtgcagtaagttggtttacaccataagttttaggtctcagatgatggtcatttgcatggttttttttgagacggagttttgctcttgttgcccaggctggagtgcaatggcacgatctttgcttaccgtaacctccacctcccgggttcaagcgattctcctgcctctgcctccccaggtagctgggattacaggcatgcaccaccgcgcccagctaattttgtatttttagtttctccatgttggtcaggctggtcttgaactcccagcctcrggtaatccacccacctcaccctcccaaagtgctggcattacaggcgtgagccaccgtgccctgccatcatttgcatatttaatggatttttcagatcacatcaagaaaaaaaattcgattcttgttaggaccaacaaagaattaatatatctttgtttgagaaataaccataatgacattgcaaagaactgtcactttggtaccaaacttctacctgtcagtagcttgcagtactttcaagagaaactgtaacttcaaataatatttaattgttaaaagggaaaaaagaaagtatgatctcaaccaaataggaaaaattcaaacaaaaccctgttttcttagggatgcttcagaaatacacaatggataacatcattttatttcacgctttttaatttgccaaattaaactttgcatgtttaaccaaaagtaaaagaaaaagttaaatttaaaaatctcttaaaccgttcaaatcattgaagggtttaaataaaacagacttgattaaatgtttgtgctatgtaaaaagataattaggtgttattgttttgttatatagtcgtgtgttgcttaacaatgggatacattcatagaaatgtgtccataggtggttttgttattatgggacatcatagagtgtacttacacaaacctagatgataaaaccgactacacggacctaggccataaacttgtgcatcatgtaaaataccaaatactgtatttgtgcaattgtgacacagtggtatttgtatcttaacatgtctaaacataggaagggtacagtaaaaatatggtattaaatataaaagatgctatacctgtatttaccatgaatggagcttgcaggactggaagttgctctgggtgagtgagtggtgagtgcatgtgaaggcctaggacattacactactgtagacattataaacatggtacacttaggttacaatgggtttataaaaaaatatttttccttgtatcataacttcagaataaaataataaaaattaaaaaatatttttcttgcctggacatggtggctyacgcctgtaattccagcactttgagaggctgaggcaggagaatcacttgagcccaggagtgttagggctgcaatgagctaggataacactgctgtacaggatcacactgctgtactccagcctgggtgacacagcaagaccctgtctctttttttttttttttttttttttttttgagacagagtttcactcttgttgcccaggctggagtgcaatggcacagcctcagctcccacctccaccccccaggttcaagcgattctcctgcctcagcctcccaagtagctgggattataggtgcccgccaccatgcctggctagagaccctgtctctaaaaaataaatatttttctttcttcaatgataaattaaccttagctgactgtaacatttttattttataaacttttcattttttaaacttttttcttctatttatttttctttatatctcagcttgtttaacttttcagctgttttgtaataacagcttaaaacaagcacattatacaattgtacaaaaatatatccttattctgtaagctttttctaattttttaatttactttttagacttttttgttaaaagccaagacacaaacacattagccttagcctacacagggtcaggatcatcaatatcactgtcttcacytccacatcttgtcccactggaaagtcttcaggggcagtaacacacatgaagctgtcatctcctatgatgacagtgccttctggagtatctcctgaaggacctgcctgaggcacttttacagttaattgtttttaataagtataaggagtacactttaaaattatgattttaaatatagtaggttaaatacataaatcagtacagtcctttattattatcaagtatcatgatgtacataattgtatgtgctatacttttatttgactggcagcctagcctagtaggtttgtttacatcagtgttaccacaaacatgtgagtaatgcattgcactaggcattatgacctgctgcaacatygctgagtgataagaatttttcagctccattatagtcttaatgggaccaccattgtrtatatgtggttcatcattgactgacacattgttacttggtgcattactgtaggtgttgtttttgcagtggtatagctgacagatgagggcctaaaccagggcagaggaaccagttattaaataactgtaatgatatttaggagataacacacacagggcccagtgattaacaggtgattgattacagaggttgagggaataaggttaagtgttagggactcctaggtttctgagtaggttagttgggtgagtggtagtgcagtttgtggaaatagacagtgtagatggaagaacaagtgtattttctgtgaaatgcctgaaaagcatatccagtctgtagcaatagagagattaagtaattagtatttgaagtcttttttttttttttctttgagacggagttttgctcttgttgcccatgctggagtgcaatggcgtgatcttggctcattgcaacctccatctcccaggttcaagggattctcctgcctcagcttcccaagtagctggggttacaggcgcctaccaccacacctggctaattttttgtatttttagtagagatggggtttcaccatgttggtcaggctggtcttgaactcctgtcctcaggtgatccttctgcctcagcctcccaaagtgctgggattataggtgtgagccaccatgcctggccaagtatttgaaatcttaagggagtggtttaagtcacctaaaagtgtaaaataaaaagctagaagcaagaatggagcacagagtgcagagtcaagggcagatggtggaagaagagcctacaaaggaaattgagaagcaaaagttgagagagaattgtgtctttacaaccaaggaaagaggatagttgcaagaagggagtagtcaccaggtaagatgatgtttgaaaagtgtttactcctgaggaaggagggaaggaattaggataaggacagatgatcgaaagggacttcagccttatcttaaatgatcaattttttaaaaattattaatgttgcctttttgttgtttgtgccagataaatcagtagatagagggttattgttaaagagaattctaacttactacgattaactgttgtggagtctgccattcattacataaaaaggagaagaagtgggaaagatttgtagactttcaacttagaataatctgaatctggatttcttcttactgatgtgttcttgtcatatatattcttggactaataatactgggaccctagtttacgacagacactattctgtatactgtctatatattgtattaatcctttatgtgtttcttattgcacaatgtgagtcaagagagtattattttctctacgtccttgtgcacatacatactatttctgaaccttagtttttgcatccattaaatgggaaatgttgcccatctttaagattatgaggcttaaagacaacgggtactgtaggagcacttggtcttggacctagcactttatgcttcttaaatgtcgattgttatgtactggctgctgctcccttctctgcctgttccatttagagaccattttaaccaactctttaataataaaatttttcacaacataaaccacatttttaagactcaagatgcattttggggccaggcatggtggctcatacctataatcccagcactttaggaggctaaggtgtcaggatcatttgagcccaggagttcaagaccagcctgggygacagagtgagcgagagaccctgtctattaaaaagaaaaaaaaaaaatttttttttttttttttttttgagacagagtctcactctgcgcccaggctggagtgcagtggcgcgatctcggcttactgcaacctctgcttcccaggttcaagcaattctcctgtctcagcctcccaagtagctgggactacaggcgcatgccaccatgtctggttaatttttttttaaaatttttttagtagagatggggtttcaccatgttggccaggatggtctcaatctcctgacctcgtgatccacctgcctcagcctcccaaagtgctggggttacaggcgtgatccactgtgcccttccaaaaaaaattttgttttaattagctgggtgtggtagcatgtacctgtagtcgcagctactctggaggctgaggtggtaggattgcttaggtaggaaggtcgtttgagtctgattgaggcttcagtgagccgtgattgcaccactgcactcagcctgggagacagagtaaggcctgtctcaaaaatataaaaataaaagtaaaatatagatgcagttagggaaacaaaaccaactaatatgagtaaacaaaagttcatcaccattaacataaaatatgaattttgtgaactatatatcatagttctatgttaataactaaaaactaacctggaatatgtttgggaagtttctgtgggatttccttgtttctcacttgtgtagccaataggcattatacatttttatctttttcctaccattgcttgtggtctttaatatcacaaaagctgcagcagcatgcagcagttaacaggttaactgtgaagtggaaaagttcttttctgcactatttaatccctcagtacttttctttctttgttaaaatagttcttacctctatggctgtcgtgaggagtaagtaagttaatgcatataaaatgcttggaacagtggctggcacatagtatgaactcaataagtgttaaatggtgcttctggttttgttgttaatatttactgtgggacttttggttgttactttacttcaccaagcttcagtttccttctctgtaaaatacctacataactggttactgtaagaatgaatagacatggagtataaaagggcacagaacccttgtaaatgttaactcatgttactactatgactagcattagtaacaagaaaagtggtgctggaggtagtgccactgaggatgctaagaaattctcagttccataaattagagtgaacaaattggcaacatttaattctcagtaacagagtaattaaaagcattgtaatttttgttcattaaattacagtcctttaattttcagacagtgctacaacaagtaattgaagatggctcaaaatatggattaaaaagtgaacttttctctggacttccccagaagaagattgtggttgaattcaggtgagggtgcaccccttttatgtgttgcttaatcaagttgactgggcagaggagtgttattaccatcattatttgggggtcttaataaataacatgtggaaaacttgaaaaccagtgcaattatgttatttcttgaaatcacagtgaatcaatcattgaactgtgaataaaaaatatatttttggacctccaaaaatgtctaataattattatttttttaagtattaacaattacttttttggaagaactagttattcactttatttatttatttatttatttatttatttatttatttatttatttttgagacggagtctcactctgtcgcccaggctggagtggcgagatctcagctcactgcaagctccacctcctgggttcacgccattctcctgcctcagcctcctgagtagctgggactacaggcgcccgccaccatacctggctaattttttttggatttttagtagagacagggtttcactgtgttagccaggatggtctccatctcctgacctcgtgatctgcccatctcagcctcccaaaaagtgctgggattacaggcgtgagccactgtgcctgactagttatttactttaatagactgttaaggcagaggtaatggttactaccatattaggaattttaaagtggccagacatggtggctcagcctgtaatcctagcactttggaaggcaaggtgggaggatcacttgaggccaagagttcgagaccagcctgggcaacgcagacctcgcctcttaaaaaaaatagaaaaattagttgtgcatggtggcacactcctgtagtgacagctacttgggaagctgaggaggaaagatggcttgagcctaggaattcaaggttacagtgagctgtgattgtcatgcactctagctctggtaagacacaccaagaccctgtgtcaaaaaaaatttttttaagtaatttgattaccagagaaacaagtcttttagtatttgtaataaatgtattttttttaattaccagaaaaatagcttgaagttttgatgtgcctctaaatagtcttcataactttctaacgtgctgtcagtataactgtctgatatttggactgttagaggtaaccaagagagaaaagggaacactaagaactaatactttcattgtacagccgacagattgacaaccctaggaaattatcagagatgttgcatttgtcttcctaaagctgaagaacagtcttgatggactgtttttctacttagaaagatagaacttgctaagagccttttgtcttattaagtatttatgtctgtggaagatttttaaaaattgatatgggaagtattatctcatgtttactaactcattattgcagtttaatagcttttaaacttagttatgattagctcctggacaatcagagaaagagcgggttttatgcatgtgtaccgtctgccactcacttgtcttcttaaagaaggcagaccctctaagagcaaactcatgaatttgtaataaggaccaattactgattaagcttctactcctatggagtagacacatattatgaatgactctaaaactgccagtacaccacaattatgatttttaaagttgagtttaaatatttgttgcatcacaaagagtagagggattcctacagtcatcttcacactagagaggaactacactaaggccatctcctaaggaaatttgcctgctttatctccacttgaataagaaaccactgcaaaccttagtgtagggattgttaaacctaagcccataggcaacatccagtttgccgcttgtttttgcaaataaagttttgttggaacacagccatgcacatttgtttacatcatctacattggctgctttcatattgcaatggcagttgaacacagtagagctgagttgaatagttgcgacagatcagatggcccaaaagcctattaaaatatttactctctggctcttcaagaaaaaaaaatgccagcttctgattagtgttttaaaacaacatccattttggtacttatgacaycatggattaggaaatggggagagaggggtatttcaggccagtggttcttctacttgcctgaggtcacttatgtaactgyggtcatctagagactagtggggctacaaatcaaaaatggctctttacttctctagccaggcatctctctctctcccaccacattgtctctcccgcagggtagcaagacctctttacaaaggtactcaaggctctaagatagtgaaatcatctagtcttgaaacaggcacagcatcatttttgtcactttctgctgatgaaagcaagtcacaagatcaccccagattcaagggaagaaaaatagagtacatctcttaatggtgagagaagcaaagaatttgtggtcatctttgattattttcattcatgtctttaaattaaaggacatactgctttcttcactggggaggcacttcattaccatattactcttaaacccctttcaattacctaacyggcaaataaaggaaaatcagcagggaggtaatatattacctgttaccrtacattcatccttgaaataatgccattataaagtttcctaaaatttgaaaagttgccaccattacttaccttcttttgcattttttttttcagcttcaccatctttttactccagctaagctctagaaatactgtggcttcagtcttccttactcattgattccctggctttcctcttaagttttggtttcccatatactgctccttttttttatgcttttaaaaaatatctaaaaataacctgttctatgtgagttgtattctgtaggctttttgtatggcagttaatttgcttatggatttacctctcttagcttttttctaaagcagttaaggaaagctggaatttaaatgagtgtctgaatgctggtgaaggcagagcctgtctatctcctagcagccatctttgcctctgacagttcacatgtggcattgttgtgagaccattgcttctctctcccttagaggttttccaggtgctatagttcttgctgttgtgatttcaaagtagagacaaaataggtagggacaggaagattgttcttggatttcttctgaaaatgagagaggtgggagaagagaatttttaaaatatgtagtatcctgaacagaccaagcaacattccccagaaaacaagagataccactgtgctcaagaaactttctccctaaattgagttgattatgataatactagattaagtaacttgcccaggttcacagagctaactcttgattctgaaacctgtatacttaacttttactgcctccctggtacgtagtgtaggttgtcatatattttgtctgatttaggagcagtgtgataaagtacaggataaatggctgtccatcatagatttggactcctcgtggtagatggtgtaagacttgaagctaattactgtttcctctctaatctctctctagtcagcctctcctattttgtacaaatcagctctgtaagatcatgggaagcagtggtagccttttcttttcttttctcaacatgattttccccaactcctgctgttcccaagtgtgagacactcttctcgcaaaacagattggagacctctggctggtaaaatgagaattgtggaggtcagggtagcagttctgactgttagtaactggctcagtgatcttgaatgggacagtttatttctctggcctcttatctggaaaataagagtaatctttttttttttttttttttttttgttgagacggagtcttgctgtctcgctcaggctggagtgcagtggcatgattcattgcagcctctgcctccccggttcaagcaattctcctgcctcagcctccccagtagagtagctggactacaggcatgcaccaccacgcccagctaatttttctatttttaatagagacaggatttcaccatgttggtcagkctggtctcaaactcctgacttcaagtgatccacccagctcggcctcccaaaatgctggtattatagacgtgagcgaccatgcccggccaagagtgatgttatctgtcccttcttaacaaaaattaaggaaattacatgaagtaatttaacaaaagtcccagtaagatgcccaaattataattcataatagctacttcagttgccaaaagaattgaatttgtatcttccatttcattgtattcccttctcagtagaaatatggtatcagagagaagcaaattgttgatttcaagggacattttgtcaaaacttgaagacctggatagattcaatttttctaataccggagggaaaatggaaagctctgtgaaagtttttttttgtttttgtttttgtttttgtttttcttaacagacattataaatacctagttttttaaaaattcagagattacaaagagatatttaatgaaaaggaaagctcttccccatctcagtttcctctgtgggtatytattaatccgaatatcagtgttttattcaccctcctagagatgttctatgcatttgtaaacagactatacatattttacattgttttcacttcttgctttttttttttttcttaaataatgtattttatgttcctttaatatgaatgcatccagggctggcttattatttttattgttccattgtattctattctttttttttttttttcttaaatcggcttcatygagggataagtacatacaatacttatttaaacatataatttcaccatatttaaacatataatttgatgagttttggcaaagatatgcaagttgtgtaactacctccacaattatatagagctgtttttctggggttttttatttctattgattttttttgctttacttttatctgtattattttcttttattctgcttgctttggatttagtttgctctactttttctagtttcttaaaggagaagctcagattattgatttaaaaccttttttctartataaacatttcatgttgtagatttttctgctttagctacatccaacaaatgtactagtaaggcagcaatgtggtgcagcgctaggactccccttgtttgctcttctctcagacatcacagtccttcactgactattgtccagattcataaaatcagtgtttcatctatttttctggctttctgattatttaaaggcagaagagtaaatccaatcttcttttggctggaaatggaaggtttttttttaagcctttaagatgacatttactttctttctaaacaatgattaaataaatacgtgtgtagtttcataatttcataattgtgcacacatatccataggatcaagtttttaaatcgtagtacccttaagggtgtataacaagactttggagacagaccagaatttaaactctagttttaccacttttaaccagctatgttcaagttaatttatctttttttaaatattgaaaaacttatgagattttcaaacatgcacaaaacagggaacagtataattaacccccatatgttcattacacatattcaagagtcatcaagatattgccatatttgcttcatcatctctcttcgttgtcccagttccctcatctgtaaaataaaagataaaagcacatatgagtattaaatgagttaatgcccatgaagtgtgtgaagctgtgcctgtcaggtagtgagtgctctagaagcatttgctatgttaaatgattgattacaacttcttgagcacacacgggagtgataaatgtgttgattgggaatttggagtggtgagccacattctgattgttctgggaggttttatgcataaatatttttacatgtttttttttttttaattttacagacagaatcttactctgtcacccaggctgaagtgcartcatcgtagttcactgtaactttgagctcctgggcccaagctaccgttctactttagccttctaagtagctaggactacaagcatgcaccaccacacctgactaatttatttatttatttatttattttattttttatttttatttttttgagacagagttttgctctcatcacccagactagagtacaatgtcgtgatctcggctcactgcaacctccgcctcccaggttcaagccattctcctgcctcagcctcccaaatagctgggattacaggcatacaccaccacacctcgctaattttttgtatttttagtagaatcagggtttcaccatgttggccaggatggtctagaactcctggcctcaagtgatccatctgcctcggcctcccaaagtgctgggattacaggagtgagccaccacacccagccacctgactaaaaaaaawtttttttgtagagacagtcttgatatgttgcccaggctagtctcaaacttcwggcctcaagcagtcttcccatctcagtctcccaaagtgctgagattacaggcatgagccattgtgctggkggtatttttacatttttaaattttgatttctgatacagtaaatactagcagataccacttacgtgaatgctattacttcaggagtcacaagatcaatttcattaacacaatgtcaaaatttcgagttctaatttatctttgctctaaatttttaacttttaacttatctttgccctaataccaaaggccatactccacagttttgtcaaagtatggaggcatgacctagttgattcttagaagtcttaagtcttagaatagagaaatgtttcccattttttttgcagttcacctaatgttgccaaaaaatttcatgttggacatttgcgttctaccatcataggtaagtgtttagtttcacataaaatgctaaacgttcctttgaggaagtatttgatagttcaatttaatgttttaatgcttaaataacaaaatagcaaaaaacaaaaagtttaaatttatatgagcctcctgccaattcargaaatggatgacattggttacactgttttgtggaaacacaaaattgatttcaaaaccaaaagattcactgagaaactaattttaactgctatatatgttatgatttttaactttctaaaaataagtataaatatggggaagacctgaaagatgcaaaagtaaaaatagttatgtggggatgtataacctttcagatttttttgttcatttattttgtggtttttttgtcacttaggctggagtgcagtggcgcaatcttggctcactgcaacctctgcctcccaggttcaaaggattctcctgcctcagcctcccaagttgctgggattacaggcgtgcgccaccatgcctggctaatttttgtatttttagtagagacaaggtttctacttaataacaatttttgtcaaaattaaaaaacacgaataacaatttttgttaaaaattcacctcggtcatgtgagcacttagtggaatgttcaagactggaagttaaaacaagactatttctggccgggcatagtggctcacacctgtaatcctagcactttgggaggctgaagcaggcagatcatttaaggtcaggagttcgcgaccagcctggccaacatggtgaaaccccatctttactaaaaatacaaaaaatcagctggtgtgatggtgtgcacctgtaatcccagctactcaggaggctgaggtgggagaatcgcttgaaccygggaggcagaggttgcagtgagctgcgcaccactgcactacagcctgggtgacagagctaggttctgtctcaaaaaaaaaaaagaaaagaaaaaagactatttcaataaatagagattactatatagtacttcatagttgtaatgcttcagtgtataatatacttacgattttcatttaacacatgtcatacagcaggtcaatttaaaaactgaaattaaaattatataatattagaattggaagggactttggagtttatctcaatctaatctcacttccaatgtagaaatctgtcctattgcatgcttaagagaaagttgtttaacctgtacttcaatacttttcagaattggagaaattagtacttgtggcatagattgttgtgcggtcagctcttactgttcttgagcagcattttaagagaagaaatgacaggacttgatgaaaaagtataagaaatatacagtataaaaaaagctatatgagtaagtcaaaagtataggagtgagtaaatgatgggtagggtatgataaagttgttttcacagttgagggaaatatttggaccagttagagataatatttgagaacttaacatgctgtgtcttcatgtattatatcattcaattttataacagcccagtttggtaaatactgttaactctggtttatggatgaagaaattcagcagccaaaagtaactttcccaacatcccaaagtattgtagccaggatttgaaattaggcagtctaattccagaagtctaggttcagacatttaattggatttgtgatataacaaggggctaagaaaaaaataggaatatgccatctgtgtgccagctggaaaaacaggttccagttgcagggactttatagattgggaaagtctacaactagggaagctggaaaagaagatagctgcagtagtttaagtcaggtatggatattggtgagggtttatttgcaaaaaactaaatccattcttagtaaaggcagaagaggatttattgtagaatattgaatggtttacaaagttgttggagggctgcagaagctttggattaagctgacataaataactcccaaaactgcactatggaaccttgtcatcaagggagctcctgcctcttctgcaatcccttgcactgctctagaaccatgctgccactgccatggtcaagaaaatgccactactcctgccatgccatctagaattcatacaggcataagaggcagccccatatactttcaatttctttggtggccatcatggaatactaggacctctgttcatggtgtcacaaaaaaacacagcccccaccactgtgcttgtcataaaaaaatagaagtagctccccttccaaatcttacagacactgtatctgattgcccaaacctagaagactactggaactctaaccacaggagactctgggaattgtactttttacattttcagcctcggcagtagatgagggcacccaagaaggaaagcagaatagatgttgagtgtgaaaccagcatcagcagtatgggaaagtgaaggccttagattattacatgctgttagggagcaggcatgcagagggtagatgttagtgattaaaaggagatagaatgagctatttagaaaacacaaaaagggaaaatacaacagtgaggcttcggttcttagggcacagacaaatatatttcttgttaattactgggattttttttttttctcttcttraaattgactagaatagcagttactctaacatgtcctcaaatcctattaataatgtaggtgaaagttctgttactgtgaaaatgtgagattctttggaataactgccctacaagtaatttcttactccctttccataacacatgaaaacacaatgatgaatgttttagtaaaaawcattgagttggtaaatttagtgaaaagaattttctacttatgctttgataatagagaagtacatggttcttatgtcaaaaaatggataacaagaatgagaaactrtatactttattgattactaggaaattttatagcaaatctcaaagaagctttaggacatcaagtaataagaataaattaccttggcgattggggcatgcagtttggtaagtacacttgagattttatttttcatttcattgtaaaattcaatttgtaaaaacttygatctggacagaatataggcagaatcccattggatgaagtagtatgtcctacctattttttttttttttyccctaatggctcttttgcataaaatcttctatttatttgagtaattctcaccacacaagttacctttggggaaggtaacttcacacattcaaagaagacctgggccaggcatggtatttcactcctgtaatgccaacactttgggaggccaaggcgggtggatcacttgagcccaggagtttgagaccagcctgagcaacatggcgaaatcctgtctttacaaaatacaaaaaaattagctagacatggtggcatgcccttgtagtcctagctactcggaagcctgaggtaagaggatcgtgttagcccaggaggtcaagactgcagtccactgcacccagcgtggttgacagagcaggacsttgtctcaagaaagaaaccccagagtaagacctgatgtaggcttttgtggttttaataaagagaaattgcctacttttattagttaaatgtagaagtgagtatacagggaagaagtaagtctaactgtgtacacctttctcaaccacagccctgccatttttcaatctaaggacatccagcctccctgggccattctacatgaagtaggatcccctgttataccatagccagtggcccagaagataagcaaagggtgatactttgtcttcccctttaactgtacagtgagaggtaggagtgggttggggaaagtccaaaaggaaaagagaaaaagagaggagtgcgatccaaacagttaagtactaccacaaattatctctcatataatgastttactcagaaccattcctaattcatgtaaaccagtaatcaaggtgtgagagggcaaggtaaatgaagttgttatggtagtgaaggacggggtagattgtgaaatacaaacttaaaaaaaaatctgttgttaccaccatgtgtattttaagaaacagctctagtatcatttctataaagcattctctgacacaaagacacacccttrcccatcttctcacatcaccaatttcctggtatccagctctactcaagtatggtaaggctcctgtcttatgttcttatttgtgtgcttccctgccctactaggcatgttccttgaaggcgtggacttaacttttatatctacagtgcttgtcacataagaagcactctaagaagagtagaccttgaacctgttaacagaaccattactgttcactatggaagaatcagaatacatgccctgcatttaaaaaatcaacctgtagttcacaacagctggtagtcakagggctaggccctaggctcaatagtcagacttaatagatrgcactgatttttattaatttgaccgatttagacatttcagaggcattagcaaatatgtgattagggtattcattaaattttagctgcaggatttcgttacagcagttttttctctaaaggactgctgtggttaatgatctgtcagcatttccattataaccatcactgttaaagaatatttttgctgtttcagctatctccatttgaaagttggcagtttctaagcacagaattagtttttgaaaatgtattaggctgaatgttaaatggaattggcccttacttttcccatttttgtgttttggaacactgagcatctttccacacactgctccaaccaccctgaattataatcacatttgctcttgcttgaaagttaatagagcttcagtcatccttcttgttcctaagttccaaagtattgtatattcctgtgtcctgtgttcagtcacgtcccactttctactgaaccttgaatagaaaaatgtgtatcagtaaagccctttagatctgaagcttggtaattgatatagaaataaattgttttttttttttctttctgagatggagtctcgctctgtcacccaggctggcgtgcagtggcaccatctcagctcgctgcaacctccgcctcccaggttcaagtgattctcctgcctcagcctcccgagtagctgggatcataggcatgcaccaccatgccaggctaattttgtatttttagtagagacagggttttgccatgttcatcaggctggtgtcaaactcctgacctcaagtgattcgcccacctcggcctcccaaagtgctgggattacaggagtgagtcatcacccccggccaataagttggttttgtttttttgcttttgtttttgtttttgtttttgtttttgttttgagacagagtttgctcttgttgcccaggctggagtgcaatggcgggatctcggctcacsgcaacctccgcctcccaggttcaagcgattctcctgtctcactttccctggtagctgggtttacaggcatgtgccaccatgccaggctaattttgtatttttttagtagagacagggtttctccttgttggtcaggctggtctcaaatgcctgacctcaggtgatccacccaccttggcctcccaatgtgctgggattacaggcatgagccactgcatccagccataaattggtttttaaagtaataaaactaatgttcctcttttttttttttattattttatactttaagttctagggtacatgtgcacaacgtgcaggtttgttacatatgtatacatgtgccatgttggtgtgctgyacccattaactcgtcatttaacattaggtatatctcctaatgctatccctcccccctcccaactaatattcctcttaacccaggctgcatatatcctttctaacggaagttatgatcatctttatgcagaatatcttgagtctacatactcccagactgtactaggaattttgatatgtagtttaccaacctcagtttttggtgtttgggtttttttttttctttttttttttaggttcaaattaacactatccctgaactctgaatttatcatcaaagactaaaaaattatacamagtcaaattaaagatttttgttgcttggctaccttgaacctgagaaataatcaaggatgttccaagttttaccttgctgttttcctccaattttgtttaagaactaatataacaacaaaaccattgctgtcttcgcattaatgcctacaagtttaaaaagaaagtttgaaaacagtttccatcagtttttttaataaattttgagtgcctagtgtctagcttcatgatgtcacttcaacagagtagatgcttaataaatgtttattttttaatgtctgctagggtggtgttcagcactgttagtacaaagataaattagtcctagactttacctttgatgagctcataacctattggtttctgtgagcttaatttcagtgatctattcagtatgttgaatttatgattaaatatattgaatttgacttgtgtcagwttatggggtcatagaaggtaaaagtgtgttttgtaatacttctcaggatacataatatgacaggttggtctttttatagaattatacctattccctgtcatgcctattctctgttgttcaactttataatttttcatttacggattatcatggtaggtcttctgggaactggcttccagctgtttggctatgaggaaaaactgcagtccaatcctctacagcatctctttgaagtaagttggcaagaaaacatttcaaaaatttttcagagtactatgtagcttagtaacatgtttttaatcccagaggtttatttttctttattttgagacagggtctcgctctgttgcccaggctggagtgcagtggtgcaatctcagctcactgcaacctctgcctcctgggttcaagcaattctcatgcctcagcctcccaagtagctgggactacaggcgtatgccaccataaccagctaatttttgtatttttagtagagatggggtttctccatgttggccaggcaggtctcaaactcctgacctcaggtaatccacccaccttggcctcccaaagtgctgggattacaggcgtgagtcaccacgcccagcctccagaggtttaaaaaatatgttctttaaaacaaggaaccaaaacataattgaaaatgttgcttttggctgggcacagtgactcacacttgcatcccagcactttgggaggccaaggcaggaggattgcttgacaccaggagttcaagaccagtttgggcaacataatgagacctggcctctataaagtaataaaatattagccaggcacagtggcctgtgcctgtagtcctagttactggggagactgaggcaggaggattgctagaccccaggggttcaaggctacagtgagctgtagtcatgacactgcactccagcctggacaacagagcaagaccctgtctcagaaagaaagaaaatgttgcacttattttactaggttatttttatttcctaatctaagattttttaaatgtccttttagttgatttgggacagtatttcttcaggtatagaatctttttagaataaacatgcaagataattattcgacacagaaatttctcaattttctgtcagttaatatgtactgcagcttttttcgtggtaataactgtatatcaattagacttgaaaaatgagtatttttgttctttttctggtgtgggggacagcatgtctatttctctctgaaattgygtgtgctttttccatttacatctttcacctmcttttcctggcttttgtccaaggtgaatttctgcctactctatttcatttagtcccttggatactttgcttctttatcttcagttcttcctgaagtttattaataaagcccttcctgtccaaacaatctccagggatgtgtttcctttttgttgtccctgttgttatctctgccgtttctgggcctcacagtggaaacrcggatacgaagtcagccatattggtgacagatcaggggatcagactaaacatgttctgcttgtgtgtgagaaaaagcacttgcaaaaataatgctttacttctccagcttaagccacagagggtgcttcatcattttcctgttaacgtgattttttcctgcagctggctttgcagttaaattgaacaaaaacatattccagttttttttttttttttttttttttgaggagtctcacactgttgcctaggctgaagtgcaatggtgtgatcttggctcactgcaacctctgcctcctgggttgaagcaattctgcctcagcctcacgagtagctgggattacaggtgcccagcaccacacccagctattttttttttgtattttttagtagagacagggtttcactatgttgtccaggctggtcttgaactcctgatctcatgatcagcccacctcggcctcccaaagtgctgggattacaggtgttagccaccgcacctagcccatattccagttcttaaagacctttaaaggtttgccattttcccctgagtccatgccaatactgcactctaaatgactgcattttgatttatcatgttaaccaaaagatttcttctctctttcccattaagagttttattgatagggaggaatataaaaattaataattcttcatggttgtctataaagtatgttcccttagtgcctggagtttttactgtatttatttatttatttttacacttgaataattttacctcaagcttaatctttcatgagatccaggcccacagatgttatatgtaaaaatgtttatttagaaatagcatgcttgttcccyggtgccacaaagaaatagcacttgaacataaatttaattatctcagcaaggccatttttactctctgcagaaagggtacactcgccagcagttttgccacgagagtataccgaacaaaggagacagggtcatttataacttgacacatccaccttactgctgtgtctggtttccattggctggaacggaacctcacattctgtatttgtcccgattggctagcaactttaacttttcaaaagaggcaaaggcaggggagaacaaaggaagcaggaagtaacttgtgaaatgctgagaaaggtaaaaacacctccaaataaggaagaggaacaggctgtcacctaatgcttgcttggaccaatgtaagcatgccaaggcagatatttaggctaaattgtaggagctaagaacacaaagtatatygatttctttattayggctagcagatatttaaggatgttatgacaggtctttgaataaattttacttctaagagaagtcactatttgtccttaattagacggggaggaaagtgtctttgaaggggaacctctacttcactttttacacagagacaccccatgttgcagaaaatacaaatacctgcttggagaccttgtgtcattgatttagagtgcagcatgacatgtgagagttattctttttatctttcttcttccccacctcaaaagtttttatttaatcttgcaaatagtaaacctttgtcttctatgacattttatttttatcttttatttatttatttattcatttatttatttatttatttatgtgagacaggatcttactctgttgcccagcctggaatatagtggcacaatcacggctcactgcagccttgacctcccaggctcaggtgattctcccacctcagcaacccargtagctaggactacaagcacacaccagcacacccaactaattttttgattttttatagagacagggtctccctatgttgcccaggctggtctcaaactcttgggctcaaacagtcctcctgcctcaaactcccaaagtgctgggattataggtgtgagccaccacayccaacctattttttaattttttaaatarcaatagggtcttgctatgctgtccaggcaggtctcaaactcctagcttcaagtgatcctcccacctcagcctcccaaagtattggaattacagacatgagccactgtgcctagccatatataggtgtasgttttgtgggtttttttgtggaggtgaagtctcactgttgctgaggctgtacaatattttaaatatttcaggggaatctgtcttcaaactccacagaaacctaagaatatatttctttctatgcagtttaatataatttcctgcctttagagactcaaaaatagtggaagatcaacatctatgttagaggttatttactgatgggtacacatatggaaggaataagggcaataaggtacttctgtgaataactaaaaagtcgaataataatggtgttgctttcattagtgttcttttgccgaatagattcactgggaaactgcatttaaagacaaaagaaggcaagatacacccactttgctatttgtaatagacgacaagaccattagagtattcagttgctcttttccttctccttttgcaggacagaaaatatgcaaagcctaaaatggcagcctacaggttattatatatgcaaattttatagactctgttttcattttaaaattacatttgtcactttggattactttcaaaaacaactgttagcataaatgaggaatttttttgagctttaagcaaatgttgatgttattctgtttctaaaagaaaatctgaatgtcaacaactcaatttatttaataattgaaagatgcctttgcttgccctgcaatgtcacaaatagcgtaggtggtaatacagagactctgccccatcgttatttctggtcaccagaaaggtgaccagaaagtcagagatcgtgattctatgcttggaaagtgcttggtgtattggtaaataatgttggctgatttattcgaaggaaaactttaagataatctgcatttactctttcttatttgtgaaaatctgttttctcaaagctttgatggaacccttgttttttttccatatcaagttgtagttagtagtgagctctttgagaggaaggaccatgtcttccttaccttccttatccacaaccctaaatattatggcttgcagtaaatgcctgaatgaatttgcttttatagttctcttttgcccccttttctaattatatataakttgtggaatataaaatgtattgtttgtccaggaaataagtaactattataggatacactaattaccatttgtcagaatttaacttactttgttaacatagtttactgcagaggaaaccacaggccaaacccaggattccggcacaggtagtctggctcctgagtgctctatgcagtgaatgtccccacacccccactatagaatggctttatgaaccattgatttccattggtttaattatgtacatagaattttcctttctttcatcccttgagttgctataccagggacacaattagtagtttagttttggcactttcaaccttctggcatatttgttttgaatttggcataggccatccagtagcagattttatggcctgccttcctctaaattgaactatgatcagtattctctaaattgcactataatcagtattagtatattcagtttctcagctagcttggaaatgatattgtatgatagtttcagaatttctttgatgaaaatatttaacacccacagtcatttattgcatttccattttggtgcatatgcttcactagtggtttttctctgtaccttatagcattcttttcccatgayatctagctgttttgtacgtgggacctaggattttgttggcaagcatttgaaactttttctttaattattctaatttggtttttttggttacaaaacagggaagtagttttgttatagttcctcttcccttgtgaattggctgttaaataactaatatattttttttatttagaattcacattagtgattcaggaaaacatttgcaataagctttagacaatatatcaaaaagcctttccacttatattgaaaagtaatttctttttttttctttctttttttttttttcgtgatggggtcttgccctgttgcccaggctggagtgcagtggcgtgatctcagctcactgcaacctctgcctcccgggttcaaatgattctcctgcctcagcctcctgagtagctgggattacaggtgtgcactaccacgcccagctaatttttttgtatttttgctagagacggggtttcaccatgttggccaggctggtctcaaactcctgaccttgtgatccgcccaccttggcctcacaaaatgctgggattacaggtgtgagccaccacgcccaggcaaaaagtaatttcttatggtaaaagttaacaagtgttaaatctgaatcatggatatgagggtgtcatcatttacttttacctatttaaataatacttttaaaggtaacttatcaggcttccttttagatttaaattatttgaatagactttattatctaacagtatctctaagcatattaacctttttttttgctatagaaggttttattaatagaacttgactcattgcatattgcctattaatatggcttttgtaaccatagccattcttatgaaatgtaagggcagcctcttataagagataaatatcatgccaataaaatatggattagcctgtatcctagcactgacattaaaaaaggttacataggccaggtgcagtggctcacacctgcaatcctagcactttgggaggctgaggcaggtggattgcctgagctcaaaagtttgagaccagcctcagcaacgtggcaaaactgcatctctacttaaaaaaaaaaatacaaataattagctgggcatggtgatgcatgcttgtaatcccagctactcaggaggccgagggacgagaatcgcttgaacccaggaggtggaggttgcagtgagctgagatcacaccaccgcactccagcctgggcaacagagcgagactctgtctcaaaaaaaaaaaaaaaaamaaaaacagttacataataacacaaatagtataaaaatttctttaagttcaaaatggcctccaaaggttctatttcagtatttctaccttgcccctttctagcaggatttaaggtaattacagtgatgggcatttaataaaagaaaaatagtgaggggttagtgtatcactagataatttacgtaatagttttgaccctgagcttccccatatcagtaggcaaaaaaaaatttttttaaayaggacaagatcaaagcaccgattcaatgagtgataatgtttacttgctctcatttttaaaaacatggaattagtatctattcctcaagacacaatgtttttcctaactttagagtctccaatttctcaactttaagtaaataattcaagactaaattctcatcatatgtagggatatttatgcagttgaagtttttattttatgaaaaattgcgttcaagatttcatcattgttttaagttacatttctttttccagggaatgttactgttatggctagtatgaattttgttccttaataacatttatatgtaagaaatagtttttaaatgataagaaaatctgattccagctatcayttgtaagagtcagtgtaagtcattgataagaatttcccacctactaaatcatgcaaagttccccaggctcttatgtgtctcctaggacagtcctagaggactcttcttgtcttcagtgcacactggtctcttacatgtttagtatcccagcctatgtgatgcttggaggcatgcagctcttcttgtgtgacaaacattagctggtggtccttgccctgtccacaggtctagagacaagatcgctatgtagacacaccgtgaaccatttcccactgtgggcctgcaccaccccaggggcttcctagcttctgctcttctggaagtcttccccatctcctccccattccaggtaattctcctttcctctatcctggcagtttctccacttggccattgctccctgctgtcccttcccaacactgcttgcttttctactctctctctgcttatttgggacagcactacagtgtgtcattgtcctcttagtcttcctcttagaatgagttttgaaatacctagcaagaacaaagtacacattaatagctgagtaaatatctgacaccattgaaatgtgcaaaaaatacttttatcagcatgagaaatgttaacatttattaggtgcttgtgtgtggtgctctacaaggagttaataattatcatccctgaataaagatgtaagatataatgaatgtggttatgtatatacatagagtaaaagtaggagattctaaatatgaaaagattaatggaaggtgaaatacagtttatatcctactactaatgtattaaggaggagaaatttgataactcatgaaatagctcaagttagttatttttttacctaccacattttggctttattattaactgtttgcagtattgatacattcaattttaattatataaacacatttgaatgtctttaatttttcatttcatgttcggaatcaactagcagctaagaaatttctgatcagtgaaacagcattaaacataatgaagttgttcaaattataatcatgaatatttttacatgttcttttctaaactaggtaaaaattcagtgcattttaagatgacataaatatatgaaaaaagggtctgtggtttctaagttttgctaaccatccttagcagttattctcagtatttctaagataagcatggctagaagtggggttagagccccacatcaaggagttaaactgtgcccatgtggctaatggtattctaggatcaaatttaaagggataagaaaggcttatcatactacttttaattttcatgcttagttctttatatttgggcagatcagcccaagagcttactgtaattatctgagttaaattcaaaataaaatgttacgctatttggcaggcccaacatctagaaatagtgaaaagggaatgttaattttttttaaggaagtctgagacatttagtttattccctaaaggaaacacaactggtttttgtgttttcttctaagagaaaaattgtgtttccatcctcaaaaactttactaagccatgctgccttattatgaagcccaaatttaaaattgcctttttatctctttgtgtctaaatttagccttaaaaggaagatatcttcaaaatgcgtactttccaagggttaattaaaaaggtacatggtaactgtttagttttatattgtgcatttataggtatattgggaagtgcttattaaagctcttctctttgatagtgtcagttgattttcactaatgtttgttttataagtacatattgcggaaatactaagaatattcacatgttttaagggctttttgttttaattatttctattttttaagaaagagaagattctggtgaagttttttctaaaatagtcatatcataatgcataatagatttttaaatgtttggttatttgagtttaaagtcctagatttaaaaacaaagaaacttcaccctgaagaaaggctttatgaaaaaaaaaagaaactaaactcttttgtgaaaataaagacattttgcatgtgtttgcttataacttgtgtgcacatgtatgtatgtgtgtgagatagaatcagaaaccacttgtgaatatatatttatgtttttaacatctgtatactggaccgttaagcagttgtcaatggctgtgtcattcaaaagtcaagaagtccgcagtttactatcttatggggaccctttttgttttcccatactttaccaaagtcttctttgttttctaactgacattgtatgtgttgttctggacttactaataggactacataaacatcacctttttatgatgtgtcaggtatcctaagaccactcctccccccgattctgtgattcacgcagaggactcacagaactcagcatagtcttacttgtggctatgatttattacagtgaagggatacaaagcaaaatcagcagagggaaaaggcatatatggggtaaagtccagaggaaaccaggctttccagactcccaaattttcccagtggagtcacacaaggtgcacatacttccagcagcaaattatgagaatacatgtgaaatgtccactggcaaaagttcattagataccctgtgtccaaggtttttattgagagttggtcatgtaggtaccctctgcttagaatgtcctaaatcccaaactcccagaaggaaagcagaagttcagcctaagctgtactgtttgcatccacagtgtaggcacaatgaccacttttatcagttaagttggtggagacattcccaaaaatctaagttaatagatgccagccagtggccaaccttgcaagcaggatgttttaaatataacagtatcagacctgctagttaactcttttctagggggraaaaaaaaggtaattttaactttatttagcagtatttatttatttaagtctgtcattccagtaattaacatagatcatctatgaaaggtgaaacgtttttaccttgagagatgtttaatgccctgtcccatttgttggtagtatctagtgggtataagccaatgtgtcctccagcaataaaatcattttttcctatccaaatactgctgtccggatgttttgataataacattgtaagggtttagaagccttattttttcatagtttattcaccaatttttattgctttcatgagactttaatagctttctggaaataatatagtaaagttatcattgatgtttcaacctgcaggtgagttacaatttgtaaatatttgtccatatgtataacttcagtactacttgaactataatattaatattttaatgtcatttattaacattatattttggagactgaaaaatgattgaaactacattgggaacacagattcctagagctggaagagtaagcctgagcccttaataaaccatcaactccaccctagttcttggctgagtatggaactaaaccagctaagacaggtgatgcaaaataaaactccagaagaggtgctcaacacagtttttaggatcttaagtttagagtataattatactaactatccaaaagcagtcctttttaccaagatcacctattgtattggtctttacacagtaagctatttagagaacagttttaaaatctttgattaaaacaaatgctaaatcatccgttagctgwttctttgccagatcgagccatcctactttattcaacctttttcagcgaagttacaggataataatatggcattttgaaaaataacagaagaaatgccagtttagtcttaaataggtattcttaccctggggatctgtggatttagttggaaagaaaaaattatactttgttttccctgacctctctcggaaattgagtattttcctccattactatatcacaaattaatttttggctatttggttatttcagagtaattcttttctttgtaaccctgtgtattttattttatgaatttagaaacattttgagaaggggtctatatgcttcaccaggggcccatggcaaaaaagaaaaagttacactstgtaatgtacccaacttggaaaattttaaatgagaattctcagaatgtgctttttttgctttctttccgtgttagagataacaatgacctgttatgtacttcatttaatgtactattgtacttttaggtttatgtacaagttaataaagaagcagcagatgataaaagtgtagcaaaagcagcacaggagttcttccaacgattggaactgggcgatrtgcaagcactttcactgtggcaaaaatttcgggacttgagcattgaagagtacattcgggtttacaaggtattggttgaccctcccttctgctttcccatgatgcagtgcagctctcggctgttacctgcatagtaaagttgcgtgttaagcttgtgttttaaaaatagatttgtaggtgaatttaaaattaagactcaaattttttttttgggctgaaagaactgcaaaataatcctgaagcagtgtcaggtgatattctcatacttcatttttatctgacttttctgttctagcattccttcactttttcatatttattttttgttctttcacttccttaggctggtatgtgatggttaataaackgattcatttaataaacatttggtgggtaggggataatacacaacagcgaatagaagaggaaaacccttgttctygcagaccttatattctagcctagagacagcacaaactaaacaaattaaagataaagcaagaaacaactatgtttttattargtggttctagatgctagctggggagatcaggtatggagtcttcaggtggaacgacagttttgtaaagaagcccgtgtgactggagtaagtaagcaagatgaacgacaggagaaggttgaagagctagtagcatatggggcatgattctaggatttctctagggctgtccagtgctttttgtggtaatgggaatcttctgtatctgtggccgtctccttaagtagccaccaaccacatgtggcttgaagggtgaatagtgtgacagaagagctaaattctcaattttgcttaattccastttaacagtatagattgtcacttgggcctagtgattactgtattgcacagcacagtaccattgtgaggacttgactggtatagtggaaactattaggaggtttgagaagaggagtgatttttttttttttttaaacaaaaataatgaggtcctcgccatcttgcccaggctgggcttgaactcctgggcgcaagtgatcctcctgcctcagcctcccaaagtgctgggattatgggcatgagccaccacactcagcccttgatttaatttttattgtgttcatgtgtgtgacaggtggtagagcatccttaattttgccttagggtaagaataggagattcaattaacatttctttgtctttttgtttctgaactcttttagcgtctgggagtatattttgatgaatattcaggagaatcattttatcgtgaaaaatctcaagaggtcttaaagttgctggagagtaaaggactcctactgaraacaatgtatgatcaggttactattcttcagtaaaattatttgttctttgaaattgttattgatgtatcctttgagtaaggacaacagaatgcaatgtgcagctttcttgggattttttatagtgctttttcctgttcagagtactttcccacattctgtattttgcttccatagcaaaagctgttcaggcttggagaaaggatgttacttgttttttataaggctgggaactgaagcacagaaaatataagtgacctacttaaggtcatataacctgataatgatataactgaaaaaaggaaatatatcttattatcttctgattcagttttaccttttaaaagaaatccctgccttttcaaaaaatatttaaggcagtgtgtgaagataagtatactataacaggcttataaatgaggaaaatgatgaaaacaggaagtaggggcaggaaaagtaatatgaagtcagagatggtgttagcatatccctcctagaattctgttttcttgcttatgtcagagttttttctttaaaaaaaaagttgtaattgatgaatgacataytgtatatatttatggtgtacaacatgatttgatatatgcacactgtgaaatgttgaaatcaagttaattaacatacccatcaccttacgtacttacctatgatgagaacatttaaaatctaccctgttagcagttttcaagtgtactatgcattattgttaattatactcacaatgctgtacaatagatctccagaacttactcctcctgtttacctaaaactttgtagcctttaaccaacatctccccattccctgcccttggtaacctccattctacttctctgcttctatgattataattttttagattccacatgtgagactatacagtatttgttttctgtgcatcgtttatttcmctgagcataatgtcctttcagtttatccatgttgtcacaaatgacaggakttccttttattttaaggctgaatattacctgttgtatattttaaagtctactcatctattaaggttgattcacatcttggctattgtgaataatgttacaataaccatggtagggcagatttcacttggacatactgatttcattttctgtggttgtatacccagatgtgagtttgctggatcatatatatggatgttctgttttctgttttttgaggaacctccacattgttttccataatggctataccaacattcccaccaacagtgtacaagggttcccttttatccacatcattgccaacatttatctttttttttttttkttgttataaaagccatcttaacaagtgtgaagaaatatcttattgtggattgtggttttaattttgtatttccctgatgattagtgatgttcagcaccttttcatatacttgttagccttttgtatgccttccttggagaaatgtctatacgggtctttggcccactttttttttttttttatgttcccaggcaaatgtacaggatgtgcagatttgttacgtaggttaatgtgtgccatggtgatttgctgcacctggcaacccatcacctaagtgttaagcccagcatccattacctatttttcctgatgctctcccgcctccccatcccccgacaggccccagtctgtgttctttccttccttgtgtctctgtgttcacattgttcaactcccacttataagtgagaatatgtggtatttggttttctgttcctgcattagtttactgagaataatggcttctttggcccactttttagttgggtttttttttggtagtggtggtgttggtttggtttagtttttttgttgttgtttttccattgagttgagttccttatatattttcacattaaccccttaccagatacatgttttccacgtattttctttaatcctctaggttgtctcttcattttgttgattgttttctttgctgtgcagaagcttttttagttttatgcaatcccatctgtgtattttttgcttttgttgcctatgctttgaggactagctccaagaaatctttgccaaggcttcrgtgttttcctctaatagttttacagctcaggtcttagatttgtctttaatccactttgaattgacttttgtacatggtgagagatagggatctagttttattcttctgcatatggatatgcagttttctcagtgtcatttattgaagagactgtcctttcctttttatttttttgagacggggtctcactgtatcaccaggctggagtgcagtggcatgatcttggctcagtgcaaccactgcctcccaggttcaagcgaatctcctgcctcagcctcccaagtagctgggattacaagcgcgtgccaccatacccagctaatttttgtattttcagtagagacggggtttcaccgtgttggccaggatgatctcaatctcctgacctcctgatctacccgctttggcctcccaaagtgctaggattacaggcgtgagccactgtgcctggccgagactgtccctttcttattgtgttattttggcacctttgtcaaaaatcagttgacctggctgggcatggtggctcacgcctgtaatcccagcactttgggaggctgaggtgggcggatcacctgaggttgggagttcaagaccagcctgaccaacatggagaaaccccatctctactaaaaatacaaaaattagctgggtgtggtggggcatgcctgtaatcccagctacttgggaggctcaggcaggagaatcacttgaacccgggaggcagaggttgcggtgagccacgattgagccattgcactccaacctgggcaataagagtgaaattccatctcaaaaaaaaaaaaaattcagttgaccataaatgtgtgaatttgtatctaggctctctattctattccattggtctctatgtttttgtctagtatgatgctgttttgattactatagtttgtagtagatgttgagattaggtagtgcgatgcctctagctttgtttttttttttaagacagggtctggctttgtcatccaggctgtagtgcattggtgctttcttggctcactacaacctccacctccaggttcaacctattctcctgccttagcctcccaagtagctgggattacaggcatgtgccaccacacccagctaatttttgtatttcttagtagagatggagtttcaccatgttgcccaggctggtcttgaactcttggcttcaagtgatccacttgccytggccccccaaagtgctgggattatagacgtgagscaccacagctggcccagctttattctttttgctcaatattgctttgggtatttggaggttttttgtggttccatatgaattttatgattgatttttctatttctgtgaaaaatgtcattggaattttggtagggattgcattgaatctgtagattgcttttggtggtgtggacattttttaaatattgatttttccaatccattaatacaggatatctttccatttatctgtgttttgatttctttcatcagtgttatatagttttcagtgtacagatattttacctccttggttaaatttattcctattttaattttgttgatgttattataaatgggatttttttttaaatttctttttcagatagtttgttgttgtgtatagaaatgctactgatatttggctgggcgcggtggctcacgcctgtaatcccagcactttgggaggccgggggcgcggatcacatgaggtcaggagttcgagaccagcctggccaacatagtgaaaacctgtctctactaaaaacacaaaaattaactggacgtggtggcgcgcgcctaattccagctacttgagaggctgaagcaggagaattgcttgaacccaggaggcagaggttgcaatgagctgagatcgtgccactgcaccactccagcctgggcaacaaagtgagactccgtctcaaaaaaaaaaaaaagaaaaaaaggctactgattttcatatgttgattttctatactgcaactttatgaaattcatttattctaacagtttttggcggattcttcagggttttccatttataagatcatattcagagttttctatttataagatcatattgaaaaaaaaagattatgttgcctgcagagacaatttaacttcttttccaatttggatgcctttaattttgtttcttgcctaattgttttctaatttagcttttagcttcctgtcagctaaacagagaaatagcagtgaaagaagcccagacctctataatgtagaggcaaaccaattgcttaagagacatgtcacttttcatagtaccaaagcaaactttctcctgtcatatttgtaaggaagatgtgaaacatagttaatagcatcctcggtaatgtccttaaggaaaatttttagattgtcwyatacagattccaaattttggtcatacaggaaagacaaaaatctgtagttttaatacttgggtactttgtggcatgttaaaaattatcccaatattgaatgttataataccatgaattagaaggagaatgtgtgacatttcatagttacaatgcagctgcatctcatttttcaactgggtatattaaagaatttatctctgagtaccttatccagagctacagatttaaaagctaagataaccaaatattaattacatcatacccattcataagarattcttggtcatattcttgtttttttccattgttgattaaagcttgaattggcactgctcattgcaacgtgggtaataaaaatagcttctggtttgctaatgttttagatattaaaattttaaaggtctgaatttattatgttgcttcagagttaccttttcgaatttctagaaaaggaacggctgtagtagatctctctgggaatggcgacccctcctcaatttgtactgtaatgcgaagtgatgggacttctctctatgcaaccaggtttgtagcctctgtgagggtcaacatttggttctaaatctgttgctttcagatgaaacactatgtacaattaattatgcattatcggaytccacagctgatgacattattctataaactgtaaaactgaagtacttcataatcaactaaaagtattttacaatggcacgttggcaggaaatgtatactaaaagatgaccatattagctcaggggtttccttatgctgtaaagaacatcttacatgcacataaataccagaactcattgggatttggtaaagcaggctgagggagaaagcagccatgtcacatttttttttcccatccatctctgtgactgacctttgtggaagggccaatctctgttcatcagtaagaagtgggtttatcagcacctttatttctgggacaaagctaataggaaagagaagcactgctggcaaaagtgtctcccaggccagaattttatattaggtcacaaatcacttttgtaacacaaagtcatgatactttgttgttttatattaactaccataatttgttccaaacaactttaagcaaccaattaagtcttttaacttccccttaggaaattcatctcttaccttctattrcttttcgacatttccctttaccatttctatgcaattgggattaggaagtgagaagagcttatatatctaagaggtacattatttttctagataagcaaatatatatattagaaaagttttttgtatcaactaattattgctagatagattaartaaataaactattgcacagtggttataagaagtatccattgagaacagaggctctgtaactatccgggtctggttagtgtcttttttgggttatcattaggtgtcagtttttcaacacctatatttttctttggaaaaagaaacatcccgtcagaaaaggggccctatgacatgaagtctctataactatcctaatttggtgttttttcaggctgtcattagakgtagacttttctgtgtatttaccttaacacctgtactttctcttttttctttgaaaataattgtctttttgccacttattgaaatgtttgattttttcactttgctttaatgtcagttgcttctgccttctaatgggtttcttatagaatacctttgtgtgggggatgtaaatgaaagttgttatagcagacaaaactgcaggagaatactgaaaagaacagagtgtgaggctggagacctgggactgtcgtttaactctctgggccatgattctctactttgtgaaatgagagatctggactaaatgacctagcacgtcttctggctttgaaattcagtttctacaaactcaacctagaaatttttcttattcttttttgttttttgattgaatcaaaaaatttccctttgttttgtccttatcttaaaccaaaaaaatataacaggtgtctatttgtgacatcatttttgtgataatctgctctacaactgtttctcaacattttaaaaattataattcctccaagcaaccttttcagccatatttttcctaattgccaatcctcatgaaattttatcccacagatattctgtatctctgtatatattgtatacatatctgtggtttatgcatgaagaataagattttttgttggccagctgtagtggctcacgcctgtaatcttagaactttgggaagccaaagcaggaggatcacttgaggccagaagtttgaaagcagccgggacaatataatgagacccatctctacaaaaaatatgcagtggctcttgcctgtattctcaggactttgggaggacgaggagggtagatcacctgaggccaggagtttgaaaccagcctggccaacatgatgataccccatttctactaaaaacacaaaaattagccagtttttgccttcattgagaatgcatgctctgtgcaatgtcaggatcatgagataggtactaatgacattttgatgatccctaacattttgaaagatcgagaaattttttcagtctttccagtatcatatataatcaaaaatagctctaattttaaattttaatatttcataatccttgacttgaagttttggtttatgaaattttatggtttttcattatttcatatgcaaactagatatttgtatctaatcagagataaaagagatagaaattctgtcaaaggactttatggtcttttttttttttttttttttttaattgagacggtgtcttgctctgttgctcagtctggagtgcagtggtgcgatcttcgctcactgtaaactccacctcctaggttcaagcgattctcctgcctcagcctcctgaatagctgggattacaggygtgcgccaccacgcccagctaatttttgtatttttagtagagacggggtttcaccatgttggtcaggctggtctcaaactcctgacctcgtgaaccgcccgccttagcctcccaaagtgcttgggattacaggcgtgagccgccacacctggccgactttatggtcttttaaatgcgttagaaggtattccccctgactgacccaagactttgaaagtccttagtaatactaataggagagtatctagacaatacctgtttactacatcatctatattttaaatatgttcattaagagaatatattgcagagaagtaacaggtgattctttttagtagagacttaatcataaaacatttatctacaagacacttcacccagagctattttagttgttattactacttgttgtagaacttttatgtattaattttatttatttatatttattttaggttttgcttttcccagtgttttyattgttgtttttcccaaacctatttttatcattttatatcaaaacatgatattcggattatctaagtgtgggtggaattcctcaggctgtggtataatttaaattcttaattagaaaatgctcattgctattaaataggtaagaccaattattacccrgatctgcttagtaactcttggtttatggccactttgtttcagagatcttgcagctgctrtagatcgaatggacaagtataattttgatacaatratatatgtggtaagtaatcagaacaaaaagttatgatctcttaactcatgaaaactacagaggtagaaattggatgccatgttgaaaaactatggaaaactacagagagaagtcaacattaagtatgtttaaagtgggcaacttctatttaaaagtttaaacacttaaaaatgaaaaagtttacattgcttcatagtaagaaaaaattacctgaatcagtaagatggttakgtgaaattaatatatacaggtcactataataccaagtttttttgttttttatttttcaattctgatttgggcycaacagttgtttttaaataactttattttgaagtaatttaatactcacaagaagtttcaaaatagtacggtgtttccccccaaagatagtacataaccatagtacttttatcaatagcaggaaattaacattgatagagaccttactgaaatttygccagcttttacatgtactctcctgtaaatgtttgtgtggctatggttttatgagactttatcacatgtatagattcatgtaaccatcaccacattcagaatatagaactgttccatcacaaaacaaactccctcgtggtcagccacttaataatcacaccttcacccaatcctaacccctggcagccagtgctctgttcttcagcacaattttgtcactctaagaatgttgtataaatggaattataccatatgtaacctttgagattggcttttttcactcagtataatgaatgccctggagaactatccaggctgtcctgtgtgtcagtagttggttccttttattgctgagtggtattctagtatcttttcccctttccttacttatcatgtgaaaccttcctttccacttagaagaaagttaccatcaaatatttatttagagtttagctttggtctcagagaccagggtcataatagccgagagggcagaaacttaaatagaatactcagaagattgaagttcacatttcctactgactcggtggagttgtatggctcttatttccctcccttgtagagcagtccacttagacactctwcttgtggcatcctctttgtgtttagttaaaacatatcaattgacgactttagtctgtcagacctcaaatatcttaatttgattcaagtccaacctatttttatacattaatttgtcagtattcttttattttatatatattttcttcccaagacagataaaggacaaaaaaagcattttcagcaagtattccaaatgctgaagatcatgggatatgrctgggcagaaaggtaatgtctgcatggttcttaattgtctgtgcagggtcagctgagcctgaaaatgtacctagtggttaaagtttttcactcagatttcaattctttgtttcaagatactggtgtggaaaggtagatttgatttttgtattatgtcttggttataataatttccaccttataaacattaaataactgtatttttactagttatctgctctcagtggcttagttttcaaaattcttaatccacatctcctttttctcctaaaggcaactagtagtgtaaycacatgctggtgattataaagtgaagctgtgcttaacgtcctttgtagcatacaaatcacatcaatttcattttattaatttttaaaaactctgctctgatggttaaagttcaaaccactctctgaaaggtattatatgctttcagcagcagctcttgtttagctttcagttaactagatgcccactcttttaggtgccagcacgtgccctttggagtagtacagggaatgaagactcgaagaggagatgtcactttcctggaagatgttttaaatgagattcaattaaggatgctacagaacatggcttcaattaagagtgaattcagttttttcttattaaagtcataacttacrtgccacttttatgttattctggactttgggcagtgtgatttattatgtctgtccctccattgaagtgtcactaactttgtcaaaaatacctttcactaattagaggtgccagaatttttatactcgctacycaggaattggtcacttcaataatctgaattactataaccttggtcctcttttcatgaacagcttgagcactgacattctgttgtctaggtgattacgtgaaggtcccttttctatgttataatttggatacaagtcaccagtccttatgactttaattaaccttcacccttggaaaactaagtatcagatatatatagatatatatatatacacacacacacacacacacacacatatatatttatatatatatacacacatacatatatatatataaaatcagaaatccaaatttatttttcctacaagtatcttttgaataaataaatttggatttctttccctttaatgtaggcaggggaaatgtcattatcaaaggtaaaatagcctaaattaggcaagtaattactcattctgaatctgttcttgattgtcagcatacatttttggcagatgttaccttcacttggatccatgattggcacagtgtcatgtagactaaagatagctgcctttgtctgtttcagcaactaaagaactcaagaacccacaagagactgcagagagggtcgggctcgcagcactcattattcaggtctgttaagactcctayctgtgaggcccttttgtttggtactagagcaaatcccagcagtgaagatttcctctgtcgttttaggacttcaaaggtttactcttatctgactacaagttcagctgggatcgtgttttccagagtcgcggggacacaggagtcttcctacagtacacacacgcccgcctccacaggtgagaagaggctgcagggaaaccttgtgctgcactgtgcttacttaggctaggtcctgtgattctaagaccagaggccctgttttctgggcttttccaatatcttctattcacatctgactagagtagaccttcttttaggaaaaaaaaaaaatttattgagcacctatgttagaaatacatttatgtgtattatcttagtcctcagaataaccctgtcgaaaaatatactgttacctccactgtgtatggatattaaggagaccaaaattgtgtattataaggtcatgttcatcacttgcagctctgtgcccttgtatgactttttaatcttttgatgtttttaactttaaacttttgataagtttggaagagacttttggatgtgggtacctgaatgacttcaacactgcttgtttacaagagccacagtctgtttcaattcttcagcatcttctcaggtatgatgttttccagggatcatcaagtgtgcttctgcttatcaaaatggctattagcatttttgctgcccagtagagtcaacagtccagtagctgccttctgcctctagacttttcccaaaggtatgccttaaaaagtgattatttgcattttgaggacagagggcatagattaagccaatgcccaaggaggacagtctttgggtcttcagaatattatcactgatgaatagcgcacatgtctagctgcctctagctcacataaagccttataaaagcataaccttttttagttttagtttgagaaagagcatcttcttgctctctgtggtaagtgaaggaaaatacctgcctttgtgcagcttcccagagaccgtaagtccttcatttgcctcttggtttcggttcacaatctcaaatacatatatgtatgtgatgctcccatgctaggcaagacacccacacattttagctctgacgggcattgttggtgaagccaracatgccagagattagtctctagaagggatgtggatggttatgaacaaggtggttttctttgattgccatatagtagtcagtggttctttcctggaatcagaaaaatttactcacatgyacaatagggaatgtacggaaaaataagccaactgggttttcttagcattgagggtagactttgctaatttatattttatattcttaaacatggctggaggctttttacattcaccagccatgatttaagtttttgctgtggactaggtctaggaaatagcaagatgatttagaaagtccctgccatcaaagaatttggaagaaagaaaaatgttcctttgccttcaaatgtacacacagttttttcatatccttctactcttctttttttttgagacggagtcttgctctgttgcccaggctagagtacagtggctggatctcggctcactgaaaccttcacctcccggggtcaagtgattcttctgccttagcctcccaggtagctgggactataggcgcgtgccaccacacctggctaatttttgtatttttagtagagaatggggtttcatcatattggccaggctgctctcaaactcctgacctcatgatccacccacctcagtctcccaaagtgctgggattacagacgtgagacactgcgcctggccataccttctactcttaatcgtgtcgagtcaaccttatattcacaatcttttaatgtctaatgtcttagtgtaaygtgtacagtcttttcctgttcactgttcctgtcatcttttaggttcgacgaggtgctttataaatcatctcaggactttcaacccaggcatatcgtcagttaccttctaactttaaggtactttataatcttcctgttttcaggtgttaatggcatttgagacctttctttcatctaaaggtttcctgtaaacaaattccttggcctaaaatttgatgtgcttttagttacaggaattattgcttcatctatacaaattagcagttaatgttccttcattcattcagtgatacaaggtactgtcactgtagactggagaatgggaactgacaactacagttacagcacagtgcatgtgttatgttagagtgaacgtaagagatggtgttagggcaaccagcccagccttgagcgatcagagagggcttctcagaggaaaggagatattaatcagaaggaatgtggctgggaagaagaagaaagcccagagttgagcaagaacgtaataatacattttaaaggatccataagcattgtcctgggagggctgatgaatgaagcgtgtataaacctgtttgccatgtactgaggcatttaaacttattttcggggtggtggggtccatacagggattttaagcagaggcacagaaaaataagctagaaaacttaatttttctaatctttaatgacaatttcatggtgtctattttagcaaattgaaatcaaaattgagtccacccttgtatagcagcagcagctgtatcttctgtraagcyatttaataaaggaaatgttgcttttactcaacaagtattgaaatcagacacttaacaggactgttttcttgattatactttttaccttgtcttctctagatttatgtaaggatttttttcttcctttaaatgacacttaagacatacagaggtgaagaagctacaaagtcttttttttttttttttcttttttttgagatggygtctcgctctgttgtccaggctggagcgtgatctcggctcactgcaacctccacctgctggattcaagcgattstcctgcctcagcctccctagtagctgggattacaggcacgtgccatcatgcccagctaatataccaagtcttatgaaatgtcattttatcattaaaactgatgtcttaagtatcatttctccggcacattgttatacttgctgccatacctaaatttaaaaagatactttaaagagtggccagtgtgtgtggagagtggatagtttctacccacctcactgtacagagggaaaggccatgctgtgttatacattggattgtaggctgcctaaatgaggaaaaatgattagaaaaggattctttatatttgtaaaattaacattgaaatcataatctttttttttttttgagacagagtctcgcactcttgcccaggctggagtgcagtggcgtgatctcggctcactgcaagctctgcctcctgggttcacgccattctcctgcctcagcctcccgagtagctgggactacaggcgcatgccaccacgcccggctaatttttgtatttttagtagagacggggtttcaccatgttagccaggatggtctcgatctcctgaccttgtgatccacccgcctcggcctcccaaagtgctgggattacaggcgtgagccactgcgccctgcgaaatcataatcttaagaattgcccacctcttagtagtagaatagggccaagatctaaagcttgagttttgaattccagtttcaacttcacaattttgaatacatcctttaatggttctgggctttattaagttgaaggagtaagattagatatcaagctcatatcttacaacaggaaattactgctggtactatcgtgatttctctcttcctgtttcagtcatcttgcagctgtggcacacaaaacactacaaataaaagatagtcctcctgaagtggctggggtacgttatgttgaatgttttctgtataatccctagctcctgagactaatattactaagtcagtcttgtaaatttttctaaaatagcattctgttgttcaactgtagcagtatacttccttagctaataattaggctgtaacaatcaatgtgtatatacttcccaacatactagactatraagcacattttcctacatgaaatattayagtgataagttccccttatctgaagccatactgtataatactatcactcccactccatgacactttatgtacaggttttactgtaagggatgccaggaatttatcttctcttgcctatagtaactctagggcactttgacatattgttcctgctttaaactagaaagaataacctttaaaaccattctcatgtattgaatacattcctgttactgaatattttaaatcattctttgatttattttgtaggccagacttcatcttttcaaagctgtccgttctgtcctagccaatggaatgaarcttcttggaataacacctgtatgtaggatgtaatttccattaaaatggcttttaaaatgtcaagtgaattctagttatctattctgagatgccttgctgttcagaataaatttaaattttttttttttttttttgagatggagtttcgctcttgttgcccaggctggagtgcaatggtgtgatgttggctcactgcaacctccacctcccaggttcaagcaattctcctgcctcagcctcctgagtagctgggattacaggcacgtgccatcaygccaggctaattttgtatttttagtagagacagggtttctctatgttggtcaggctggtctygcactcccgacctcaggttatctgtctgccttggcctcccaaagtgttgggattagaggcatgaaccaccacgcccagccaaagttaaactattattctgtgtcagaatctrtattaaatgtgacttgtcaagttattcagtctttatccttaaataaatgagttatctgaattctctcatggtcagtaggtatttaaatagacattgagttttttaaacccaaagcattgtggtctaatggggctaaaggatttgagtttaaactttggcttgaagtttcttaccatgtcattcttccagaaactattcttataactgaaatgatttaatgttttcatgaaataaaagaattggtgaggggaaaatattatcaattttcttgtaattgtggctagtttggagtaaacatagggagatcaaaaataagcaccgttctgtcaatatagctgacagctactcctagagacaatagacctcgtgcttccctttgagttaatatatacagggctgggcgtggtggctcatgcctataatcccagcactttgggaggctgcggcgggcaaatcacgagatcagtagatcgagaccatcctggctaacacggtgaaaccccgtatctactaaaaatacaaaaaaagtagccaggcgtggtggcggggcctgtagtcccagttactcgggaggctaaggcaggagaatggcgtgaacccaggaggcggaacttgcagtgagccgagatcgcaccactgcactccagcctgagcgacagggcgagattctgtctcaaaaaaaataaataaaaaatatatatatatatatatatatatatacacacacacacacaggtaactcttattgtgtgaattcaggaactaaatacattttaataggaaggaattacttgtaaagacgttgaattaggatctttttgtaaaatgtagtccattaattcaaccataatttgaaatggagtttcttatggtttccttcatgtatctatcttcatatttttgtgtggcttcattagataacatgagcatggcttaggaaacaagagtaggatgtgatgtgtttgatcagtacggccattcccatcagccagcatttccattcaggtctgctataatttattctaaatgttgctaatagtaggcttttgaataccagtgacggtctatttaccaagttagcacaactgaagcttctctagttagagtgaaaattgtttcatattagcaactatggcttaccttcttagtcctagaaaagattcagccttgcagttccaatttaagtgaattagctcccagatagctaattttcgacttaaagtagtgtcacatttttcttagcataaaccagccatgggataaaaatataaagtagggacatgttttacacatccaatatccctctctacttgtttgaagaaactttccccttccaagatcagtagtgtcttcccgagtatttgaatcgtgagtgaaaccatacaggaacagtaataggtaaagccagatctttacaaaagctgaaaagacaactgtccattaattcttagaacctagacgcctgtagccctgattgtggaccttcttaaaaattctttcttttttgcttaaggcttgccagagttgagttgatttgcagccagagaaccctaaccgatagacttccacatatagaaaataaaagtgcatttctacatatagaaaataaaagtgcattatcttaatggtcatatctataatataaagtgattaaacaattctttcttacaaataaagtttattgctgaatttccccattaacattatagaaaacactgaaatttcacaaattattgagagcccaacagttaaacatactttatttaaaaaagtacaaaagtgacattagaaatttttttgaagaaatgtgtatcatctaacagmaaagaaatatgaaccagataatgaatggcacaaatatagcactaaaggggtactcactaaaggggtactcagtcaccacccagaaattgtccgagttatgaaatagattcattttgagaagttacacattcagtttgtttatgaactagcctgtcttgtttctgcctcttgtaagaaaagagctaggtctttatgctgctaggacaaaatactgtacatgaattggagaataaggaggggtcatccttctccccggtaccggaacaagagaacagttagtacagaaatggctttggcactttaacccttagacattgtcccaaaccttgttacttgagtattgtagcctyaccatgattttttttaacaccgtatcatctccatactttttatttacaaattatatatacacacaataatacaattccttcattctaaaacaatagtagaccccaaacaggtctacattaagtttctgtattagcagttcactcagatagcttcatttgtttgttgttgtttccacataaccgcactgatcatgccatacagttaatttttatttgtttatgctaccttctgagattgacttaaggctctagtttaatgcaaatggtttagtcttaaaaggagtctcacgtgaggctaaaatcacacaccaataactctctcctttgaagctgtttctccttgttggatggatgtagtgtcttgtctgggtaatccatagagatatatggaaacacatacaagaagagtacccagggcaaaggtgagtgctgaaaagaaaaaaaaaaatagctttatctgtatgtgtgtctttaaaatgcctaatgatcagtttaaaattttgaaaactcttaattgtgggtttacactatcagatcatatttttatgatggcaaggtttagaaaggtcttccattacagccaaaaaaaaggagagggggaggcagggcgggtaaaatcaaggcagtgttttgttgatcactgattacagactttttagaacatgagtatgcctaactgacactatctgaccactctgacaaagaacataactaatttccctataaaatatataattttttttaaatgtaagtataaatatatataagtacaaaagaaaatgtggtaggattggcttttccgtgacaaccaggaacctgtgaaagtttagagtaaaagacaggtgaccaatcattcaaaccattgataatttcttaatcggagatgaggcgataatttactgaataaaactacatttcctactagtcttaacccttttttcatcttttttttttttgagacggagtttcgcttttgttgcccaggctggagtgcaatggcgcaatctcggctcaccgcaacctctgcctcccaggtccaagcaattctccttcctcagcctctcgagtagccgggaggagcatgcgccaccgtgcccagccaattttgtatttttagtagagacaggatttctccacgttggtcaggctggtccccaacctcaggttatcacccgcctcagcctcccaaagtgctgggattacagacatgagccaccatgcccggcaccttttttcattttaatcttaaaaatcaggatgcaagaaaccaaatcataacttgtcctaacttgacaaataaatatatttatatgacatcaagctttattttagttcactcctaactaaaaaagaccagctttgccttcaaaaaaggagaaggtaggataaaaacttgtatctaaacagttaactgaaagattgctaagacatgctagttgaccatcagtaagaacattaaacaaaagcattttctactgttcctatatatttcttatgagcaatggtataaggattttgttgaacataaagatagatcagaattacagctaaaagttcacccaaatcaggtagaaaaacatctaagggaaagcctataagtacctgatactgaaatggtaagtggttggtaagtagtgtcaagcactactctaagcacttcacctgaaaacaccactaggcaataggtgatattattcccattttacagatgaagaaagtgtcacccagggaatataacttccccaaggctgcacagttaagaaatggtacaggcaagatttgccacagactatacatggttttctaaaatttctacaacactatttccatttatatacaggagtcaattttaaaatgaaatgtaaatataagccaggtctcttttacttaatatatttaacagatattcttcatacattggtttatattataataattgatcagtaaagaaaattattacactataaaagcaccctgaaatgttaagtcaatatcattgcttaaataatttagaagccaaattaatgctgggtgtgagagttgggaaaattatattaggactaacaaagcagtggtactggaatgccagctatattaatgagttttgtattaattacatattgaatgaaacaaagatacaaaagacaaaatctagattttgattgttttcaaaaccgtctcacacccaaatgcaaagcagttggaaagtacaagctgagggaggactaaaagatgttttctacattcttctaaataatgagccaatatagtttaaactgactgctgaaaataatttcctaaagtctttatatgtatttccttgagtaccttctcacattcagacactcaagttgtcctatatacaatacctaaaaatacagggaggccttgactgcaaaaaaagtcccctcactttcacatagaactagcacccctcgtcttaacctctaagaccacctaaacaaccaaagtactgcttagccacatcccacacaactatgaacagctgtactggtggaataaactgtagtaacaaagctaggaatttctgtaaacagtatgaccaactgccacttttaaataagggattaaatgaatcaaggaaatgggaggctcttccatgttaaaaactcaacacaaactaagacatacttatctgtaatccaaacagcattactgaagcaatggtggaaaggacaatggccgctgctgcagaaaagcctttcatgatgttgtctgtgtacttaaccacaacagaagtgtagaggccaccaacacttgcaagaacttgtatacagagagaaataaaatcttatcactcaaataaatgaaacattacataatggtgaggcaattttcatccccagagatgccatactttacctaggaaaaggaaaatactgttttccttagaaggagccatctgagagtttgtactaaaattggtagttcctatataacactgtttttccaaaacaatgcccagagggctatgtggtctattaaattttacacattttttgctaatgttagatattttggggcattgctatcccaaagcaattttgccttcacaatcaaaactaagtcaacaaaatgaaaattatattcaaactggtatttacagtatcaaaggattaatttcaaaatgttataacagcttaaaatggacatctaacttaaaaaaaaaataaaggatctactaagaacctttaattcctggatacttacagatgacaaaccagacataatatgtgtaaccatagaaaaatcctttttctttaatttcagctccatctgacaagtagacgccagctaatgtcacaataatccctgatagatacatttgaatgtttctcacccaaagagaagtatctgaactctttaaaactttttcaaaatatactcctgaaagaaaattagacatgcaaatattaaagattactataaattaacttaaaatgtctttcatttagaacaataccctagagatatataaagtatatgatttggggaacaaaacatactttacttaaatgtgcatttattatgtaggttgtgtgacacatgacatactgtacattataaatttatgtttttacagagtatatagaataataactaattgggaagtttataagctacatttaacagaaggctgttaaattaagacagtttctgcctttattagagcagtaagaccacaaaagctctctgtactacttaatgccagtatgtcatttgctttggtcagctgaaaaactacattaagagtgaattatcttaatcacatccctgtaatatctgcctactaatgaatactcctaattctgcaatataatctataatcaccactaggaatcttttcagagtaacaaccaaaat

SEQ ID NO: 94763 - DNA, 13671 bp, Homo sapiens
ccatcagaagctgggaaggggcaaaggattgcctttcaggtttcagagggagcatggctctgctggcatttttggagttctagcctccagaactatgagatgtcacatttccgttgttttaagtcgcgtggtttgtggtaaagcagccctagacaactaatacagctttcaaggttgtggatcttggcatttagcccccaggaatccctaccctatcccctcgaaggtgattctaccagggattctgcctggcaggaggtacgaatgggccatactccctctttaagctaaagtctgggtcctcttcccctccacttcagaggtggtccagcttaaagccccctcaaaggatgtgagtcacaatagctctttacttccctggtggagtaagaggagtaaaaaaaagaagtgggaccttaaaaacacaataccggcctctctttcttggattggttggagggacagagaaactattctttcctgatgaggccacagtaactcaagaaacatcaagaaatagcccactggtttgtttgtttgtttgttttcttaatatcttagcccgtcatgttacccagtgtgcaattgtttcctgtcctgtgctgtcttaagcacaatctcagtcacccagaccttcagtgagaggctggcaggagaaactgggggcatcaggaacacagcagtacagggaggtgtggcctcctatcaccgtcctgtagaccatggccagcgtggcgacatcagtatcccactgaagggacacagacggggctgtaagctgcagagggcaagggggacacatgtgcatcggcgactaacccacacaccgtcctgcagcaaacccccttcccaaacttgctagtgaatggcgacccttagcaggaagaagaaggtatccacttgggttacggttacattttacaatagacagggaactctgagagactgtatgctgaatagttagtgagagatttgggctggaatggtggctgacacatgtgtgatcccggcactttgggaggctgaggtgggtggatcactccaggtcaggagtttgagaccagcctgcccaacatggcgaaaccccatctctactaaaaatacaaaaattagccgggcgtggtgggcacctgtaattccagttacttgggaggcttcagcccagagtggcttgaacctgggaggggaaagttgcagtgagcccgaatcacgccactgcactccagcctgggtgacagagcaagactctttcaaaaaaagaaaggaggaaaaagaaaagctgtgagagatatgtttaaggaataaagctgtcctcgaagagcctaatctccacttttccaagaactggaaacaaattacataatacaagaggactgaaccaataataataattttcctgaatataaaagatgatgaaacttttgaatgtatttgctacaattcagccaggcacggtggctcgcacctgtaatcccagcactttgggaggccgaggcaggtggatcacttgaggtcaggaatttgagaccaacctggccaacatggtgaaacccagtctctactaaaaaaatacaaaaattagccaggcgtggtggcgggcgctacttgggaggctaaggcaggagaatcgcttgaacccagcagacggaggttgcagtgagccgagatggcgccactgcactccagcctgggtgacaaagcgagactccatcccaataaaataaaataaaatccatgaaatcatagcccttggtctttaaaaggagtatgctgtaaaactggaggactgagaaccaaggagttactatcctgcttacaacaggatgtttgatctccatgtaattatgagtattatgagtctaaaataaataccttgcaatacatgaatacaagcacaatcttcctaaacttaagatgaaacaaaaccttaagagaacaagatctttttctttttttttttttggtttgcagtcagatcagttgtttctcagaaaatatacactttaaaaaattcattgaactttcagtactctatccctgggccagtgcctccttcatctggcaatacccctactccccgcacccccacctaccaccctcagctagtcagactgcccagccagggacccatctctgaaatttgctttaattcctctacatcgggccaggtgtggtgattcacacctgtaatcccagcaccctgggaggctgaggcaggtggatcacttgaggtcagcagttcgagaccagcctggccaacatggtgaaaccccatctctactaaacatacaaaacaaaacaaaacaaaacaaaacaaaacaaaacaaaaatagctggtggtgcatgcctgcaatcccagctactcaggaagctgaggcacgagaatcatttgaaccctggaagtggaggctgcagtgagccaagatcatgccactgcactccagcctgggcaacagagcaagactccatctcaaaaaaaaaaaaaattaatctacatcaaaatttacacatccagtctgaaatcgtttgccttaaaaaacaatttgtaaggtgataaattaaacaaagtgaataactgttgataaacattgacaaccattaaatttgggtgatgggtacatggggacacacagtatactattctacctttctgtattttgaaaattttataagcttaattaacaataaaaaaatgacatttctgatctctttccacaagagattgcttaaggccaagtggcaatgaatatgtaaaacacaattagcatagtctcataagatccacaaattcacttgcaccttaataccttaaactgtgacaggtgtgcatgtagagggccaaatgagcatgcctccaatgtgaggaaaattgtaaagttcagtggggaaaagcttggagaaaagaaagttttctgagagggcttaaattaaatcatgatatgtaggtcttaaactggttctgagtgtgccctaaaaatgtatctagtagaaaaataggatatgtcttatgcttcaattactggaatagctatgacatttcacgcctaagcatctttccagtgacctgactctggagtggtggcttggttcccttgaccgactgcagagggggtggtgtggaggtgggtagggggctggatttgtagggaatcaacggcccctcatttgcccatcggtgatcatgcctgtcaggctgctacacgacagaagaggcagctttgctttggcagaacatctgaaaatgtcagtcttattcttttctgaaactatttttgccttttacattttaattattttaaattttggcactggctgtactcatagattgattcgcatttctagtcaattcttttcagattttctcaataaaaactgaatacaaataatttggagtgttctattaattgtgaaaagttagtgatgttgagcatttttttcatgtttgttggccatttgtatatcttcttttgagaattgtctattcatgtcgttagcccactttttggtaggattgtttttttcttaccgatttgcttgagtttgttgtagattctggatattagtcctttgtcagatttatagattgtgaagattttctcccactctgtgggttgtctgtttactatactgactgtttcttttgccgtgcaaagactctttagtttaattaggtcccagctatttatctttgtttttattgcatttgcttttgggttctcggtcatgaaatccttgcccaagccaatgtctagaagggtttttccaatgttatcttctagagtttttatagttttaggtcttaggtttaagtccttaatccatcttgagttgatttttgtataaggtgagagatgaggattcagtttcattctcctacatgtggctagccagttatcccagcatcatttgttgaatagggtgccctttcctcactttatgtttttgtttgatttgtcaaagatcagttggctgtaagtatttaggtttatttctgggttctttatgctgttccattggtctatgtgcctatttttattccagtaccatgctgttttggtaactatggccttatagtatagtttgaaatcagggccaggtgcagtggctcatgcctgtaatcccagcactttgggaggccaaggcgggtggatcatgaggtcaggagttcgagaccagcctggccaacatggtgaaaccccatctctctaaaaatacaaaaaaaaaaaaaaaaaatagccaggcattgtggcaggtgcctgtaatcccaggcactcaggaggctgaggcaggagaatcgcttgaacctgggaggcagaggttgcaccgagctgagactgcaccactgcactccaggctgggcaacagagagtgagacaccgtctcaaaaaataaagaaagaaagaaagagagagagagagagacagaaagaaagaaagaaagaaagaaagaaagaaagaaagaaagaaagaaagaaagaaagaaagaaagaaagaaagaaatcaggtagtgtgatgcctccagatgtgttatttttgcttagtcttgctttggctgtgtgggctcttttttggttccacataaattttagaattgttttttctaattctgtgaagaatgatggcagtattttgattggggttgcgttgaatttgtagattgctttgagcagtatggtcattttcacaatattgattctgctcatccatgagcatgggatgtgtttccgtctgtttgtgtcacctatgatttctttcagcagtgttttgtagttttccttgtagaggtctttcaactccttggtaaggtatattcctaagtattttatttatttttttatttttgcagctattgtgaaagttgttgagttcttgatttgattctctgcttggtcgctgttgatgtatagaagagctattgatttgtgtacattaattctgtatccagaaattttgctgaattcttttatcagttctaggagctctccagaggagtctttagagttttcaaggtaaatgatcatattgtcagcagtgacagtttgacttcctctttgccaatttggatgccctttatttctttctcttgtctggttgctctggctaggacttccagtactatgtcgaaggggcttggtgagagtgggcatccttgtcttcttccagatcttagacagaatgctttcaacttttcccattcattatgatggtggctgtgggtttgtcatagatggcttttattacattaaagtatgccccttgtattccgattttgctgaagttttaatcataaagcgatgctggattttatcgaatggtttttctgcatctattgagatgatcatgtgatttttgtttttaattctgtttgagtggtgtatcacatttattgacttgtgtatgttaaaccattcctgcatccctggtatgcaactcacttgatcatggtggattatcttttcgatatgttgttggattcagttagctagtattttgttaagggttttagcatctatgttcatcagcaatattggtctgtagttttcttttttggttatgtccttccctggttttggtattaggtgatgctggcttcataggacaaattagggagggttccttctttctctttcttgtggaatagtgtcaaaaggattggtattaattcttctttgaatgtctggtagaattctgatgtcaatctgtctggtcctggactttcttttgttggtaactttttaattcctatttcaaacttgccacttgttattggtctgtttagggtatctaattcttcctgatttaagctaggagggttgtatttttccaggaatttatccatcttttctaggttttctatttatgtgtataaaggtactcatagtagccttgaatgatcttttgtatttcagtggtgtcagttgtaatatctcctgtttcatttcttagtgaggttatttggattttctttcttcttttcttggttaatcttgctaatggtcggcactccccactggccgcagcctgacacgccacgcggccccccagtctcctgccgcccctcccccaggcatggcacagggcctcgcctcactatggcagcagcacggcacagcatgctcgacttcacgctcggcgccaaagctgatggtgagactgttctaaaaggcctccagtccattttccaggagcaggggatggcagagtcggtgcacacctggcaggaccatggctatttagcaacctacacaaaaaagaacggcagctttgccaatttgagaatttacccacatggattggtgttgctggaccttcagagttatgatggtgatgtgcaaggcaaagaagagatcgacagtattttgaacaaagtagaagaaagaatgaaagaattgagtcaggacagtactgggcgggtgaaacgattaccacccatagtgcgaggaggagccattgacagatactggctcaccgccgatgggcgcctggttgaatatgacatagatgaagtggtatatgacgaagattaatcttatcaaaatataaaaattctacactcgaagcagtttggaaatattctcatcgttagtggggatgttaatttggcagagagtgatttggcatatacccgggccatcatgggcagtggcgaagaagattacactggcaaagatgtactcattctgggaggtggagatggaggcatattgtgtgaaatagtcaaactaaaaccaaagatggtcactatggtagagattgacgaaatggtgattgatgggtgtaagaaatacatgcaaaaaacgtatggcgatgtcttagacaatcttaaaggagactgctatcaggttctaatagaagactgtattccggtactcaagaggtacgccaaagaagggagataatttgattatgcgattaatgatttgacagctgttccaatctccacttctccagaagaagattccacatgggagtttctcagactgattcttgaactctcaatgaaagtgttgaaacaggatgggaaatattttacacaggggaactgtgtcagtctgaccraagcactgtcgctctgtgaagaacagctggggcgcctgtattgtcctgtggaattttcaaaggagattctctgtgtcccttcatacttggaatcgtgggtattttacactgtttggaagaaagctaaaccctgacgatcaatagcccctaatcacatgtgctgcaaatagccttcctgacctccatatgctgtacatgacatcgaaatgagtcaggcaattgattgtgaattccttaaagttttcctttttttaataattatttttaatttaaaaaagcaaatggaaaatgtatattttgatgagcttagggtgttatttttttgaaagtcagatgaaggatggttagacagcacagcgaagactgctaaatgcactgatccccccattagaatgtgatttttattcctttttatttctctgtgggcttttgtttttgttttggtagaccttcaatktggatatttggaggagtgaacatcattgttttgctggagggaagatcttgatggtgtttcttttcccaaaaattgacttagatattaaaatttggtgcttataagagaaagttaaaaaaataggattacttcaattaaaattacaaaagagaccaaaaaaatcttgctaatggtctatcaatcttatttatcttttcaaagaacctgctttttgtttcatttatcttttgtattttttttgtttcaatttcatttagttctgttctgatcttggttatttcctttcttctgctggggttgggtttggtttgttcttgtttctgtagttccttgaagtgtgaccttagaatgtcagtgtgtgctctttcagtctttttgatataggtgtttagggtatgaactttcctcttagcactgccttttctgtgtccgagaggttttggtatgttgtgtcattattgtcattcagtttgaagaattttttaatttccatttgatttcgtttttgacccaatgctcattcaagagcaagttatttaatttccatgtatttgcatggttttgaaggctcctttggatctccagttttattccactgtgatctgagagagtgcttgatataatttgaattttcttaaatttatttaggcttgttttatagcctatcacatggtctatcttggagaaagttccatgtgctgttgaatagaatgtgtattctgcagttgttggatggaatgttctatatatatctgttaagtccatttgtttcaaggtatagtttaaatccattgtttctttgttgacttcctgtcctgatgatctgtttagtgctgtcattggagtattgaatttccccactattattgtgttgctattagtaatttttttatgaatttgggagctccagtgttaggtgtatatatgtttaggattgtgatattttcctgctggacaaggccttttaccattatatgatgtccttctttgtctcttttaactgctgttgctttaaagtttgtttgtctggtataagaatagctacccctgcttgctttttgtgtccatttgcatgcaatgcctttttccacccctttactttaagtttatgtgagtccttatgtgttaggtgagtctcttgaaggcagcagatggttggtgagttcttatccattctgcagttctgtatcttttaagtggagcatttaggccatttaccttcaatgttagaattgaaatgtgaggtaccattgcattcatcgtgctgtttgtttcctgtgtactttgtttttttttgttttttgtttttgctttttaacttgtatttttgttttataggttctatgtgatttatgctttacacaggttccattttgatgtgtttccaggatttgtttcaaaatttaagagttccttttagcagttcttgtagtggtggtttggtaatggtgaattctctcagcatttgtttgtctgaaaaagactgtatctttcctttacatgtgatgcttagttttgctggatacaaaattctttgctgataattgttttgcttgaggaggctgaagatagggccctaatcctttctagcttataggatttctgctgagaaatctgctgttaatctgataggttttcctttgtaggttacctggtgcttctgtctcacagctcttaagattatttccttcatcttaactttgaataacctgatgacaatgtgcctaggcaatgatgatctttttgtgatgaatttcccaggggttctttgtgcttcttgtatttggatgtctgggtctctagcaaggccggggaagttttccttgattattcccccaaatatgttttccaagcttttggaattctctccttcctcaggaacaccaattattcttaggtttggttgtttaacataatcccagaattcttggagaatttgttcatattttctttttcttttttctttgtctttgatggattgggttaatttgaataccttgtctttgagctgtgaatttttcttctatttcttcaattctattgctgagactttccagagcattttgcatttctaaaattgtgtccaaagtttcctgaattttttattgctttttctttaagctatctatttccttgaatatttctcccttcacttcttgtatcgttttttggattaccttgcattgcacttcacctttctctggtgcctccctgattagcttaataactaacctcctgaattctttttcaggtaaatcgggtatttctcttggtttgaatccattgctggtgaactaatgtgattttctgggggtgttaaagagccttgttttgtcatattaccagacttggttttctggttccttctcatttgggtaggctctgtcagagggaaggtctagggctgaaggctgttcatattcttttgtcccatggggtgttcccttgatgcagtactctcccccttttccaagggatgtggcttcctgtgagctgacctgcagtgattgttgtctctcttctgggtctagccatccagtgagtctacccagctccaggctggtactgggggttgcctgcacacagtcctgtgatgtgaaccgtctatgggtctctcagccatggataccagtgcctgttctggtggaggtggcaggggggtgcaatgggctccatgagggttagctttggttttttttttttttttttttttttgagacccaaggtggaggcagtggtgcgatcccagctcactgcaacctctgcctctcgggttcaagcgattgtccctgcctcagcctcctgagtagctgggattataggtgcccactgccacatctggctaatttttgtagttttagtagagatggggttttgccatgttggccaggctggtctcgaactcctgacctcaggtgatccacccatcttggtctcccaaagtgctgagattacaggcatgagccacgcacccagctactttggtggtttaatgctctatttttgtgctgtttgacctcctgccaggaggtggcactttccagaaagcatcagctgtggtagtatggagaggtactggtggtgggtaaggccctagaactcccaagagtataagccctttgtcttcagccaccagtgtgtgtagggaagaaccatcaggtgggggcaggggtaggcgtgtctgagctcagactctccttgggtgggtcttgctgctgttagggatgggggtgagattcccaggtcactgaagttgtgtgcctaggaggattatggctgcctgtgctgagtcatgcaggttgtcagggacatgggggaaagccagcagttataggcctcacccagcagttataggcctcacccagctcccacgcaaattgaagagtcggtctcactcccaccgtgccccacccaacagccctgaatctgttaccaggtggtggtggccgagatgggcatgaaaacttgccccaggctacccacctcccagctgtgaaagaaaagagcttggttcttccccacctgtggagtctgcataccagatttgcgccttgccccaagttctggccaagaggcttctcaccccgctcaaattgttacaaagttcagctagagctttccttctcccagtggagttttaccccttgctcctctggccactcttcgatggatccctgtggtgccaggtgggaatgggctgcctggagacccagcaagctcccagggcctttctgctgcttcctctacccctgtatttcacttggctctctaaattgactcagctccaggcaaggtcagaaacgtctcccacaaacagaccttcagcttctccagtgggattgtgtgttctggagacaagggtctccctttcccacctccaccgttagggcactcacagaatatatttggggtgtctcctgggtcctgcaggagcagcccgcttccttcagaggtctgtgggtcctttcaggattgctggtttgttcttgcagttgatctggagcttaaattcacaatgtgagcctccgcacgctgctgtgtccagagctgcaaactagtcttgcctcccatgtaccatgatgatccttctcccctgctacacacttttaaacaaccaggtcccatgagaactcactcactatcacaagaacagcaagggggaagtctacccgtatgatccaattacctcctaccaagcctctcttccaacattggggattacaattcaacattagatttgggcagggacacaaatccaaaccatatcaattagcttgacctctcccagcctcgtcttcctcaaacacctcccacctttgtcaatcatcacttgccctctgcacttcaaggtggaactttttactagctttcttatattgatattagaaatcttaggagagtccaaatcttttagtattttgaaaaatggtgcattttatctaataactaaaagaatttaatacaacacattttatagcaacttgaagttttaaagattcttctcatattttctaaattaaaacaaatagcaggccaggtgcggtggctcactcctgtaatcccagcactttgggaggctgaggcgggtggatcacctgaggtcaggagttcaaggccagcctggccaacatggtgaaaccccatctctactaaaaaatacaaaaattagctgggcacggtggcgggcgcctgtaatcccagcttctcagaaggctgaggcaggagaatcacttgaacccaggaggtggaggttacagtgagccgagatcgtgccattggactcctgcctgggtgacagagcaagaccttgtctcaaaaaaaataaaaaaaaaaaggcattataggtgttttttgaatgactttgaataggattaattattctgtatcacttaaaaggcctaattggcctagttctagtatcctgagcccaattccagaatgctgagctacataaactattatgagagggggttgtttgagaaggaaacacaaccaccttctgggtggtgagcaaggatcaggctgtatacagctgaaggaagttcagtctagcaggcctaacatagtacacatgtatattacatattatattatattatattatatacataaattatatacatataagttattgcagtaagtaataggtgttaactctcacatatggggctcatagctcatagggaaaggagatccactgtaaagtaacaagagcagtgtattttatgtaggcagacatggcaagaaggaatccaagagcagtaactatttaaactattgttgatcaacaggaagttggcatatggaagaatgtctgtaggtagtagggcttcatttctcttgagagagacaatggcaagagtttaggagagcaaatcttagagggattttgtgtataaataatcaaaataaggatccagttacccaaattacaagaaaggggaggacaaggtcttaaagcctgcccagtcattgctctggaggtcaatgtcccagtaatagcaatttgaatactgtaacacttttctattgttgtctaagaaattaccacaaacgtagtggcttagcacagcacacatttattagttcacagtttcttttccacaggtcagaagactgggaatcagttagtagggtcttctgctcagggtctcactaggctgaaatcaaagtgttgggcagggctgggacctcacctgaggtttggagtcctctgtgttgaacctcatttagttggctggcagaattcacagtcttaagggggtaggaatgaggtccttgttttcttgttggctgtcagctacagatcattttcagctcctacaggccaccctcaggtctcagccaatggtgctttcacaagatggcagtttacctcttcaaagccagcaggagaatctgcctccagtaggctacagcagagtcttataaaaggtaatacgatccctggagtgactatcccatcacctttgccatgtaatgtagcctaatcaaggaaatgacggtcctcacaagactagtaactacagagtggagtgctgctgcagacaaattcacggtctccacaactgtatcagccagcgagaaaaaccagcagtgggaaggtagccttccctcacattccctttcaaatcacaataagtgcatctaattggc

SEQ ID NO: 94764 - DNA, 179012 bp, Homo sapiens
  misc_feature (1)...(179012): n = A,T,C or G
gagacagaaagtagaatggtggttgccaggggctggagaggggcaatgaggagcggttcggttggaacagatatgagtttgggaagatgaaagttctgtaggtggatggtgatgatgtttgcacaacaatgtgaatgtatttaacatcttagaactgtacacttaaaaaggttaagatagtaaattttatgctgtatgtattttgtcataattttacaaaattaaaggcagtctcattagttctctgttataacttggatgccagttcatgcagaaaggcaatctcttcaggtctcgcaggatggagtagtgacctggaagagaatcctgctcactggagcagggcgctgctctcttttgaagatgcagtggaggttgtctctttctccacacaaagggcaggaaagacgacaatggcagggtgtggggggagaggcagtgaagtgcattcagcaaactgtggagttccatccagatcaagaaattctccttacatgaagtctgtggtacagttctggctttcatgcccactgtcttctgtgatgctcttggtaaccagcagagagggcagggcaggttgtgtcatatctgcttttcgtgagtttagacaggggttctccacctcagcactattatcttttgggccagaggattctgttgtgtgtggctgtcctgtgcattgttggatgtatagtggcatccctggcttctacccactagatgccagtagccctccctacccacccagttgtgacaaccaaaaatgtctccagacatcaccaatgacccctggggggcagaatcacccgtttcagaaccattaggttaaaagttttgagactcacacagagtctgcacaaacccaagtcttctaattccagatctcccattccaccatgacaccaagttattctccacctaaggcccccttgacagccactcctcacccttctcctccctagagcaggacatcaagggatgcctcgctgggctcgctgggcttcctggccctctggctcaagtgggtcagcaaaatgggagccactggtgagagagaggaggggagaagcaagagggtggggtgtgtcttcacctgtcctggcccccctccctgcacaccgatggggactatgacaatgagttggctacaccaggctctggcatgacctctgcctccccctgcccagtgaggcctgggaacaaggacagctcccacagccacagcccctgcctgcttcccactgcctcgtccctggtgtgacccttgcatgcctctgtgcatggacctttcattcatttatttccaattaaacacttctgactggctcatctgttccagcctgttaaaaccaatcaccccaaacttaggacaagaactaaaagtcagcacttgaacacgctgcagctgattatccacaccctcccttccagcaagctctctgctgctctattgaatacgtctcccctctctgaaagcccctaatcctgctcgctaatgctcttacggtgtgcttctcccaccaccttgggttaagttatttctgtcccatcttatctcctccactggacttagggatttgggaggaaaaaagaaagggattgtatttcactccatttatatgaaaatgaattattttgtgttgttttccatttttcttcaatacttggatacaaaattttattaagatatttttagaattattttgaactttcacagtttttagaataatctatgaaattttcagttttggaaactttcacagatttctttctaccttttggatctcattgggaaagtactccaggcactcgtggcattactctcagctgttggggactaactggctcacggcatttttcagagctctacaggggccaaacaagatgcccggcttagtctaataagctctctgggtgcccttgggcctgaaaatactaacttttgggtattttcttggactcctcagaaccgaatggcacctcacttcaaatcatggtccacttgttaaacttactgagtgcttgatacgtgcctagagtgtgatccgcactcttaatatatggataattaattcaaatgtaatctgacttaacatactctctactccaactctgcaggcaaatttgtagtggaaggagtctggtgcatgaataaatagatacaaattcagtacaaaatgcgtgtttcatgacattttcatggaaaggaagtgaggaaagttgggaggagtagatgtgatgaacatctagttttcggggaggcctcagggatgcctgaaaggaagtcactacccaatccaggtagccctgggccaggagaggtgaggaggaggggctgagcacctgggggagctagtgacacagacagaggagggcccataagcacaccacaaagctggagaaagacagcagttaaagaaaggcggcataaagtcagaaacaagtctgagatgcaacagtgtctcgctctgttacccaggctggagttcagcggcatgatcacggctcactgcagcctccatctgcagtgatggctcaagcaatcctcctgcctcagcttcctgagtggctgggaccacagacgcgtgccaccacgcccaggctgctcttgaacttctgggctcaagcaatcctcccgccttggcctcccaaagtgctgggattataggcgtgagccaccacacccagctagaattagtttcttcaaatgctaggcactgagtaacacagaatgcctaagacatgatcactgcccctaggaagctcagctgaatatccaagtatgcaagactgcctggatgcccagaaggcctaggaatgacatgaagaaacctaagcccacaagccggggtctgtgagagccaagagagaaggctttctgggcagggtgaccaaagctgcagcctggcaggcagggcagctctacaccagcctcagaggagcaggcagggcctactgtgctgcaggcatcttcacagagaagacgcaggaagggcttctgagggcagacgcagggaagggtgcggggctgattctcagtcaagggccatcttctctctgccctgctcatatgtgccactgatggtatccagagtgaagcagtgaacagtgtagggctgcggctggtggctgcagtgaggtcaaagacctcagtcctctgggaacctctctgatcctccagagacctcaggggcacaaataaagcaatccaacatacagagaagacagacatggaaaaagtatgtttgggtttttagagactgtattagtccattcttgcatcactatatacaaatacctgagattgggtaatttataaagaaaagaggtttaattggctcatggttctgcaggctgtacaggaagcctggtgttagcatctgctcagcttctggtgaagcctcagggagttttcgttcatggtggaaggcgaagggggagcaggcacttcacatggtgaaagcaggctcaaggtggggggaggtgccacatacttttaaataactaaatttcatgtgaactccaagcgagagctcacttatcaccaaggggatggcccaagccattcatgaggcatcttcctccgtgattcaaacacttcccagcaggcccacctcccatcggtgattacatttcaacatggatttgggtggggataaatatcctaactatatcagggaccatctcaaaaaagtgtcccagaggagcaggggttggaagaaaaggagttttgtgtgatgcgagcagtgccttcatgaacatggaatgtggggccatcctggaagaggtaaccctcagccacacacacacacacacacccacataatggctttatatcctatctcaatagcttgtcctgaatcccttcttttgggagcaggagctatatctatctttagcgttcctgtaaataccacagcacctaagacactgcatgaaacccagtgtgttctacgggtagtcggtaactaactgtccttaaagatggtcctccctaatgtgggcaaatgaagccagtccaatggccagtgacgtacacatgcagttgtacaggtaatggtgttgagtcagatttctctggttgctatggtttcaaggtcactggatgttaatcaggcagctttgcttgtaccctgtccctatgctttccctaaaactctaaactgacctgagaaacctctaacctgacatgcaactagtcctctatgctatatttccagttgccatcttggacacctctacctacattttgcggacacagcaacgtgtcccaaactggaatcttgttcccttgcaaacctgccctccacttgcatcccttcctcatcattcactgtgttgcccaaactacaagcatgagcattcgctttttatcctcgattctggctctctgtcgcgtcggcgatccttccccccgttgctgtggagatgcctccctggcacgcacctgaaccatagctggatgctgattgctctttctgcctcctgcttttacttccaccctcacctcctccacactcctgccaccgatgtcttctaaaatgcaaatgtgagtacatcactccccacttcagtatctgtcagtgaccctgaaatgcattcaaaaagaagtacaatatcttggcaaggtctaccagtcttaattcagcgtcgctgttccttcagtctcatctccggccataacaaaacgtcctgtgcagtgctctgtcatgcttccaagcctgacccccctcaccccagtcctgtagacttgtcacatgtcatgtccttctgattgctggttttttctatttccatgcaagcatgtgaactgcttgaggacaagggtagtgccttgttcaccatgaaatttctggcatcatgctttgcacatagtagttatccaacaaatgtgggtcgaatgaatgaattgtatgcaacaccggatcaggagatatgatacaaggatttgggtggcaaaggattgtctcagagatgcctctaagcctccctaagagttcatggccataaaccaatagtttcagagctactcctttttgatatggatatatcctggacttattaaattgacagcacatattttatttttaaaatgttattaagttaactaggggcatcgctctatcctcaaaattgttttggagacaccattaacccacttaaattattaataaaaaagccacttattccgcacaaatagttgagactgtcctgcttacctacagatattcgtctaagagccggcagacattcagatacccgcagacagaacttactttctggacctcccacaacattcctccctttagatcttttttttcttaccccgtctttcagctttctcattgcagaactgctgagaataatggaaaatgctttgcctggaaacttccaagaacaaaactccgggggctaagagaacgcgatgatttttaagctgccagttaagatgcagctccttcatcatcacaggtgaagcaccaatgcctctcgcacgtgaaatccgtacgctcctagagtcttactacctaatgcatttctgcaatctgggacgcctgtccttagcgtcttcaatagttttgggcacgaggtggaccgcggaagtattgtattgaaaagttaacgtttttcccttggacaccctctcctcacagctattaacaagctgagagaaatcaggtgactcccagtcatgcagaggtttcctcaccatttatgatcaagccaaattaaagaataaaaataaaatcctattggcgcagcggccaccaagtctttgaggcctcgcctcggtgggcggggccgacgccggaggagaggggctgcgcatgtgggcgtgacctcgcggaaggagctgcggagggcggggccgactggagaggggcggggctgtcgggtgggtgggacctcgcggcaaaagctgcggagggcgggaccaaccaggaaaggacgggactgtcgggtaggcgggaccttgcgggagaaactgcggagggcgggaccaaccagggaggggcgggctgtcggatgggcgggacctcgcgggaggagctgcggaaagctgagctggtgaggggaggggctggtcgaggggaggggctggtcgaggggaggggctggccgagggaaggggccggccgaggggaggggccggtcgaggggaggggccggtcaaggggagggcccggccaaggggaggggccggtcgaggggaggggccggtcgaggagaggggttggtcgaggggaagggctggccgaggggaggggctggccgagggaagaggaggggaggggacgggctggtcgaggggaggggaggggagggcaggggacgggctggtcgagagaaggggagggcaggggacggggtggtcgaggggaggggacggaggggaggggagtggagggagaggagggaaggggaggggagggaagggaggggaggcggggcccagcggtgtcccgcgaaactgccgctcgctcggttcccgggcctccccgtgcgcctcagtgcaaagcgtgccaggcactcttgactgcaacgagagccgcggcggtgagggggcaaggccaagaggccacggttcgcgtttcgccggctgcagaagttgttgccatacatttcaaatgtgcatttcctacgtctcacgctctgtcttgcgcctccacagcgggccacggccctgtcaccgcagtcgcagccacatgctccctcccctgagtcggctcagctctgctcagcggtcagccccgcgccaggaggccgcggcctgcctgaggccggctcgcagcgactcgggacggagggcgggggcgtgaacgggtcgcgcggagagggtggggggagcggggagcgttagggtacgtgggggcgcgtcgaccaatggcagggcgctgttgagtgcagcggggcggggccgggcgcgggggtggggcgagcggcgggcggggcggggcggccggccggggggtgggaggagaggggcggggcgggccggccgggggaggggcggagagacgccgccgctgccgccgccgccgccgccgccgccgccgtggctgccgcagcctctgggagtctggaaaaggggaagcgagagcaagcgaaagactcagtccccgggcggcggcggcggcggcggccgcgggggcgcgacggccggggcgggggcgctgctgctgcgggggcaggcggcggcaggggcggcggcggcggcggcggcccgctccagccatgccgaataaaaacaagaaggagaaagtgagtccgggcccggccgcgggacggagggagcagggagggactgccgggggagggcgcgacggcaccggggtcctgcgcccgggccccggctcagttccccgcctgacgccgcgggcttcgcgtccccgagggcggccgagccaggcatccccgggcttctctcggcctcatgcccggtgggggcggggagcccggggatcgcgccggagccgcggggcgcaggcccgggccgctgggaccttcgtgatgggccggggctgggcgtggagggagggcgcggcccggggagggggtcggaggggcgcccgtttccgacagcgcgccgtgggcttgggcgggcaggtgcggccgccgagggggttcgcagcctcgcaggctcccggaaaggagcttcagggatgggggctgtagacgcctggggagggacccctgtacgggggaaagggagcgagaagggaccccgctgagagctggtaaggaattctctgccgccccggagggacgctctggggctctcgaacactattattatcctgggtggcggcggcggtgagggctgcgagcaagggtgctgcgtttgcattcgggggggcgggtatgtttctgcttcaggtggagctctgtagcgtttcattatcaccccagaaatcctcactcatagggtttagggtgggagggtagaaagggatgtgatgtggatctcaaaatgccagaagcactgtataaaattggatttatctgttttctgcttgaagttttcaacctcaaatgcagataaaacgaaaagaatctgaatgggggttggggggcattgcactgttggaatcctaaacggtatgatatagaatttcctaatggtatgaattaaaaatatcagaagctgtagttgtataaatcacttttaaaactgcatttggcttatctgatgtttacctgtctaaaaagtgagaagactaattgactttgcttgatgtttaccaggaatcaccaaaagcagggaagagtggaaaaagttcaaaagaaggacaagacacagtagaatcagaggtaactgtcatcaaatattgactttgtattttatacacagcttttaacttcaggtagaaaaaccgagagtgataaagcctagaatcttctaaaatgtttccctatgtgaggttttttttttgtggtgtcttttataaccctcaattttagttgtttaggtatttactgttttgctttggaaaactattaatgattttatgaaaattgtgcttgcctatggggtttgtttgtgggtcttttggggttttttttgttttttatttttttgagacggggtctcactttgtcacgcaggctggagtgcagtggcgcaatctctgctcactgctaccccttgccgcccaggctcaagtgatcctcttacctcagcctcccaagtagctgggaccacaggaacatgccaccacacccaacaaatttttttttttttttaatagagtctcactctgtcacccaggctggagtgcagtggcgcgatcttggctcactgcaacctctgcctcccgagttcaagcaattctcctgcctcagcctcctgagtagctgggattacaggcacccgctaccacgcccggctaatttttgtatttttattagagacggggtttcaccaggttggtcaggccggtcttgaactcctgtcctcgtgacccgcccaccttggcctcctaaggtgctgggattacaggcctgagccaccgtgcccatcctggatctggtatttttaagttcatttcccacacctcaaacccagcaaccctcctgtatagattggtcttatgcagtctatggtgttgctatgttgcttttagctttagggtcatctccccaccgccacttccattgcaagctgccaggcaactcagtggttagttctttttcttccatcaccttgttttccttcaaaccacctctgctactgacgtcctgggctagctccctatttctgttgacggtcccttggcctctttctccaataatgttggtatttgaaaaaatttacctagttttggtattttattattgttcacattgtgtgtgtgtgtgtgtgtgtgtgtrggcgcgcgcacttgcgcgtcggccacttgtaaatttctttgcttcttrgctttggcctcattgaggaacagctggaatgccaagtgagcattgcatctacttgaccaaggttgatgctgttccttcacaccgtgaagtgccttcagaggatttgcagagtcaccactttcctttgccttttcttccttgtgactaattgttgaactagagcacctagggccaagggtccaggagctgcgtggacccaggcagagccagtaggtccttttgaatccatgggtagcacataattgggttaatagagtgtcagttatccagaactggatcattgaagccccagtcttatcacaaatgacgtttatttgccagtgtcagacttcttcctgtaagccaaattagaatgagttcagttctgtctgggaaacacagttaactggcgatgatctgcagtggacttttttttagccctgcattctctcttttctatcatttggtgtattctgaacctccctcctcttcagcaggtggtttattccagcaaatctgttgccctccccaaagcaaaaagcagaaatccaaaagattccttaaatgtcaatagttaggatcatttgtgccagtctgtccctccctgtctttatagcagacaactgaggtttactgtgccatgctgggatttgacttgtttctttcttccctgtcacccttttgactaaattcatttcgatgaagatgaaatgtaggtgctttatgaaggtatatgctatawgccttttttttttttttttttggtcttttgatctttcattaaaactgctaagatttcttctccccagagctttcttgctaatgtgcctatatcctcttactttagctatattccttatacaaaggagcatcagtgtgtatatatcatttatttctatttttagtgggaagatcctggctgtaaggatgaataatgttaagtttaaacctgaaaaatctcagtagttcaaagataccaaaatcactactatgtgaaatgtgtgttttgaaagcagtttgccagccgtgtgagacctgcggtgtggcctgcagtgcctgagtatgatgccccacttgtctttttgtattttttctagtgctactgtctaagagctggagctacagagcttgaaattaccactgaaaacactgaaatgttgggcccttcactgcttcctcataaggataccagaggcaacctggcatattaagcttgacacttggcagatcactgtgtaaattgtttttcaggaatacaagttgggacacttctgttcatttgacctttgagttgacccttaaattttattattgttttttttcccctcagtcttcagctcactgcttcacttctagttccacccacttaccaaatatgattgactcatgcaggtgaattaaaccattattgcacactttttccctctcctctctctcagtattactcttaacttgaatattttaacctgaacaatttaaataggcttgacattcccatgctgctttcaagcctttttttttttttttttgagacagagtttcactcttgttccctggctggagtgcaatggcacagtctcggctcactgcaacctccacctcccgggttcaagtgatcctcttgcctcagcctcccaagtagctgggattacaggctcctgccaccatgcccagctaattttttttttttttttttttttttgtatttttagtagagacggagttttaccttgttggccaggctagtctcgaactcstgacctcaggtgatccgtctgcctcagcatcccaaagtgctgggattacaggcgttagccaccatgcagcccctttcaagccttttaacatcatgtcaccttcacaatgagcagttgctcccattacccagtgaactcaccttctgatgggacagttaccctagttggggcttctcagccttgagagatgtgcagagcagggacctgtccagggcagagcagccagacagcgtggaaataatccaaacagagaaagcattcaagaacttggcctctggttgacttaacacactacttcaagtatatggcaggtctgtataataaactcctgcctgtctagtcttcagcctcatagaaagcaagaaagcaggtggcgtatgttgcagaacaattcttgggtagaacaaggggacatttgatggtttgggtttttcagtaagaaagatgaagtcctggagtatagggtagagtggtacagtggaaaatatttcagcttgggggttagaaaataaacatgccgattcttgctttgccataaatgatgtcacctaacttgtgtgaccctgttttctcatccctaaaatgatttgataagtttaagattaggctatttttaaatgtatggaagaaattgggtgttacccttcttgaaagacattttccctgcaagtatggcaggctgtatctttcagtgtaacaaagttctattaaaggtcataactgctgccctgtaacttttgccttattctagaaacttctactccttgaatgacatgtgttggtacatgtttcttctctttcagatagaatggttaattttgacttgttgcttctgcacacgtgtcctggaaataaaagtttcttcccactacttattgctgatttatttcataggaagtcttaaggaaagaggcaaaaaacgggctcatgggtcacttgaagttggaaaattctgtggagattgacaaaggagactcacttttgagcatctgttctcagtgtaaccttcaaatctgtggaaacataactaggcacattttatgattatttagaatgttaataaattgctctgagtttcctcaagtccattttgtaagatcagaccataggtgggtgttgtttcttttaagtgtgtgtactgtgtccaatgttacatttttagaagtgttcatgctttttgtaaagtgattcgttttaagcacattaaaggtcgtttgagtattgtcatgtattttacacctgcttcagcttagttttgtttgaaagtctctacagcaactcttacataatatctgttgctgaagagaaagaacaatcctctctccaactcgttagctagctttgccaccttctacctttagtaaattttttcctgttataatctgtccctttacattccagtgccaccactccctgatggtctagacctagggagactgacagtcgcctcaggtcgcataggtgctaggcggaagggtaatttttttagaaattaaaattgaaattttaaaaatatttaataatacacccattaaatgttaacaacattgttatgaaaaatatctttgcaagaaatactccttttcacagtctctgtagcaagagtttttacctgagtaaggaggaggacaaggacagtcattttgttcggcacaactcctccaaggagagcccctgacacccctgtaggctcacttctgagcttggggctttcgctagaacctcccatgccttagcttccatcagtctcttcccacctttttttccatacaaccctaagctgaacttgagtgaaagagaagaccaagagaagtaatactttaaaaatctttttgaaattcatatgtaatgattatggagtaaatggaatcatttgcttttaattgccacgtcttggctccctcttcccagcgcctccccatggtctttccttagagcccaggggcatcagaaagaggttctgcggggaggatccatccctggcagccgcagcctcagctcccgagctttggggttgttaggaggcagatgtcctgagcttgctgcccttgaggcttgagggagtggtgggttcttccttaggcagctcccttctctagcccccattcctgtcctacatcacaagctgcaaggtcggtagaccccaggtacctcctttgtgacctccactgctctagaccaagggttcccatctgaacacttgactgtggggcaagatattttgttgtggggctgcccagtggtcctctactttgtaggacattcaccagcatccctggccttacccctggatgccagtggcccactgcccccaccaactgtgacaaccaaaatgcatccagacattgtctggacattgtctaatgtctcctggaggatcaaatcgccccctgttgagccactgcactataaagacacctttccaaaatatgtacatttgcttacaaaccatgcctggcacatattcatctgagcattatatttcctttagaacagcagtgagtgctcacacagaagggagatcactcctttatactcttcacaattatcaagcaccccaaagagcttttatttagtgagttatatctatctaccgatatttttccttagaaattaaagctgaacgtttttaaatagttcatctaataataacagtaacacccattacatgttgacataaaaaacatttatgtggaaagaatttttttttttaatttgctgagaaaagtggcatggctctgtttttgctaatctgtttaacgtccggctccatcgaaggtagctgtctgcccctgcacgcaagctgttctgatttcgtatgtgtagcctgtgaaaaactccccataatgacgctttaaagggcaaatcacatcttcatgttatcataaaaaccgttttgaccttgtggacccctgaaagggtcaagggacacaccccagaccacactttgagaacccctcttttagaatgctctacccccattctctgctggccatctgaatcctttcatctttttttttttttttttgagacggagtcttgctctgtcacccaggcwggagtgcagtggcgcaatctccgctcactgccagctccgcctcccggattcacaccattctcctgcctcagcctcccgagtagctgggactacaggcgcccgccaccacgcccggctcattttttgtatttttagtagagacagggtttcactgtgttagccaggatggtctcggtctcctgacctcatgatccacctgcctcggcctcccaaagtgctgggattacaggcgtgagccactgtgcccagcccctttcatctttttagctccaactcaagctcatctatccagaaacttcagcgaagctgtttctcaccatcttggactgtgtgtcttccatattttaaatgcttatagcaattacttactagaccagcggctggctgtatgcagttctgtgtcatgtacactgtgttagatgaccttcgttcccctgtgacttgccttcctagctagatgcagtccttgaaggcatcagttgagctcgagtcttctttgatcttgccatatatattagggcctagagtcaagaagtattgagttggtgggttttaaaagtactgaaaaggagaccttgaagtcagttaggttgctgatttttctgatactgtaaattagcaacaacaataaaaaacttgtttattaagaggcttatttatcacttttttgatccaataagggaactctaatgtagaatttttattcagtgtaattcattttaaataaataacagtatactaaagcagaagattatggtacttaggtttttttctaatgtcttgggaaaattttaaaaagtagagtattttggtttttttcttagttttcttttacatattcagtggaaaaaagtgtagtctcataagatcttggttaaaaggtcagtggtaaaaagtatagcctcataagatcttattttaattaaagcacttcaaaataagatttccatttaaatacagttatgcatcacttaatgagggggtacgttctgagagctgtgttgttaggcaatgttgttgttttgtaaacatgatggcatgtgcttaacacaaacctaggtggtagtctgctacacacctagggcatatggaatagcctgtcactccaggctacacacctgtacagcatgtcatttaactgaaccctgtaggcacctgtaacacaatggcaagaatttgtatatctaaacatagaaaagataccataaaaatatggtgttacaatctaaggcaccaccatcatttgtgcagtctgttgttatctgaaatgtcattatgtggcagtgactgtaaaggtttctctgtgatcttttatgctttgtgtttcttaatttattttgggaatgtttctcagtagagcatagctacatatatatttaatatgttttataagatagggtttgttttgagcatgtcttgttctgtgcgagcactgtgttgaggattgaggagataaagacctgttaggaactgaagtagtggctgtttccatcatttttgaagtgtagcacctgttgcttctggacatccagtgtacttgggagtaacttggcccccactcagttagatcttattgtccttgagtggatgggacaagatggaacccatttcatgtaaagagccacctggagctttgggtgagaaaatcagatgctttaaagcgtctagggagacacgggcttaccataaaattatggagttccagaaagcacattggaccctagggtgtgtatcatggttaaagccaatagataagatcagcattcctctccctcttcagtaaaagcttcgctacggtatatgcaattctagaaagagctcatcaagcaaatgatatgaaatctaaaattttccagttcaagaaagaagctcaaagttcctacattaaagcaacagcagggtgaatggcaacttatagccctgccatgtgatggtggaaaggtttccacctgcatccttagcggagctgagtgagtcagtctgccaccaacatgaaatgcggtgatgttttcctaaatcacagggaagattcatctggaatatttcaattcgaagatgggtctccagtgtttccttaaacactgggtacctgccaaagggcagggcacagcggtgtctggtttagcacagtgtcctctctaatcacctcacacgttcctatcagtatgttgttttaagcagagactctccagtgctcctgcagtgaaggaagtgctgcttcccaaatccaaacagcgttgtcatcttcatgttctccacctgggggagtgagagaacaagcctagaaattaagctctccagaaggggaaaaaaatgctttattaagggcatttggctttttcttcatctcgtgtgtgtgtgtgtgtgtgtgtgtgtgtgtgtgtgtgtgtgtgtgtatttttttgagacagagtctcaccctgtcgcccaggctggagtgcagtggtgcgatcttggctcaccacaacctccgcctcctgggttcaagctattctcctgcctcagcctcccaagtagctgggattacaggtgtgtgccaccacactatcttgtatatatttccttaatataagattgagcagctgggcacggtggctcatgcctgtaatcccagcactttgggaggcccaggcgggtggatcatgaggtcaggagtcaagaccagcctggccaagatggtgaaaccctatctctactaaaactacaaaaattagctgggcttggtggcaggcatctgtaatcccagctactcgggaggctgaggcataagaattgcttgaaaacctgggcggcagaggttgcagtgagctgagatcacaccactgcactccagcctgggtgacagagtgagactccatctcaacaacaacacaaaaatggcccccaagagattaatttcagataccctgcagcctgcaggtgttagctctgaccaagggctggcatggcccggtggtaatatcaaattactaaggggctctgaaggggttagacctgccctggccaagatgtttgttgtttgctgcatatggctattttaaatttaaatttaaattaatgaaaattaaaattatgtaaataattcagtccctcagttgcacgggccacatttcaagtgctcagtagccacatgtggccagcagctactctgttgaccagcagatgtggaacatttgcagcttcacagaaagttctgctggacagagctacttcagaccctaccagtattttccaaaataattcttatgggagtgtatttaatttaattgaacttattttgttacctatcaatcttcttaatatgaaatatcaaatttaaggttaaatttaaaggaagagaagacttatattggcaaaagagaaggaagtagataaaattaaggaaagaggagggcaagaagaagagggaatgcatggtgagacgrgagggaggccctgtctactgcttggtctgtggttggcctacacctgatacccacacgagaaagactccattgcccataggagcgggacttggacagacccaagagcagtcacgaccttttgtcctcctagtctttctttatagacattttctcttatttatttatttattttgggttcaaaacacaaaatttattttgggttaaaaaataaagtaatgcggctgggtgcagtggctcacgcctgtaatcctggcactttgggaggccgagtcgggtggatcacctaagatcaggagttcgagaccagcctggccaaaatggtgaaaccgcatctctattaaaaattttttttaaaagccgagtgtggtggcatgcacctgcagtcccagctattcaggaggctgaggcaggagaatccctgaaacccaggaggcagaggttgcagtgagccaagattgcgccactgcactccagcctgggtgacagaatgcaactccgcctcaaaaaataaataagtaaaaaataaagtaatacggaaatcaaggttctcccttcaccttcctcccattctcagacctgcttcacagagcacagccactttgtcctgctgattatgaatggggccactgtccagaacacggaagctgtgcaatgtggcagaggctgggctctggagtcaggtcccccttctgtcccctggagggatcataccctctctcggtatcatgttcctgtttatcttggccgatttctctgacattgcggcttccctccaggggattccttcattctcagtcatccagcaggttcattctgagacctggcatgtgctgagcaccattgcgggtgcagagttcctgcactcgtggagtttgcctccagtgagggcacagaagtggagtgtggagctgcaggtgttttctgcggggcactagtgacattgggcgtgagagcgtctcacctttgcagagcaatggccctggggatctcaataccatgatgacaaccaaaaccactcacatagctccacacaccactggtggacaggaccctctggcagcccctctgctggagattgggaggctgcttcaggtggtcaaggatggtctcaccaagcagatgacatgaaaagtgaaatgtgaatgtcaagaaggaggccacagtgcaaagatctagggcaagatattcattcagccagaggcagcagctagtgcaaaggccccatggaggaagtgagtttgccgtgtccactgccaggtgttcagttgactaaggaaaagtgagggtaggcagagcaggagggatggaggtagggagccgagcacagacaaggtagggtaagatcttataaacagcctgcctagacagggttttgggattttggcagggagggggagttgttttggggttttgtttttagagacagggtctcactctgttgcccaggctggagtgcagtggtgcagtcctagctcactgcagccttgaactactgggctcaagcaatcctccctcctcagcctcccaagtggctgagatacaggtgcacaccaccatgctcagctgatatttggatttttttgtagagaaggggtctcactgtgtcagccaggctagtctgaaactcctggcctcaagcgatcctcctacctcggccttccgaagtgctgggattacagacatgaaccactgagtctggttgggctttgagtttttattctgagggtcatgggaagccactggggtgttttgagtagggaagtaagaggatcttcctagctgctatgtgggaacgaggggcaagagctgaacaaggagaccaactggaagactttgcttctcagatgaagggtttctttgttcacacaggcaaagatgaggcactggcacagctggctgtgggtgggcttgtcatctgaccacttgctttagaggccttggctgggagctggctcttgtgacttttggcccctagagactaaactgcagagaatttgctttgaggtgccagctcctacattagcagccttagtttttcctagacagactggtttctttggagaatccctttttcttgtcataaccactcagtttaccaatgttctgcagagaaggtgtgtggggataaggtggctatggagagatcagtattcagacctaacatcaatctccttttcagctgcatatctcactcctattctctgctatacccagtctctgagtgcgtggcctcggggggattctgtagggacagagcacctgctttctccctccagccccacgctgctttgtggttgccagatggaagttgcatctgttgaatattgctatgctgagatgcaccagtgactgcctccgcaaatctttttattactggaggtcgtaacttgcctcttccttcactctcacttgtaaggcaggctcaggaggtttgctgattgtgagtgcatcatcgaccttgatcagggaaatctgtcctgttttcctttatttcttcctctcatccagaaattgttgtcctggcacgagaatcagtaaacctttttctgtaaagggccagatagtaaatattcaaggcttcagggggcgcgtggtctctactgcaactacttaactctgctgttgcagcaagagagaagccacagacaacaggtggataaacagacgtgagtgtatgccagtaaaacttgatttacaaaaataaccaggaggccagatgtggttcatgggctgtggcttcccagccgcggcctactggaatccaaatcgggttcagcacttggagaagctgctagtattggtccctgggcctgtatctgaaaccagtactagccatggtctgtggaagaggtatcttttttgtttgactctattcaccatctaagagatactgagagatcagtgattcggccctgcccaactgaacaataaatatcttatatctagttgtgaattttgagaattgcagtgtttaaatgaagggaaagagctgcttgtttcatttggtaaatcccttatatgataaaacatctaggagagaggctttgtcacaaatccagttgcccattttgctgtttccatgaaatatttcaaagtagagaaactaatagacttccatgtatctgctgcacagattgccttttactcccaatatactggggtgctgttgcctggctgcacggaaggttgtggggtgtgagggcacttggacattcgggcttgctgtgtctctgttagaaactaatggggcgttgtccctgagcgtgagggacacctctggcatcttgtttcctctacctgaggaagtgcagccatgcttgttgggaagacttgggagaggaccatgtaccactgaggcaggtaacaccctttgcctctgtacctccctgtgggcctggcagtggggctgggcccagggccagcagtccacctaccctggctaggaacctgaactcctgcataatttcaaggcccttctgggcaacaccttgccttgccatgtggactggccacctcatctttccttgtctccagacacccccaccacctccttcccccagccagagactccagaatcccagatcctcacagcaagacacatcctcccccagggaccccgtgtctgttcagtggagaggctctgggaaggggagggaacgacttcctctttattcccgtagcttccatttgagtggccgacaagtgtctcaaatagcatttcagattgtgccccccccccactccacccccgccttcctcctagaaaatgcagctggtgctcgtgtgcagccactgttcagacacgtggaggccacagtgctcgcttggaaccctctgggaccaccgactttcagtggcttctactgaagggaagggccgactattttgatttgggtttgacagataatactgagtttgaaaaataatttcccatcattaagccagacatcaagaggccaaagtaaattctaggtcatctctcccctcactgagtgagttccctgtaaccagcattccagaagagggcgaaaggggaagaatcaagtcctttttttttagatgttgcccaaaccagatcgctaaacagtatcatacctttttactgcgatttcttatcattttaagatagatacccagtttttattttaggagtaaacacttaaactgaggaagcacacctgttgtttctcacttcctattcagccaacactaatgccttctctgtactgagaacagctgatcctcccaaagcgtgtgtgtctccctgtcttcgtggggcccttgctgttctcaccataagcccagaagactcaaggatgctcagcgggtcgtgcagccctctccaccacctattccagaaagtcctcctcaccctaaaaggaagccccattcccaccagcagtcactcctcactccccttcccccagcctctagcagctaccagtctgctctctgtagatgtgccgattctgaatagttcatagaaatggaatcatgcaatatttgtccttctgtgtctggcttcctttacttcgcagaatgctttcaaggtccatccatgttgtagcgtgcgtcatacctcattccctttttttttttttttttgagatggagtcttgctctgtcgcccaggctggagtgcaatggcgtgatctcggctcactgcaacctccacctcccgggttcaagcaattctcctgcctcagcctcccgagtagctgggactacaggtgcacaccaccatgcccagctaatttttgtatttttagtagagacagggtttcaccatgttggccaggatggtctcgagctcctgacctcgtgatccgcccgcctcggcctcccaaacgctcgttcctttttatagctaatattctattgtttggatatagcacatttcatttcatcagttgatggatatttgagttgtttctaccttttggctattgtgaataatgcgctgtgaacattgtgtaccgatttttgtttgaacacttgttttcagttcttttgggtatatgcctaggagtgagattgctgggtcatatggatggtcatttttgtttgtgtgtttaagacagagtctcgctctgttgcccaggctggagtatagtggcgccatctcagctcactgcaacctctaactcctgggttcaagcgattctcctgcctcagcctcccaagtagctgggattacaggcaagcaccaccatgcccggctaatttttgtattcttagtagggatggggtttcaccatgttggccaggctggtctcaaacttctgacctcaggtgatccacccatctcggcctcccaaggtgctgggattacaagcttgagccaccatacctggctttggatggtaattttatgtttaacttgccgaagaaccaccaaactgttttccatatcagctgccccattttacattctcaccagcaatatacaagggttccaattgtagttccacgtcctttatgacccttgttttttgttgagacagggtctcattctgtcacctagactggaatgcgatggtacaatgatggctcactgcagccttgaactcctgggctcaagctgtcctctcgcctcagcttcctgagtagctgggactacaggtgcatgccaccatacctggctatttttttttaatgtagaaaaggggtctcactatattgcccagactggtcttgaacttacgggcttaagcaatcctcctgcctcagcctcccaaagtgctggggttagaggcatgagccatggtgcctggccatgctaacaagttatttttcagtttgaaaaagaataggtatcccagcaggtgtgaagtagtatgtcattgtaattttcatttacatttacctaacatctaaaggtggtgagcatcttttcatgtgcttgtttggccatttgtatatcttttttggtgaaatgcctgttcaagtcctttgcccattttttaatcgggttttctttttgttattgagttgttagagttcttttcatattctggatactagacccttatataatttgcaaatatgttctcccattctgtgggttttttcactttcttgatagtatcctttgcacaaaaatgtttaatttttatgaagtctggtttatctgttttctttttagttgcttgcacccttggtgtcatagctaagaaaccattatcaaatccagggtcatgaagctttacctttgtattcttctaagagttgtgtggtttcagctcttctgtttaggtttgtgattcatgttgaaatcgtttttttcctgtggtgtgaggggggatccacctttattcttgtccatatggctctccagttgtcccagcatcatttgttaaagacgctgttctttccctggtgaatgggcttggctctcaattttattccatcaatctgtatgtctgtccttatgccagtatcatactaccttgagccagatgcacttttaaaagatccaaggctgggtgcggtggctcaccacacctgtaatcctagcacttttgggaggccacagcagattggattgcttgagcttaggagttcaagacctgcctggacaacatagtgagaccttgtctctacaaaaaatacaaaaattagccagatgtggtggtgagtgcctgtagactaagctactcaggaggctgagggaggagaatcatttgagcccagcaggttgaggttgcagtgagctgtggttgtgcaattgcactccagcctgagtgacagacagaccctgtctcaaaaaaattaaaaataaaaataaagtatctgaaaagacatacaaaactaggttttgtctgggaggacaagtagtttggtattgctggaacatcaagtgtgcatggaagtggttgtgtgaaggctggaattaaggacgtgagagacagtgactgtgtgaaggagacgcagcaagctccggagcctgcctgagtgttggcagataacggggacatgagatgtgtccatgctctcaacaagctcagaatctctttgtagaagcagacatgggattccaagcctgatggaagtgtaagggaacccccttaagaacactgaggagatggtggggcctggctgcgtgtatgagtggggaaaacattaaagagaatggcatttgagctagaactgaaggctgagtagatcaaaagctttgtgtgggggtgagagtttgggaacgggaagagggcatttcatgctgaagaaacaggcattgaaacagggcagggtcagagaacatttgagaatctgagagtggcccagcattcctgaaataaaggagagactcatctctcccatacattgagagatgagtcctggaaaaataagtgtgggggagacagcggctgagctcaaaccccatgctacggagtttgaactttctcccgcaggcagtggggagccactggcatcttgtgagcaggggaatggtctgatggacctttagaaaggtcagtccaataacagtatgaaaatatgattggaggcagctgtgctcaccactgtaccaccaacactgaaaatacgattgggagaaagatgagggaaggtgttctgattgtctggtctatagaggctggggttaatgcagggaggaataacgtgttcatttggactattttcacatacatagtagtcgagggaatcatatagggaagccccaggtccccattgcccagccttggccatcatccactgcaacccatcttgtcttatccaggcctcctcctccatatgcatggccctctcttcacactacattattttgaagcaaatctcagtcatcgtattttatttgtaagtcccacctgtggtatcctccaacaaggactccaagaaccagaacgtgattgcctcacctaaaaatattaactgcaattccttactctcaggagtaagcattaaatctcccctcccctcctccctttttcatttggttggtttgggtcctgaattgaattgagtcctgagatccaaatcaggtacacacattacactaggttgtgatatgtgctggttcctcctctcctttttctccttgcaatttaattgttaaatcaggttgttcccatacgtttgagagatatgatagtcaaccaagggtgattttgccccccaagggacatttggcaatgtttggagacgctcttagttgtcgccgcttggggggaggggctgcttgcatgtaacagggcccacagcagaggctcacctgggctgaagtgtggtggctcgactgcccggtgctgcgggaggacacctcctgccattcccccacgttccctggttccctgcgtccagatcgctttgcttttggttaacacactcctctctctcttgtattttcctaagaactggtggttagacctcagggcttgatcaggttcaggctggactttccggcattaaaaatacttcttaagtggcatatcacttagtccttggcacataagtggtggcagtttgttccgtttacgataaaattgcagaaagggaggattttgagaggcactggagcatggaattgctccggtgtgaggtgtaagggggaagttggggtccagcatttggctcaaccccagacccagagtccagggactgaggctggggcttggctgcagcactgactgggtgatttcaggcgctcaccccacagcctgagccttgctttcctctctgtaagctaaggatgcgccagctcggcctgaaccatggaatgcagcgtggggcagccgctccccagccttcctccctagccgtctccctccagctacaggtgccttgcggtgccgccactggaggagtctttgcaggtttatgggacatcagagcagggagggagccgggtgtcggggctgcggcagggtccccaccgggctgtccacgaaccagcgaaccagcggtgttggtggtgtctggtgcccaggaggagggcttgtttacagctgccgtatttcccgggaccctggcttctgtcctcagggaccccttcagaccttccccaccctccgaagcctcaacccgccctgcgcctcccggtggcacagcgaccttggcggctttggcccctgagccgctaggctgccaaggcgcgctgtgcgcgtggggccaggctcgacctcactcctgttgtcgctgcagacccgcgtgggctcccgccgggccctcctgccgccccccagcctccccgcccctgcccttgccagcctgcgccttcctgggcgcctgacgcacccctctgccccaaccacgttttctcaagagtgttgtctgtcccggccttccaaggagacccttagctcccgccggccgcctccggagcctccggcatgggccccaggccggggtcccgcctttgccccggcctccgctgcctcgccccggagcccggaggaggggagccggccacccggggaagaagcggaggacgccgatctggcctcctgcgttgcgcgctccaaccctctgcttggccgcccgcgaaccgcgctctcccgtttcctttccgtcccgtctcgggggcttcatcctccagccgtggccgtggccgtggccaggtgtaccggagcggcacccaggagcccgccctagcacccgctcccgctcccacctcgtctgcgcccacccgctctgggcagctgctcccaagggagcccctcgccctctctctctccttccctcattcccttcatccttctctccctgtgtgcctccttccctccctccctctctcccccttctctctttctccctctcccactccctctctccccaccctttcttcccctcccccctccccctcccccttcttcccctccccctccccatccctctctctcccctctctctttttccccctccccctccctctctttcctctttctctctccccctccccctccctctctcctccctctctctttctcccccttccccctctctccccccctttctccccattcccctccctctctcccccttcccctccctctctcccccttcccctccctctcccccttcccctccctctctccccttctctctctctttctccccttccctctctctcccctctgtctctttctccccccctttccactttctctctttctccccccttcccctccctctctctcccctctctctttctccccttccccctgcctctctttcccctttctctcttgttctcccccttcccctccctctctcctccctctcttttcctcctccccccttcccctccctctttctccccctctgccctctcccccttccccctcccctccctctccctctctctttctccccctccctctctgcccccctctctccctctcccccctcccttccccctccccctccccctcccctctctctttctcttcctccctctctcctcctctctttgtccctctccccctctctctttctccccctcttttctctctaccccctctttttccccctccccctctctctctcctcctctctctttctccccccttctccccctctccccctccccctccctctctccccatttctctttctcccctccccctctctctctcccccccctttctccccctctctttccccctccctctctcccactctctctccttctccccctctctgagcccaggttcttggtggcatctgctttgggcagctctgcagctccttcctcagggagatcacctcaccttcccagggacagacaatgtctcatgcggagaggccctgccctcctgagctgatgtcccatcggggaggaagatgccccctcagagttggtgggagcaccaggtcacggtgttgtggggcaggcagctggtggctgggctgggcagagcaggcagactggctcctctctctggtcttggccctgacgagagaatggagtggggcatggtggccaaaaggccaagggcccctttggaactgtgcccgagggctgacttattttctcaggggcagaagcctatcctcagtgtgtccccatggcagtcaagacccatggacttgcttcccagccccctaggctgggccaccttccatgcagccgaccttccagcgggggtcagaagccacgggggagccctgtcattggcctctacccaaggtcctcgctgtgagtgctgggctggcactatagtgaaataaaaaggagatggagaacattatctactggaacacgcacgtatgtgactgaacatctaaagccaggacagctcctaggagcagctcctccagactgtggaatcaatgccaggggcacccagagaaggcggagcagaaacctgtctaactgggggattctgtggaggagctggttatggaggggcttttagggaagaaagacccaggctttcatggcaaaagattgacagatgtcaagctcagagcccaagaaagtaccttttgaggaaaaagccacagactgagggagagaagggaaccgagacccctgcctcccaggtcagaggctgcctgctgttccgggcagtctgtcacatgagacagctctttccaggcattcctaagcaccttagtagaaagtaaagcagctcttattgcttatgaaaatttcattcaaggatgagaacaaattaatgtctggggctggagttggtgtgtctgctctccttggccctaaactaggtaggtttgtgtctccaggatggagtctatattagttcattttcacacagctataaaaaactacctgagattgggtaatttataaacaaaagatgtgtaattgactcacagtttcacctagctggggaggcctcaggaaacttaccatcatggcagaaggtgaaggggaagcaaggcacttcttacacggcagcaggagagagagagaaagtggggggggggaactgccaaacacttgtaagtcatcagatctcctgagaactcactcactatcacaagaacagcaggggggaaactgcccccacaatccagtcacctcccaccaggtccctcccttgactcgtggggattacaatttgagatgagatttgggtggggacacagaagcaaactgtctcagagagtgacagcctttttaaagagcacatatgcagacacagactccctttctttgggcagaaagaagggtgggcaacgagcacattatgtaaatcatcttgacggtggacacagcagctgttggctgtcactgctggatagtggtcgcagcaaacagctgtgggccaggtcactgcttgctacctagagagcccttcagctggggggcccagagcacagctgaactccacgggcccccttggtgagctcctttggcctctgtggatgacaggggacccctggttcctctgcttcgtgcatcttcagactcttctccacctctgctgagtagttcagttggcagcgttgcaggttggctgcaggggtgttgaccagccctggagctatggtgcagcctgggaatgagcacgcacaccaggagcctaggacaatggcagcagaacagctccagcggagcgtttcctggggctcaaggggaggcactcagatggcctgctttgggtgttcaagactgagtggtgagccagcagggaacacctagcattttgtgagatactcagccgtattcatctccttgcaccactgtacaagttacacatgcagtggctccaaagagcataaacttactatgttaccgttctggcatgtaggtctgaaatgaggccaaaatgaaggtgtcagcagggtcgtgatggctctggacgttctagaggagaatctatttccagcctttcccaccttctagaggccacctgcctgccttggttcatggccacttccctgcatcttccaacccagccatgtagcatcttcacatctctctctgacccctgctttcattgtcccattgccttctcttgtctccctcctgcctccctcttgtaatgacctgtgtgattcccttggacccacctggatgatccagaatcatcgtcccatctcaagattcttaactgaatcccatctgcagagtccctgtcgccaagcaaggtcccatattcaccagttccaggaattaggatgtggacatctttaggcgtcattatttagtctaccacatcaacctatgtggtaaatatttagcaatcaaaagtttgaaggaagatacgagaaattaggcatctttgaatctttcagtctaatattgctgaaggtgggacataagccccatactccagccactctaaggaatgatgtcttccatggagtgaaggggaatgccccagagtaagactcatgtatatgtttttctatattttaatagtgctacaaaatacaaccattgtacatattcatttgtttttgtttttgttttggaagcaaatttccgtcaggaaaaacagccttgttgctgtcccgtctacagtatctgctaaaataaaagtaccagtctctcagcccatagtgaagaaagacaaacggcaaaattcttcaaggtttagcgcaagcaataatagagaacttcaaaaactaccatccttaaaaggtaatttttatttgtcttttaaaagttaaattgtggctgttggagtgaaggagcaatgttttgatagtgtgctaatttattcctttgctgtgtttgtattttgtggggtcatcttttctgtattgaggggtttttttttttttaggttgaatgtcattaacttacttactcaattaacattttaaattccagagctattcaagataaaagtttaacaacacagtataggcataatacactaaggaaacaggaaaagctgaacatctttttatttatggtattaagctagccagtttttcttttaaattaattttcatttgtttgtcttagaactgtagcaattccgaaaggaattactccaagtacagtaattgtaaaaattatagtagaagttccctatgtttctaaagtaaggactgtagctatagtacattatggacttgctttgttatgagtcatttgaggattacctctactcaagcatttcttatatgaaattaggaaaaagtgctctttactttgaatttccccccaaatgacacagccatctctttccatctcaggttgtttaatccctaaaagtcttcctttagattttgagattgaggtgcttaaaaccttatcaaggaaaacagagtaaggaccgtaaagtcaaatgtgaacctcttaaaacctttataattactaaaatataagacagatatactaaataaaataacatttttcataccttaaatttataataatggatcttttacaattaatttccactgaatattaattcagcaaccagtccagtggctcgcgcttataatctcatcactttaggaggctgaggcagaaggatcacttgagcccaggagttcgagaccagcctaggcaacatagggagactccgtctctacaaaaaaataaaatttgctgggcatggtggcacacacctgtggtcccggctactcaggaggctgaagtgggaggattgcttgagcctgggaggccaaggctacagtgaaccatgatcgtgccactgcacttcagcgtggatgacagactgagatcttgttctcaggaaaaagaaaagtaaatatgaactcagtgagagcaggcagtctgtcatgtttatagctgtattcccaggctttccacactgtaaagcagatagcagatttgccaggtggaaggaggaagggaggaagggaggctgggtggatggtggatttatgggtgggtggatgggtgggtggatttacgggtggatgaattttcttgccccctacttgctagaaatccaggttctcggccgggcgcagtggctcatgcctgtaatcccagcactttgggaggccaaggcgggcggatcacgaggtcaggagatcaagaccatcctggctaacatggtgaaaccccgtctctactaaaaatacaaaaacaaaattagccaggcgtggtggcgggcgcctgtagtcccagctacttgggaggctgaggcgggagaatggcgtgaacccgggaggcagagcttgcagtgagctgagatcgtgccactgcactccagcctgggcgacagagcgagactccatctcaaaaaaaaaaaaaaaaaaaaatccaggttctcgcttgcattttctagagcttgtatttggcttatatttggtttacctttgtggtagataatatgcatgctaagtcattttttattattagtcttcctcttcccaaataggatatacctttctcatgctattcattcattcagcaaatatgtgttgagcgcctgtgaaagctattctaggtactaggggtacagaattacacaaaaccaagcccctattctcctggagtgagcaacccattggtgagacagcaaggaaagggataggtatcaactcctccttccagtaccctccggaggcccagagtcagagggagggaaaaggctttgtataaccactgttgggccttcatgtcccaagccctgcccctaatgcccatcacagctggggcttggatctgccatggtacagaaggttggccgtgtgccccatttttccatgcatgccccgcctcagccagtgcatgctgggtgtgtactgctgctgaatttggtcaaatgccatatgatttttctccttaagatgttaagattataattgctgtgttgatagatttttctggttttgaaccatctttgcatttgtcagttttgtcgccgtatattattccatgcgcggggcagagcccatgcaagtaccggtgtgtgccggcctctagcatacttcctttacctcttctgaggagtcgctgcacaagcctctttctacatctgttctacatctgttttctattctcaacctccgtttccttcgtttttcattatacctagtaagaatggcatgcaatatacttccactgacgcttacattttcacttttccccaaaatggtaaattctccatagtaaatccacatatccaggagaatttcacatgtatcaagccagttcccctcactggtcttgtttgataattctctcttggctgttctaaaacattaatgcctctgtatatatactaaaataatttcacctagttcagaaaaataataattgattggaattaaagttatatattaatttggtgaaaattgataccttttttccatctaggaagatggtatatatcccccatttttctgggtcttgttttctgacttataaaattttatggttttcttgtaaatctctaactttccagtaaatttatttctaaatactctatagcttttgtcacacttgtgactgggttatattttttcccatttccacttctaattggtttttgttaatctcatgcagagctattggtttttaaatattttcttttgccgtcaccttaccacattttcgtattagtcttaattaatttttccactacagtctgcatatatagtcctgttgtttgcaatagattcttttatctctcttccactatttatgccaacatagactagttattttaattttattctgccactaagaaggaccaataaaacctggaacagaggtgatagcaggcattcctgttttctcccatttcagtaaatggcttcagcgtttcctaagttgatgggaaagtggctcttggtttctggtaagcagcctttgcaaggccgctggtgctccggagtccaagctcacaggactcttcccggacccatgcaggctggttggcgccatgccagtgcatgctgggtgggtactgctgctgaatttggtcaaatgccatatgattttcctctttaagatgttactattataattgctgtgttgacagatttttctggttttgaaatatctttgcattttgtcagttttgtcacagtgtattttcatagtgtttggaactaattttctttagaatatttgcttccgtatttactacatggagctggtctgtagttttgttctttttcataaacctgtattttgtcctgtctaagatttgttgtcaccagcactttgtgaaggttcctggggtggcctggagcagcttttcccgcagctccctcacactgccaccttatgacagggataatgagatggacccggatttcagaaacaataaaatgtggaatgtgtccatgaaatagggttgaaagkttgacttggaactcagtgggcctgttgcttttctctatgaaacgtctgtagcttcttagcacagtgcgtccatttagaaaggggggtctgttaactagtacatggtcattgtttaatgcaccttttaatctcttccttatcagtggcggttatgtctccttataagttcatttattcttttgactgttctgtttgtgttcagtattattcatctgtacttttatctttaattatcctatgtcttttattttaaccttttcttcatttattaagttgaatagagagttgacttatttttagtttgctttttaataataaaagaatttaaagccacgtattcattctgagtgtaaccttcagccctatccctagattttattttttcctaacttttcaagtcataggtttttcttttttagagttgaggcataatttacatatcctaaaactcacccattgtaactggaaaatttagttattttagcaaatacatagagttgtgcaaccgtcaccacaattctgttttagaatgtttccatctgcctccaaaagttacctcgtgccattcaccattaagttcccctccgggccccagctgcaggcacccactgatctgctttctgtctctagacttactttcttccggacacttcatataagcgaagtcataccataggtagtcttttacacctgctgtaaggtttttgaggttcatctgtgttgtttctttttaatgccgcatcatattcagtcagatggatacaccacattttgtttatccgttcaccagttaatggacatttgggctgtttcttagctggtatgagtaacagtgctgctgtgaacatttgcatagaagtctgtgcgagcagatatttcatttctcttgagtagatacctaggagtggaattcctggcttgtgtggtaaatttatgtttagcttgttaagaaactgttggctgggcaccgtggctcacgcctgtaatcccagcacttcgggaggccgaggcgggcggatcatgaggtcaggagatcaaggccatcctggctaacacggtgaaactccatctttactaaaaatacaaaaaatcagctgagcatggtggcactcgcttgtagccccagctactcgggaggctgaggcaggagaattgcttgaacctgggaagtggaggttgcagtgagccgagatcacaccactgcactccagcctgggcaacagagcaagactccgtctcaaaaaaagaaaaaagaaaagaaaagaaaaagaaactgccaaactgttttccaaagtggttgtactgttttacatttccaccaacaatgtatgagggctctgatgtggccacattcttgccaatatctattattgtcttttcgattatagcttaattcttgtgggtgtgtaatggtgtctcactgtggtttccattggcctttccccaatgactggaaattttaagcatcttttcatatgcctgttagccatttgtctctcttctttgatgagatgtctttttttaagttggttgtcttcttcttgttgaattgtaacagtatgttttcccagatatgagtcctttattttaacagaaaataaaatacagtaaaaataaattattacagaagtgaagtacaaaatacactgtgtataaaatagtgtttttattattatagtcagtagacataagattaccctgttaagttgatacgaaagttttgaaacgcttattctcaatttttgttattcgttgtaaatcttcagatttgtctatatgtgtcaaacccttcttttgagcttttaatttcagggttttttttttcatttatgaaagttctgtttggttcttttttcagtctgcagtgccattttaaaatattttcctattctcttgaacataccatcaaaacttgtatggtatacaagtttagtatagtatactaaataagtatagtaaacgcagctgttttatagcctgcgtcaggtcacactagtatctgaggtgtttgacacattttgttcatgatgtcttatttccttgtgtacctgattttttttattgtatattggtcattgtattcagatatgtgaaataaattgaaacctagaatcaaagtgtcttcttcaatagggatttgtttttgctctgccagacacctggaggcactgccaatctgggagtgccttaaaccacaacactggtttgttaaatcaaccgacccagttgttctgcaatatatcccacttaccccactgcggttcctgtaaatggaaaccttttttggctgaaatacatcagaggcaacgctttataacttaggagatagtgacattattgtgagagatgcatagcctctggttgcctatcatcagaagtgatgctaaattttcagttttactagtgaattcagttgatgacagattgatatctctattgaacaattacatatttccctttacaattcaaaaagtactagtaatagtctgcagtgtatattttggcatcctaccaatgtgtattccctgtcaaccatgtgctaatgtcttgaacaacagttgataatccttgcctgagtcagtagtttcagtttcactagcgaattcaacatttactctaacgttcttctgaaagcagtgatttttcttaccaaccagagatacttggttatcttgaaatggagctcctactgaaaaagaaggataagcttaattctttgtcttttattaccagttccctctaatggtgacagctgaagcttttttctagctttctctttgttttaatatcattgtggactaatatattgttgatttcagtgtgttttcatgtaccaaaagcattagtctttctggtgttcagatggcataattgcaatcattaagtgccctttagggtagctcgtgtgtttttttgtttgtttttgtttttttacatagcctcatttatttttgattccttgatttctgacacagtgagacatcccttgggctcatttaataccttctcttccccagacttcaaatcagccatttttcttttcttttttttttttttgagacagtctcatggtctcatccatgctggagtgcagtggtgcaatcttggctccctgcagcctccgcctcccacattcaaatgattctcctgcctcagcctcccaagtagctaggattacaggcgtgtgccaccatgcccagctaatttttatattttttgtaaatatggggtttcactatgttggccaggctggtctcaaactcctgacctcaagtgatccacccacctcggcctcccaaagtgctgagattacaggcatgagccaccacacctggccaaatcagctatttttcaaagagccctggttcctttcagtagtaaatatattagcaaccaaaatctgggtcagagggatgtttattgctactggtctgacattacttttaaatgctttcaatggagggagcgaggatataaattttctgaatcgtacattcatattgatattttaaatttaattttaacattatagtgtttttgaagcaggatatttccctgaccacttcacgggcaggaactggactgcgtgggtgtgggaactagctggccccttcagcgccagcaagggcgatctccacttactcgctgctccacccctcgtgggaggggaagtgcaggtgagctggtgcaggagcacttttgggcaccagcaggagcaaaccccataccagccccatggcagcgtcttcaggggtccctgtgatccctgaagccccagagaaagtgttgcagtactcttttagctctgccatccatggatgacttaagtgttaacagctcagtggagggtcagtgggacaaccttttacacccatactcatggcacccaagttgttgtccagcatccaggaggaatgaggttgcatgaaggaattgaagatggtaaatgcaggggattttattgccaatgaaagtggctctcagtgggaagggaagctaaaaaggagacagagtgggaaggtaatcttcccctgaagtctggctgtctccagccagattcttctctgaagttacgccatcaagttgtccctctgaagtcaagccacttctttccaacatccaactctagtctcctatgtccagttgcttctcttctctctaccagctgagcctggggtttttatgggcacaggatggaggcacggggcaagccatgggtggttttggaaaaggcaacattcgagtggggaaacaggaatgcatgttctcactttggaccaaggttccaggcttttcggcttgaggctagggccctcacaagggacgtgccctcttctgcccagaacttccctgcttcctgttcctatcactttcacttatttcttggctttcatagttttatctctgtcttacactgaaaatgttgatttctagcatcactaatgtaattatgggtatattctcttaaacagttcccaaaaacaatattgatattactgcaaacagttggaactttgaattgacccatagtcattgcagaaagaaacagctgttgactttatttatttatttattttagagacagttccatgcgatgttgcccaagctggtcttgaactcctgggcttaaatgattctcctgcctcagcctcccaagtagctgggattacaggcacgcaccaccatgcctggctactgttggcatttttattgggatcctgttacattttgcaaatatctgagggagggctggcatcttgtgatgtgtgcctcctctaagagtatgctatgactattttccaaggccactttcatgtcctttaaggctgtttttaagtttcccttgtaggttttgcatgtctcttactaagctaatgcctagataatcattatcatcgctcttgtaaatagagtcttttcttccattgtgtcttctagttattagttgtttatatgaaggctattgaatttgggggccttgctttcataacctgcttccttactgaattacctgattgtttgcatcagtttttcagttgattcttttgaatattcaggtattaattagagcatctgcacataatttcacctctgtttataattgtaaactcacatgtctttctctccagttgactaataaattcagtaaaacaatttcagtaaaatgttacatagtggtggtgagagtgggcatacttgtcttgtttctgacattagtgggaacgagaggcatgatttttagcaaccgtttattatttcattctgtggataccccagtttttcagctattataaatgatactgttctgttaatcttttgttatcgttgttgttcacatctttgaacctttccttaagcttgatgaaggaggtactggatcaaagagcaggcattttcaaaaacccttaatagatattgtctacacactttccagagagtagcaccacatacagagtatgtgagatgcctgtccatcatacctctccaatgctgagatcatgtaaaagttgtagttatttgataagtagaaaaaggtatttcatatttttatttttttttaaccagtgaggttgaatatagccctcagacctgttcattgtaagattattctgaattaatgccttcatttaacatttttggactggaaggtggaagtgttaaataaagagaccttttttttttaagatacttataggaagagtaaattaatcatggacttgttttttgaggccatttttagaaaagaaaagactaggagaagtcaaagttatagcagaataatgtaggacttattatcggctaactaactagagaccctggggcaaaagagttgccgagtatttggtcttttgtgaaagaagtcattacattattgttagaatttacttgaattgtttaaaattggcttttgaataccagttaaatattttatatctcttgctctcctctcatgcaaatacaatacttcaccctcattcaaagcagtttattttcttttttgagacacggtttcgctctgtcacccaggctggagtgcagtggcacaatgtcagctcactgcagcctggacctcccaggctcaagcagtcctcccagctcagccttccaagtagctgggaccacaggtgcgcaccaccacgcacagctaatttttgtatttttagtagagacggggttccaccatgttgcccaggctggtctcgaactcctgggctcaagtgatccacccacctccgcctcccaaagtgctaggattacagccatgagagccactgcgccctgcctattttctgatacaattgaaagctttaccataaaagtagaggtttaactgcctacaaatgaattatgcatatatttacaggaactttggcttcttgcctgttagttgaagaataataaaaatggactgtgcggaagttatcggagtgcctgctgctcttctagtcagcttagaaagagccgcgcagggaatctctgctttcattagtcttttcttctcttgcatgttttgatttttgtgtcttctcgtgatttgccatgatatcttaatgagaggacacagtccctggattgctgaggcagttcacactggccatctgtgcttctcagagcaaggggaaggtgttcagagcgatgacccaaggtggcccttgccctcagggaaccagcgggcccggagtcacagcggtgttctagcttcagcccctctaagccacagagagktaccaccagggccactccctcttcagaacactggggagcccgttgcctgtcagacagcctgagcccagccagccagcccagcccctccagggtaccccctctccatggcccggggctacacacatgaccttggccgttactccatggtcagtctcagctctctctgggtggcacccatggggtttagtttccagctgccagctgtaatctcggctcattaccgcacacagagaccacttcttggacattcccgtcctctgtctggtccagcgccctgctgcctctgctcctcaagtgtttcctgaactgccctggctcaagccgtccttatctaaaaaaaaaaaatttaaaaactgaggtgaaatacacatgttaaaacataatatttattattttaaccattcataagtgtacaactcggtggtattagatacattcaaaatgctgtacacccatcactactatctctacccaaaacttttcatcatccccaacaaaaactccattaaacagtaagtggctgtctccccattctgctttctgtctctatgattttgcccmcagtaggagcctcttagaagcggaatcgtacagtatctgtctttctgtgcctggcttatttccctaaacataatatcttccaggtccccccacattgtagcacgtgccagaccctcgctcccgtcgaaggctgatgccatccttcagtgatgtgtggacggacacattccgcgtatcccccaatcagtggatggacgcgtgggttgcagagcacgccacacacattcagtcagtacacgagttaacagttgcgtgcttgtctgcctgtgtcatccattcgagcatctgccaaggacccaggaaacacacagtgtgtctcctgaaggaatgaaaagccctcctggcccctctgccctctttctccaccctctccattttcaccgagatggttgtggtgtcacctctcgtggggtggccaaaaccccagccagggccacctatcccttcacctccctccacctcggatttcctcttggaaaatgaggctcctgactcacttgacctactgcgtaggctcctaaaagggtgtcggcaagttggcaagttaaaaaaaaaaacaatcagcatgaaagcactccgatgtatgcatacttttacttcgcgttggttccctacgttcttagaacaaggaaggagtgtgagwacttgctttggattgaaaggttttccagactagctgtaggaagtatgaaagtaaccaaggtctcacacacagccccagcactctgggtggatttcacttcatctactccactcacctacgctgagcttccctgtggacaagctcgtccatcctctttaatcactcccaggcctcgctcacacagcaacaagtgcctgtccctgtgtccttgctgttggcaagcagaagttccctggcagcctttgaacatagctgaatgttaggtatctttgatctgtctaaggaaaaagtctattttaaactgtgaagtgaagccaatttttttaggtcagattcttacccaacaaagcatacatcatccgtgctcatatagtttccagtttaaaaaaaaaaaaaagtgctggccagcgcagtgtgagtgcactgtgcacatgatgccactgttctctaggttcagaacaccagccttctgttaattacaataaaatgtcttcactaaaatagaagcatatttaatttgcctacaaaattgcttggagagccttaaaaaataaaaccttcagctgaatgatgtagaaatgaaaatttgaaagttttaatcagaaatactacctagaaataaaatcagtaggatgtatttacaggtagtttgtttttaagtaaagaataaaacagtgacagagggatcaaagaataaagaataattccttttcaagccaggcacagtggtgtgcacctgacttctcagctacccactaggctgaggacggggagaatcatgagttcaagcccagcctgggcaaaatagggagaccttgtctccaaaaaaatatgaaataattgtttcttcattattgtctagtacatagattattgtagttatagcatttgatgggagaccatattgagcactgtggcctttttggcccattgggctgtggaaggtatgctaggtgggctgggcccagcaaagcgcccttccttggtccttgctcaagcccttcacaggcagctgcagtctcaggaaaggttcagaatgtcactgcgaggccagcgtagaaggcaggtaggcatgtcacaggaggtgagtggaaggcatccactccttagcaagtgcatcatgggggacctggaatggggtctgtgttcaggggagagggaaatgctgttcttgagatgatttgacagcatatccctcttaattatgtgctacctggaagaggtgtaaagggtagcaaggtggttttgtaagatcagaattgggtgcaactgcttgattcattcattcagtacatttgatggaacacctgcatgccagccattctgtaggagctggaccaaggaagagcttgtggtccaagccacagaccgggagggaagaggaagcctgcctggatgagggtggtctaagccgagattcctcaggtggctctgctgcatccccacgccgcagctgaagggatctttctgttggcagatggcccatgtttttccagtgggacaatgcccactgcttcctgcattttgctctgatggccggagctgtatttagttgtgtcctgcctcagtccctcccaagctgtccacctcaactcagcatggggagcgcactccatatctgacgctggcttctctaaacgtgaggggatagggagatgacatatatgcccttttacgggtgaggaaaggaccagcggggatttattgaaggcagcctcgctccccatgctgagcgacagctctgtctagcccctccctgagcaggtgatgaaaacctggcccagtgcgagtgacatggttgcattatgagcctcttctgggttgcatttacttagagtttgtttcatcagtgaggaaagtactctggagacccagttgaactctgatagcttcagtgagcctacagactcaatgcaaaggtgacaggcttacaggagaaggtccaggcggttcaaaattgatttgagacagggagtcaacctcctctaatctgtgttggttccattttccatgcctcatttcagctaatttttgtttgtgttttttatgtacctgatctcatttatccagatttccttggttcagactttcttggttctcatcacagccctttctttgttcctagcctgtgcctaagagacagtattcattaagggattctccctgcagtgacttaatctatatctctttttaaaaattatttttatgccaggtgcagtggctcacgcctataatcccagtaatttgggagaccaagacgggtggatcccttgagcctaggagtttgagaccagcctggacaaccttgtccctacaaaaaatttaaaaattagccaggcatgctggtgcacacctgtagtcccagatacttgggaggctgaggtggggggatcacttgagctcaggatgctgaggtttcagtgagctgtgatcgtgccactaggttccagggtggtagagtgagaccctgtctcaaaaaatgtacgtatttttttaaatcgttactttaggccaggcacggtgggtcatgcctgtaatcctagaacttcgggaggccgaggcaggcggatcacctgagctcaggagtttgagaccagcctgggcaacaaggcgaaaccccgtgtctactaaaagttcaaaaaattagccaggcgtgatggtgcatgcctgtaatctcagctactcaggaggctgaagcacaagaattgcttgaacccaggaggcagaggttgcagtgagccaagatggtgccattgcactccagcctgggcaacagagcaagactctaactcaaaataaaataaaaattaaaaatatatataaaataaaattgtcacttttaattactctgaaagtaatgtatgcttgttttagcaataccaaaaaaaaaaaaaagggaaattttagaaataaaaaacatccatatgatcctacagccttactgctgggtatatatccaaaagaaagaaaatcagtatatcacaggggcacctgcactgccatgkttgttgcagcatcgytcacaatagccaagaaatgaaatcaacctaagtgtcaatcagtggatgaatgactaaacaaaatgtaggacatayagacaatggaatattattcagccataagaaagaatagaaacctgtcatttgcagcaacatggatggaaccagaggtgattgtgttacgtgaaataagccaggcacagagagacaaataccatgtgatcttactcatgtgggaggtaaaaaaataatggatctcatggaggtagagaggagaatggtggttaccagaggctgggaagggaagatagggagagagggtggttaagggctgcaaaaatacagtcagaaggaataagttctagaattcaagagtacagtaggggaattgtagttaacaataatttattatatatttcaaagtagctggaagagaagaattgtaatgtttccaacacaaagaaaagatacatgctggaggtgataggtatcccagttactctgacctggtcattacacattgttaacaggcatcaaaatatcacatgtcccctccaaatmtgcacaactattatatatcaattttaaaaaagaaaaactcatacccataccacccaatgatgacactgtggatatttggggagtgattcttcctatgatcattttatttctgattacacactgcctctttcacttatattttcattttatacatttataagtatttctgatggatatgtaatatttcactaggtatgtgggataatccctttggcattaaagtagtttccagtattttagaaccataaataaaacatgatgccctcaaaaagagtaagatagttagaaatgaagttatcaaggagagaaaagacttgcacactgcaaactatgaaatgttgctgaaagaaatggaagaatacaccaatcaatggaaaaacatctctcgtttatggtttggaagacttaatgttgttaagatgtcagtactgcccaaagcaatctacaaattcagtgcaatccctattaaaacttttacagcattcttttccagaaatagaaaagtttcatcctaagattcatagggaatatcaaagagataagcatagccaaaacaatcttgaaaaagaacaccaaagttggaggactcacacatcctgactttaaaacttacagcaaagctacagtaatcaagactgtgtagtactggcataaagatgagcccagaaacaaaccctcacataggtggtcaaacgagttttgacaaggtttcctagaccattcaatggggaaaacacagtcttttcaacaaatggtgttgggaaaactgggtactcacatgcaaaagaatgaagcgggacctggccgggcgcggtggctcacgcctggaatcccagcactttgggaggctgagacgggcggatcacaaggtcaggagatcgagaccatcctgaccaacatggtgaaaccccgtctgtattaaaaatacaaaattagctgggtgtgttggcacacacctgtagtaccagccactcgggaggctgaggcaggagaatcgcttgaacccaggaggcggagattgcagtgagccaagatcgcgccactgcacaccagccttgtgacagagcgagactctgtctcaaaaataaaaataaaaataaagaatgaagtgggacccttaccttcataacacatacaaagattagctcaaaatggatcaaacacctaaacctaagagtaaaactataatgtttgaggagaaaacataggagaaagatttcatgacattggatttgacagtgatttcttggctatgataccaaaagctcaggcgacaaaaataaaaatagatagattggactacataaaaatttaaaacatctctgcattaaagggcccagtcaacaagaaaaggcaggccacagaatgggaggagatatttgaaaaatcatataactgataaggagttaatatccagaatatctaaagaactcctacaactgagcaaaacagcttgattttttaaatgtgtgaaatacttaaatagacgtttctccaaagaatataatatctgcaaatgaccaataaatgcatgaaaagatcctcaacatctctgtcattaggaaaatgaaaatcaaaattacagtgagatacttcacacccactaggatggctactatttaaaaaaaaaaaaaaaaaaaaaaaggagcaaaggcaggcagatcacttgagctcaagagtttgagaccagcccggacaacgtggtgaaactccatctctactaaaaatacaaaaactagctggttgcatgtgcctgtggtcccagctactcgggaggctgaggtgagaggattgcttgagcccagagggtcaaggctgcagtgagccaagatcatgccactacactccagcctgggtgacagagcaagaccctccctgtctctaacaataaaaatagtgctcgcttcagcagcacataaactaaaattggaatgatacagagattagcacagcccctgcgcaaggatgacatgcaaattcgtgaagcagttgcatatttttaataaatggcgttgggaaaactggatattcatatgcagaatggaactagacctctctttctcactatatacaaaaatcaaatcaaagtggattaaagaaatctaagaccttggccgggcgcagtggctcacatctgtaatcccagcactttgggaggccaaggcaggtggatcacgaggtcaggcgattgagaccatcctggctaacacggtgaaaccctgtccctactaaaaatacaaaaaatcagccgggcgtggtggcgggcacctgtagtcccagcaacttgggaggctgaggcagcagaatcacttgaacccgggaggtggaggttgcagcgagcagacatcgcaccactgcacttgcactccagcctggacagcagagcaagactccatctcaaaaaaaaaaaaaaatctaagacctcagactgtgacactactacaagaaaacaatggggaaaatctgcaggacattggtcttggcaaaaattccttgagcaataccccacaagcacaggcaactaaagcaaacagggacaaatgggatcacatcaggctaaaaagcttctgcacagcaaaggatacaatcaataaagtgaagagacgacccacagaatgggagaaaatacttgcaaactactcatctgacaagggattaataaccagaatatataaggagctcaaacaactctataggaaaaaaaactaataatccgatcacaagatgggcaaaagatttgagtagacatttctcagaagacagacaaatggcaaacaggcctatgaaaaggtgctcaacatcattgatcattagagaaatgcaaatcaaaactacaatgagataccatctcataccagttaaaatggcttatccaaaagacaagcaataactaatgctggagaggatgtggggaaaagggaaccctcgtacactgttgttaggaatgtaaattagtacaaccactataaagaacagtttggatgttgcttaaaaaactaaaaattgagctaccatatattcagcagtcccactgctgggtacataccacaaagaaagaaaatgagtatatcaaagagatatctgcactcctatgtttgttgcagcattgttgacaatagctaaggtttggaagcaacctaagtgtccatcaacagatgaatgaataaaaaatatatatatatacacaatagagtactattcagccatgaaaaagaaagatccagtcatctgcagcaacatggatggaactggagatctttatgttaagtgaaataagccaagcacagaaagacaaacatcacatgttctcacatattcatgggatctaaaaatcaaaacaattgaactcatggacatagagagtagaagaatggttaccagagactgggaagggtagtagtgggggttggcgggggggatggtcaatgggtacaaaaaaagttagaataaataagacccacttgatagcacaacagggtgactatagtcaacaataacttaattgtacattttaaaataacactaagaatgtaattggattgtttgtaactcaaaggataaacgcttgaggggatgaataccccattcccattctccatgatgagcttatttcacattggatgcctgtatcaagacatctcttgtgtctcttaaatatatatacctactatgtacccataaaaattaaaaataagttttaaaaaataagtgttaatgtcctcgtggagaaattggaactattgttgtgcactgttttttgttttttagggtctgtttgtttgagatggagtctcgccctgtcacccaggctggagtgcagtgatgtgatcttggctcactgcagcctgcctcggcctcctgagtagctgggcctacaggcacgcaccaccaggcccagctaatttttgtattttcagtaaagatggggtttcgccatgttggccaggctggtctcaaactcttgacctcaagtgatctgcctgcctcagcctcccaaagaaagcgctgggattacaggtgtgagccaccacacccggccctgtgcactgtcagtgggaatgtgaaatggtgcagccactgtggaaaacagtatggcagttcttccaaatattacacatataccttgaaactgtgtatcgctattatgcatcaattaaaaataatagaatgggaaaaaaataaaaatagaactgccatatgatccagcaatttcacttgttggatatacacccaaaagaattgaaaacagaggcatgagcagatacttgtagccccatgttcatggcaacattattcacaagtgacaaaaggtggaagcaacccaaatgtccgtaaacagggaagagtgaataaacaacttcagtgtatgccaatggaatatcattcagccctttgaaggtaggaaattttggcacttgctacaacatggatgaatcttgcggacattatgctgagtgaaataagccagtcccaaaaggacaaacgctgtaagatctccttatgtgaagtacccagagtagacaagttcatagagactgaaagtagagtgatggttgccagcactggaaggagggagaatggaaagttactgtttaatggggacagagtgtcagttttgcaaggtgaagagttcggtggatggatggtggtgagggttgcaagacactgtgaatgtgcttaatgccacagaactgtatgctgaaaacagttaagatggtacattttgtgttgatgtatattttagcacaatttttatttttatttttttgtttttattttaccttaagttctgggatacatgtgtagaacgtgcaggtttgttgcataggtatacatgtgtcatggtggtttgctgcacctatcaacccgtcatctaggttttaagccctgcatgcattagatatttgtccaaatgctctcccaccccctgtcccccaccccccgacaggtcctggtgtgtgatgttcccctccctgtgtccatgtgttctcattattcacctcccacttctcagtgaaatcatttagtgtttggttttctgttcctgtgttactttgctgagaatgatggcttccagtttcatccatgtccctacaaaagacatgaactcattcttttttatggctgcatagtattccatggtacatatgtgccacattttctttatccattctgtcattgatgggcatttgggttggttccaagtctttgctattgtaaatagtggcacaatttttagacaattgttttttaatcaattataatattattaactccttgtatttatagcatttatatttccttttgcttgcttttggagagaacatacagaaatttgtgattttaagatcgggcatggtggctcatgcctgcaatctcagcactttgggaggctgaggctggaggatcacttgagcccaggagttaaaagactattctgggcaacatagtagagacctcatctctactgaaaatgaaaaaaatgagcagttgtggtgattcaagcctgcggtcccagctctgcaggaggctgaggcaggaggatcacttgggcccaggaggccgaggctgcagtgagcagagatcataccacttccctccagcctgggtgacagagcaggaccctgcctccaaaaaaacaaaccacagaaatttgtcatttttaatatgagcgctattcctgaggggtttgttcagaggtatttacatgttatttttttgcttgagaattgattattcactttccctttcttctaaaagttatagggatttgggggggtggttttgattgatttttatttaactgtttaagccacgtcaaattttattctggtatgatgttaagacttaaattgacttttttctgcatatagttaatcagttgtctgccccaagattgccaagcaattatctaattcttccccttccactgatttgagatatactctttattatattacatttatgtcaacatatttctcagtttggggctgtggcttctgttccattaatctgccttttttgccccatcacactgtcattaattcatacagctttatagttggtaggacttgcctttctcattagtagtgttctcattcttcttgttcttttattttttgcaggtgaactttagaatacttttgctaagtacctggaaaaatagaggcccacctgaattttaattggaaatactttaaacctgtagatcagtttggggggaaattatcagcatagctgcagtatttatatttttatatttccaattcagaagtacaccttacctttattcaagtcttcttttcttccctcatattatttgtttatttatttctatcttagagtctgttttatcaatgatggccagatcagccttgggttctttaaagaactacttacatgcatagggtttcaaaagagtgtggggtaaatcactaataaaggcaagatcctttgatctgagatcattaggaaaaatacatcaaaaagtgtcttcactgtttctttgactcctattccgtatattatatataaagctcttaggagcctttcccccttatttctgtattcccactcatcagcacagttgtaggataggcacattttttcatcttatctcgtatgaaatattaaatcattggagggcaggtctctgtctccttaaagcccagatcttcaataagcatctgctcctgggctccttcctgagcccctgaacgcctcgttcctaattgtgtctgagttcatctggcatcactcagaggaggaggaggaggaggaggctggggtgtggggcagtgagagtcatcaacactgcttcctagtggtcgttggtgatcggtggccatcccctccagacagacaacccacaggtcagcagtgaaggcttagaggcaggagggcagctaagatctaaattcctcttacccaactgaaagcacgtgctctttaaaaaaaaaattaattctgctgttcagatagcagcaaagtcagagcaggtgtgaggccggcarcctgctcaggtggtgcgtgcccactgcccacttgtgttagaaatcacatcatctcctggccggccatggaatccagcactgtctgtcagctctggggaaagagggggaagggtgggatttggtttgcttttatctatttattttagttgctattgatacacacaataaaagctacattcttgtgagggaggacttgattagcagccctgaagggcggtagcagttcccttactcattgaatgtatctggcgctaaaccctcagctggaactgcgagccctagctgtatttcaggtgtttcttactctactgtgaattatgtttaggaactaaagggcttttgtatccttcacaagtggggggaagagagcaggggaattgtgtgagaaactattaaaaatgaggagccatggtttggacaaacttccttgttggtgtgaagaaaggaggaatttttttcagttccacctgccgaagaggcttttcttatagttcgttttcatttggaactactaataacactcatttttgtagggaatcatctcaccgcaccccctcatgggatcctgcaatactccatccaattcagaaataatgtttttctccttggaatagctttttacattaactgtatttgaagatagaaaatttagatctgaatagcagcttttaatagccccataaaaataagtgaaaatatctttaattttaaatttaaacaaaatatctaaaacttaaaaggtatttaatatgtcagcatatttgcaatacaaaaataaacatgctccatttcatttttttgctttcttactcccacggccaggtgatataaatatttcaatttgtgtcactttctagctatcgaatttataaagcggctttcattttctacgtaagtttttaagcttaattttttcagggaaaaaatagatytcaagaaaaaaagtgtttgggatcataagttaataactcatcctattggtaagggaagttgaataagagtccaaactaatggattagaattgtgtaatatttgcttaaccatttgttaaaaaaaaaaaacaaaaaaaaaacactgggttgccagaatcctacctaagatgcagatattaattagaactagcaagtcgaagttgcacaggtgggtataaaatgaatttgggatccctcactgggaaatgctaaagttcacacagacatatacacacacttttttttttttttttttttttttttggkggctccctcgaaatcatttgtttacagtctggccaaggttgtggcctccagtattccccctaagagatgggatctttgcctaaaagttactgagaaacgaaggctgcaaaaagccggaaaatatcccagcttttaaggcacactgacagccaaacagaacgctctttccgtttgcagtttttttagtgtcattttaagttgcagcttccggccaatcagcgagcttcatgcctgctgacatcacgaaccagccagttccctccagctgcagagagcttcagtttgtctttttttttttaaactaaaatggaggctggtttcttgccttaaggagcccattgcctttcccgctgaagtctagatgttgacatgtaataaagcgggcagcaggatggtggtggatgcggccaactccaatgggcctttccagcccgtggtccttctccatattcgaggtaagttattgtgtgtttcactgaatcggaaccttccgtgggtagttaataaatggctattgtgcttcagataagaaaagcaggaagtcctttctagcagaattcaccccatttcgctgcagacttaaccagaggaggttgggtgtgtcactgcagtttggcattttacgaactacttacagaatttgaggcttgaaagaggccttgcatgcatagttcaaagctggtttttctgctttctgctcgctctcccatccccctttcaaagctgtgctgatgtcaaaggatgtgaagtcactgcccagggaaggtattgggtgggggtaggaaggagaggcgggcctgtcgcgcctggccaagttgttcgtacgcagagtttctgttacatatgtgtggcttaatgctgcaaaggttttgtcgaggacacatctcagaattaaagatgaattgcagtcagaaaatatgcacaattgattggaaaagaacttcctttaaaaggattgttttcattcttgccgtggagcctgagagagaaatatgctccactttgaaatattgaaatctatcgtgggtcatcatttttgaaatgttagcgttttcgtggaatattaggaaatattttgcatttaaataggctctgtgttgccagttggcttttaaaattttaaatggcaacaagttttcaaggtatatagagatcactgttttaataattagtttgcttctttttatgcatattttggtttcaaaacttagcctaaaagcacaactactctagtaattaatagcggttatattgaactacaggcatcagggtagtagcctacttattcttggtattttaagatatatgaatttttttttggtcataattgggtgaaatagaaaaatgattttaagcttcatcagatcactttagaatttatagtatcagagctgtgccccaacaaaactgtttctcagaatctcttttaaggaagggtgggagcaagatttctaggtgactaataatctctatgactaaaacgccaggccagacttttcagatcctagggtgtacccaggcacatgcagactcaatctactggaataaaatgggtggtgcttttctctccaaactatctttcatgaaggtggaaatcagcattcaatgaccaaattgtaggacaggctgtgaatttattgtttttgtagtgcacccagtaaaaagcaaaggttgcctacaggtaacattcaggtattttagctgcaagaaccaaatgggcaagaacaaaatgtaattgtttggatttaagttagatagcttttgtttgttttttgggagacagggtctcactcttgtcacccaggctggagtacagtggtatgatcacagctcactgcagcctccacctcccgagctcaggtgattctcccacctcagtttcttgagtagctgagacttcaggcacgcaccaccatgcccagctaattttttaatattttttgtagagatggggttttgccatgttgccctggttggtcttgaactcctgggctcaagcgatcctcccacctccgcctcccaaagtgctaagattacaggtaagagccactgtacctggccaagttagttcttaaaaacgaactagttagcagtaagataaattaactgcatataaaatgtaaatttttatacttttaaggtatccacttataaataacataaatctttttggtttgtgttttctggtttttattagatgcctaatatactactcagtttttgaattatgaacttattctgaaatagaatcatttcacgttgtgtcttgaaccacattgattttttttttaaaattccaagaccttattatggccagtttgtatttgttgctgttggttgggtggttggttgcttgctgtataattgtggagggaaaaagcagtgaagtgtattagcctgaaagagacttgagtttttaagaagggataactttggagacctaagactaacttctgactcaaacagtgggggtaatttctaacttcaaaatttgaagaacgcttgatttactcataaagacttttctggagcgagcatgttaatgtgagatttagcaaaatttgatttatttattgggccttagagtcttagcttaacatccattgagcagctccggtgtgccaagtgctgagcgtcattacagtgattaagttgcagcccctgtcccaaaggagcgaatggagagacccagcataggagctctgccacgagagggctaaagcaagaacacaccggcagggtgcccgggagagcaggggctggtgtcaggagcagaaggaaccaaggagggctgcaccctgggctaccctgctcactcggatggggtgggcatgcgctgtccttcccgtttatttaggaaggaggggtctttcccactgaaggagaaataacttacccaaggtcacacagcctggaagtggtggagccagaatccaaacccagactgttgtgttgttttgttttggatctttttaaaaaaatcattttaaaataggaatgttggctgcttgaagaacattttgctacaggattacagtagtggtattttccccaatgccttaccatttatttggctcggtagcctctttttgtataacagttttgtaccttgggctcatttattaatcattttacaaatatttattgatccataccacatgccaggcagggttctaatgtggatatgagcaggggctatggcccagctttcccagtttaccatccatcagggtggggaccaagtaagtaagtaaggaaaatgatcacctgatttgttgtcacgatcgctttgaccattattgtctaccaagtagtctggactttgcgattaaaatggtgaatttgcacatcctaataagtttgagtgtgaaagggacatatttttgagagttagtgtaagcccttctgtctgtagaaggagagtcacctggaacttgatggctgtgaatgtagcttggtgacataaatcctcactctcagctgtgtccaggagaactgtctgctgtggtggaaatgttctgtgctgtcctctgcagcagcccctggtcacctgcgactgctgagcacttaacatatacagctgagaaagtgaatttttaactgtagttattgtaaatttaagtggacacacctgtcttgtggctaggatattggacagcacagtcgtagactggaattgttcgacttttttggaaaaggaccagattgtaagtagctttggctttgtgggtgaaagcagccatagacagtaaatgaataggcataactgtggtccaataaagctttattgacaaacaggtgacaggctggatttggcccatggaccatagttcaccaactctgttctagactgttctttgactttcggaattgcctgttaaggataggaaagcatgtttcctgcaggccttcagtctagtgcctcctccctgtgctgggaagctgggccagccgtgatgctgtgaggcgtggtgggtgggcccacttcccaccctgcagcgcatgctcacttcaggagccaggtttaaggcagtgacagccaagccggaaagatggtaatggccagagaggaagcacacagtttgagccttttccagctggcccttattctgggcttcaagaatgttattaactgctctcatcttgttctagtcattagcaaacttatccagtggatgagtctgtccttgaaagactcaggagtagctccagcctggtgggatgttggagaacaaaccattcttttgatgtaaacccattttttcttgggaagtggaagtctaatggaaaagtttattttctcacaagtacttcctgagtcaccaatttgttgaaggtcttcacctttccaataaaaactcattaaaaaacatgcaagaagcaagcacagaactcaaacccatggctttcatttcctgctgcgctaaatctggtgacttaacctatattaataataacaatagctatacataatgcacatgggttgctaaattagtaacacacctgcatggtgtgaagtcagtaagtactagtgagaatgggtgccccctgttatctttattccctaaaattaggaaggaaaaatgtttgaatgatgactaaacagttcttcaaataattaaaccagtgatcctctgaacagtgcctcagctcaagatttttacttcacaaacatctctttactatgtaactgcagctctctgcaaagtgactttatagaactacagccttaaccttacccatatcctatcctgtatccaatcctgtatcctaggtgtgaagttgtttctttcgtattcctggtggtgtggaaggtaaccaaagtaacagataactctctgaggaaacaggggtgggtatgtttgtgtaaagtctgtacacctttttgttccttaaacacacacacatttatgctcataaacacactctcatccacctccctcatccatacgctctcaatctcagaggcaaaaacaaaagcttaccatccagcttgggtctaatgtctgctcaggaggttttgccttgcagcaaaagctatcttctaaaattttctcattaaagtatgttgtgtagaggaatgaaagaaaaatagaggtaaggttattagtcaagaatagggtgtgtgtttttaaacccaggaaaagaatagacagaaacacaaagacaaagtggtttgggatacatcctaacttttggttccatatgwcaaataaaattgcgaggtggttctttttggatcctacagcactttgccaattgtgacaagctgttgtgaacactcatgtacttcttcctcacagcactcctgcctggcaggtgagcaggacaatcctagtatttctcctccccaaggtcacccagcctagagggtccagtccagggctgttggcagcaccaagtacgaggtcccgaagctgctgctggtggctgtcccagaggagaagcagcatacgttgagtgccttcagtgtgctaggtcacagctgaaaccctgtacctctgttctctctctgaatctgcccaacactgtgaggcattataaccctcccccactcactaccgcccctgccttttttgtccccccgggagaaaaaagggagcctcttgcccagggccacagagaatgtagtgaaacaagatttgagcctcagtcagtctgatagcaaagctcatgttctttgctctgcagacatcagagtgttgagagatgctggtgaaagctcccacctcataggtactttttgatttttactgttttctgtacagtggtaatggatttgagtgtctggagttcaaaactcatttcagggttgaataggagtttgttaaaggtttacatgcgtatgttcttggtgtgcagggagaaagttgataatcttacctgctgtcccagttcacttaccaaatctgccagctagtaactgttgacttacctcctccacaaaatcaggagtatcccgaggacagtcctgttgaacttgttctctggtgacactgagcattattcctagagtagaggcatcagttagtgtcagtggattaaaaattaaaagttatctctgagtgatcactcaggaaatagctatctactatatttcttttttgagttggagtctcgctttgtcacccaggctggggtgcagtggcgtgatctcggctcactgcaacctctgcctcccaggttcaagcgattctcctgcgtcagcctcccgagtagctgggattacaggtgcatgccaccacgcccggctattttttgtatttttagtatagacagggtttcaccgtgatggccaggctgctctcgaactcctgacctcaagtgatccgcccgccttggcctcccaaagtactgggattgtaggcatgagccaccacacccggcctatctgatgtatttcttagctaaatacctcatcagtggaatgagaagctcatgagaagctgtactttatttttctttcaatcctctatacgctgtagttaacgtatttcaatgaaaaacatataggagatggcttttgctgcaaggcaaaaacctgctgagcagacgttatacccaagtgcaagagtaagactaccaaaaaggtgacagactttacacaaggcggctggttgaaagagcgacacaggtgcccactccactctaggccttgctcaggcgctgtttccgctccctgtcacactggaaataggaccgccaagtggtctaaacgtgggataaatcatttctctcactcacatcttggaaagacgctggctaaaatgcatgggggaaaccagtactcccacagcaggtagaagtctggctttatttgaggcccttgaattacacataaatcaaaaactcttctagtttaaaaaagaaaaaagactaaagagatataacaggtaccgtgagtgaatctagatcagatccttgttctaaaaagtgtgaaatcaaacctattagagacattttgaaggcagctggagaaagtggagtgcagaatgatgttggatgtgtggaattactgcgaactttctaggtgtaaaaaggtgtccaacttttgtaagggacttttcttattcttagggaatgcagaatgaagtattaataagtgaaggatcgtgatctctgcaactttaaatggtaaagagaaaagtgggtaaaaagcaaatatgtcaaagcatgaacagttgttgaatctagctgaggggatatacaatatacaattattcattgaaattctatggagattttaactttttcataatgtttgagagaaataaatatatatatttatttatatatatattatatatatattatataaatatatatataatatatatatttatataatatatataatataaaaatattatatatgtatatatatwtwttttttttgagatggagtcttgctctgttgccaggctggagtgcagtggagcaatctcagctcactgcagcctccgcctcctgggttcaagcaattccactgcctcagcctctcaagtagctgggactacaggcacccaccgccacaaccagctaatattttgtattttaatagagatagggtttcaccatgttgaccaggattgtctcgatctcctgacctcgtgttccacccgcctcggcctcccaaagtgctgggattacaggcgtgagccactgccccaggatgagaaatatatttttaaaaaataaggctgtttcgctctcttatcatttcaatattctctggtgaaggaaatatctttaaaaagggtctgctttggaaaaaatgtacaaagaaaatgtaataacttagctactgtttcctaagccatgagcagtggcctttcatatttgagtctttgccagccagtgttggtcctctggttgtaactcacagtagctgcacagacggccacaccatctgacaaaacagcgtttttggggtgcataaccgtttttgatgtttattggcatttttattggtcttttggagtgtaactgcctttgagccacactagaagataagataaaaccaaagtttcctccgcactttaagaggcagggtgtttggtggctgagggtaggacctggagccacacgccagggtcagatcaccccccatcccccaccccgcccaccccaggcaagctgaactgtctagggcatgtgactcactctctgtttctagaaatggaacgtgaaatgggaataataatacaacctacctctttggggttttttgaaagttaagtgaatgcacataaagaacttaaaatggcgcctggagtgtcgtgagactcagtgctcatggtgtctgtggttgtctctttcgtaggtcacgtatggtactctagggccccgccacttagccataatctgttttctttttctccagctgtattatctgtatttgttcatctcaaagctcatctgtctctctctctctcttttacccagccttttcatctcttgcagtttgcttggcatttcaccatttggaagaaattagtatcatcagtacctctggagtttgcactatgctctgcttatagattgtgtatagttacctgctaagatggtcctaagcacatgtccacggcctcagttcagagtatacttaatgctccctattcagtctttctgttcccgtgctccagtccgtgaagtctagagtaaaataagaaattggcatttatatacatctcccctcctcatctttaactcttttgaagaagagagttttagtatcacattcataagaaatttcatctttaaaagttggtattacaggcgcagtgcctcacacctgtaataccagcactttgggaggccaaggtgggcagatcacctgaggtcaggagttcaagaccagcctggccaacatggtgaaaccccatctctactaaaaatacaaaaattagccagcgtggtggcgggtgcctgtaatcccagctactagggaggttgaggcaggagaatcacttaaacctggagacggaggttgcagtgagccgagatcacgccactgcacaccagcctgggcagcagagtgagactctgtctcaaaaaaaaaaaaaaaagtgagcaatatctgtggttaatctcaaatagggtggctttccgtgtcatttccctttagttgtttttaaatgcagatgttgctttaattaaataatatttgaaataagtggggtcccaactataaccttatatcttattgtttttaaatgttgatattttggtgttttcagtagaatttgagctgttaacagtgattaggttttttcagtttgtcatcgatgtatgtgacctcgttataatacacatggatttttgtctgctggttgtgttactcatgagcaatgtgttctamttatggtattttaacttataacttatgaaaaagttatgtttcactctagggaacaagtcctgaagaaccctcaagccctaaagtaccacctccacttcttcctgagttgctggttcttatttttggtgggcttcaaggaagaggtgggtggtgagggtgtctgtatatgtgtgtttacatttgtagacagtttctgtacatgtataattaggaatgggttgtcggttttggtttttttcccagctttatgtaattggtcagacttctcaaaggggggtagcacttgataatcgctctcttggaactctgaagcctttgcatggagcagtgttcaccctgggcagcctgtggcccctggggtcacagagctgctttccagggggtttgcaaggccgtcactgcctcataagattaccaagatctaatttacctctcactgtgtggacgtttgccctggtggtgcaaaggcaatggtgaggaatatggcgcctttctttcatcgagcaggacagcggtgttcagctagcaacacaccagtctgacccaagaatgtcctcgataaagcatgaagttactggttttttaagtctcaactcttttgtatacctttttaattttgtttttgtttgggtttgtttttagttttgtttttgtttgggtttgtttttagttttgtttttgtttgggtttgtttttgtttggttttttggttgctcaggctggagtgcaatggcgcaatcacagctcactgcagcctcaacctccccagctcgagcattccgcccaccgcagcatcctgtgtagctgggactacaggcaagcaccaccacacccagcgtggttttttgttgttgttgttttggtagagctggggtctcactgggttgctcaggctggtctcaaacccctgggctcaaatgatcctcctgctttggcctcccagagtgctgggattagaggcgtgagccaccgcacccagcctcctttttaattttgcgtgacgaaatgcagagttcacatgaagccgttctagcatgctggagtgtgatggccgtctcgaagaaaagcgcccatgtgatgtgtgagttatgagccaaaatagccactttttccaggaactttaaattatgagaatagtaatgtaaaatcatttttacttgacagaacaaaaagcagacaaactgtggatattaagacttaaatatttggctgatattttctagaaaatctatgaagtgagcttatcaattgaggggaaaacaactgcgacactgtttttggcccatggtaaaatttgagctttcaagaaaaatttgaactttggagaacttttatctgccagtgtaaatgtggcagctcccagtgccacagactcttctgctgagaggggtggtgacattagcaagtggggtttcttgatgtatacggtggaaggtcacacaccacatgcagcagtgtgttctcagtgaccaacgaacgatgctacaaacaagcgtgggtgaagagccaccaaagtgtaagacacactgccgggtgttcatgtaactgacaggttcatcaacatggtttcagattcctcattgcaactaatctttaaggaactatcacttgttgaattttagcataggcaaagaagaacatcggcaattttttgagaagcattgaaacctcccttttcccaccagacgtgtctgtctgagcctggggtgtttctttacatatacttgaaccagaatagcatatcacagcaagttgaacacagaagcatgtcggcagatccgcctgtcttctgttgagtattgaagawacatgcaaaaatgtacaacatggccattttctcgctggtttctttttgaaaataaggttattttcataaaatattacttaacatgaagtgaacctattgctaatttaatgaataagtaaatatttttaaaattttcaagtatggtcagtatcaatggatataacccccataatcaaagctctttagggttctccatactttctaagaatgtaaataggtcttgacaccaaaaaaatggaaaacacgtggacttggaagtttttctcgaatgggctggatgtgaccctgaccctgtttttaccaagcctccttggttttttccctcttttctctaaaaaaaaaaataaaataaaaataaaaataaaaaaaaattaagtagtcagtggaatcatctaaactggtctctgggaccatgagagctgagagcatccggagcccacctaaccctgagccttcctcttgccttggtcagtttccttctttgtttttcaaatctttttttaaaagccattttcaagtaatcaattaatatgtgaatacggccccatttacattttttcttcattgcaaataaaactgaaattttccctaaccttatcccctgagattggtctaccatccccacatctcaaagtgactgctgcctggagtttgctgtgtgtcattccagaccattttctccctgtggggggtgggtgggtgggtgtgtgttgtgtgtgtgtgtgtgtgtgtgtgtatttatccacataaataatataaatatgtatttattcacagagtatatagcattttttgtttcatttctttaaaaaattgacatgagagcagttttagtaacaaaaaccttttatacgtttttaggatcttggtggcgctctcggttcataatgctctgagtkggtgttacgtcatattatcctgtattgtactgtgtatacatacgtyacgtaaatgcttaatgtggtctcgcatgtwtttctgtgaatktggcttaaactttcagactaggcatctaggaggtggcggcaagtggaaggtggagctgtcacagacactcggcccccgcagcctgtgcataggtgctctaggctaattttacaggtgtgatgaccgggccagagtgaaaccatgttgtctgattttagaacagaggtcacttatgcttcaccaagctgctggaaatgtggaattttgtttctcaattattggacctggtcctgaggagatgtttccctttagagaacatcattgacgcttttaagagtattttactagatgttgaaaacgttgaggtcttattaatgtagtgaccccaccaccaccaccccctgccccccccccacacacacacatcccttgctaaattattacatcaaatcatacaggaatctggcgctatcagagccagggttaaggcctaatagtgtcactagttactgagcttcttgattaagtcaccttactttcctgaatctccaaataagttacattaaaaatgcatctgattaaattacttattttagagggaattggaagaattctgtgattggcgttccgatctaatcccccaaagagaaraacacgaacgagaatgaacacatttctccttttatattattcttagttaagagaaatgctctgccaggagaaaacttaaatgactatccaatgggtagggttttttaaaagaatctaaccaattcagatactttttctttttacacagtcacaaatgatgttatgttgatgtgtttttatgacttactcttaaacaacatttaaatttaagccaaagttaaagttgtgattttgggaaatttttttacttatccttcctctcttcccgacttccttcccttaagaaccccattcttattttctcatttatatcctggctgaggctatcaggtattgaaactggccttttgaagacatataaacttctggggactgacttttctcattcaaatagtctaatatcagtggatatgaattctgcatttttttacttctaaatcttatgcgtcatttaaatgttaactttcaaaatattaatcttgaattttcacatttttgtgtgagttggaattattatccaattaaatgaacataaattatactgcctacatagattggaaaaatatcttttggtgggccgtgtgtgtatatgcacccatgtgtttatgtaaaaccaaacatcaacttacaaaaaccagttcagtcttatagccttgtatagtgtaacatacgggctgagacatttgcttatttgagccttttcaccctttatttgtaaaaaggaggagagcctttaagtgaaatgtaaactaaacttggaacccctaaaacgattttgaacactacttgacatttaaatgtttattaaaaataaagcaaagtttaagaagcatgtttggtaaagagttctttggcaggaaatggggacctatcagccaagctaatagccttagctatggcatccatagtaactaagacacgctgccgatgtaaatatttatgccagcaagcagtgctgcagaacccgggccgagcagttcagagcagtgaaattaaagcatcagccgccaatgtttgatttattttgtattatccggtattccaagcattaccatcattcatctcttctagggtttttcaaaatagtttagccctaagaacaagaatcctagaagaccagtttactcggagtaattcggtaccctctcccccacagcatgatagatacccaaatgagaatagagaggctgttattgtttgtcattagcaccctggaacctttttcatcttcaaagctcctcgcaaaagggttcattaaccgtcgccctctttcctgtgagagagtaaacaagtatgattagtcctactttgacagcggtggaaactgaagcagagaggttctccaacttgtctgaggtccaagaaggagctggtgacagagaccagataccggaccagcacttgggttttctgactcacggttctgggctcacccctctctgagcatgcactgagcctgctcttgcaggtttctttatcacagggatctatctacacggtactttctgctctcagctttttacagtggtgtagagtgcagtgcagctgaaaccaggttagttgatcttatggtgtcatctagaaaaacaagagatgcagattctgggtcacgaaggtaaggttgtacttttagggtttgtggttatggatgaaattaacttatctgagccttacattgtctcactaggcacagtgcccacttgttccgtggcacagccccagagctcctgttgaaggaacagactccaggactgactttccacttgattttcggagctcgcacatcccgagagattcatgttcaagctgcattttagacatagctggcaagagtattttcgtggtaaacgtaaacttactattggtaaagattcttaatgagtaattcttaggatttagtacaaaattagatatattctttttattcgtaatgatatagcatgaagttcttgcggggtaggagagagaggtattcatctgaaaactggctctgttttagtgtagacatttgtctacggggaaacagtaggaaagcatcaagaaatatttcttgatgtgtacaattgaagtgatgtttacaatgtagtgaaaaaaaaacctatgcacgcatgttcctgattttaataaagctctgcaaagatttccttcctcattctttgcttttgattcagcatatgtgctgttgctaagttaagtgttggtaaccctgtgtcctttgttgggccaaacaaggttaaaattaagacgaaaaaaatttctgagttcatttcaaatggaaggacaacatgatacctaacacagaagagaacaaatttagttttgactttctgccctatgtccacctaaagctgtatttcactcactcactaatatttagaaatcacccacttggtggttggctctgtgcttagtgctaagaactggtcgtgttataggtgctgtgggtgcgtgtctgcgctggcttcaggaggagggagcaggccctgtggggcccagcaaggcctcccaggagaagcagtgtgttagctgaagtttaatgaactaattggtggtcctgggatgcagttgggaagatgggatgattcagcctgttggggtatgtgttgggggtggttgttgcactgtggtgagaaaattcctggaaaagggtgtatgtcaaaagggtgtaagtagcatccctttatgactgatgaaaggagagcagccgagagcagttaagtggaaggcaagacgcagcagtggcttctcacgccatcttcgtcactacacaaggggaagttgggctaagaataaatttgttttggttccaggatgaaactcaagagatacagaagaaactgaaagtgatacttttggcagagggataggataagagggttttcagcgtgtgtgtgtgtgtgtgtgtgtgtgtgtgtgtgtgttgatgaatttattacttattaaaaaaatgtaaagaaggcatagcattaaaagtgggagacatatactgataatggaatccgggcattgctatctttctgtgtcttagaagttactgctatgattttagccacttaactggctagaacagttttgaaaggccaagatcatgggtttaagatttgagacttggccaaaaggtagctttcctagtccttatcgtagagtgcacgctcccagcttttgcccagcctatttggggtgcacacgctcatcgatgagggcaacagaacacagcatgcaggcggaactgtgcaggtcagtcaccactccacctcctagccagggtgtcactccaattccatcattcaggtttcactgaactttcatgttggcatttcatttagttgaatgaaccagttttgttgtatttcagatattctcactgtgtagttagcctgttcagtttttgtaggtgaatggtaaagctgtcaaaaccagatctgctgaaaaccaaaatgttcagtgtcatcttcagcagaggggattatcagaaacttctggggcagtaagggaaatttaagaaggaagttggggaaggtaggacctcatggctttggtttttctggtggtccaagagaggaggcctctagagaattgagggggaacaataagtgacaagcatgaagaatgaagagggaactgaccaaggatcggtgagaataggaggtggcccagagggcatggtcagatgtggctatcacagctgtcacagcaaagtctttatgtactccgagaaccaagcctttatcatatatatgttttgcagatatttttctcatactgtgggttgtctttttcactgtcttgatggtatcatttgcagcacacgtttttaatttagaggaagaccagtttatcttgatttgttttctgtctcctatgcttatggtgtcatagctatgaaaccattgttgaatccagacttactcttacacattcttctaagagttttttaatatgaattctcttacatttggtctttgttccatttcatgttagtttttatatagggtgtgaggtaagggtccaacttcctttatttgcatgtgaatatccagttttcccagaaccatttgttgaaaaaacaattatttccctcattgaatggatttggcacacttgttgaaagtcaatggaccataaaagggtttatttctggattctctattccattggtctgtatgtctgtccttatgtctgtaccacactgtcttgattactgtagctctgttgtaagctttaaaatcaggaagtgtgaactctcctactttgttctttttttcaaaattgttttggtattttgggtcccttttggtatattgggtccattttattcaatgatgtaatgatatgtgtgtttccatatgaattttaggatcagcttagcaatgttccttgtctctttcttctaattctgtagcctttcctgggttagaatcagttagactaggactaggacagtgctccctggaatctgcccagtagctgctctgactgtgagcagagaacctgtgggcatctgggcacttagtctgaaatggtccataaggaacccctaaaatgtttaagtttctgaaatccctggttgtattgtaaaaagctatttgaatttagtattctgtttcatgattattatacttaagtgtaaaaatgtttaacttttttttttttttttttttttttgagacggagtcttgctctgtcgcccaggctggagtgcagtggggtgatctcggctcactgcagcctctgcctcccaggttcaagcgattcttgtgtctcagcctcccgagtatctaggattacaggtgtgtgccaccacaccctgctaatttttgtatttttagtagacacagagttccgccatcttggccaggctggtctcaaactcctgacctgaagtgatctgcccgccttgacctcccaaagtgctgggattacaggcttgagccactacacccagccttgtttaacatttttcagctgcatggaaaactgatattctaggatgtatattgcatttatcatttatcctgtggctttatgcaccctccagaatgcataccccagcataaaaggccaagttagggagaaacctgcctgctggagttcttagatttataaatcttgtttccttaactgtctgccctctgacctctccagaccacagccagcagaggagaactaatgggcagagacaacactgatctgctgccatctgcactgggcaagatggcctcacctgactcacagctgttgctttctctcgcgaagcttctaccattttctgctgattcttaaaatagatttggatcttgtcaattttggtcgtcaaaaagattgaacttttacaggatgaaatccattattttcctaaattatctcgttttgggaaatcagttctcggccataagtgcaggctcaggtgtgctaaggagggcaccccagacacctgtgctgctctttgacaggacttacctgtcaaaggcgaaaataagggtgatgtcatgtgagttttccattaagctaaatttattccatgtacaggactatcttttattctgaaattgtcttcttgttccctataacctcatattggaagtgagatactgtctttttgggtattaaaatgtcttttttgtaggatcttttttttactgatcttatttgtatgttaggatgatagcccagtgtcagtcctcaggattctttatgaaatgttcctagtctgtgaaattctaactctacaatttcagtttagaccacaaatcccagatttttaccttgtttacatttgtagttaccacataatattgcaaatgatttatgtaacctcaaagcccatttttttattcttttcatgtaaaatgtccagaataggcaaatccatagagacagaaagcagattagaggttgccaggggctgcggggagggaggaagggggagtagttacttayagggatggggagttcttctaggatcatgaaaaaggtttgaaactcgacagagggctgattgcacaacattgtaaatgcactaaatgcccctgaagtgtacttgaagtggttcattgtatgttatatgaattttccatttttttgaaaagcccattttattcagtgatataatgatatataagaagacctgaaggtgtagggggagtgtcgtattcagaggatatacatcaaggcaaggatactctgtatgcttgtacacacacacaaatacatatacacaaagaacatacctattattaatttctgtttctaagtatgatcattagaagctgattaggtaaataaactttctgctttgggacaagcagaaagatttaattaacacttaactgaaattcacagatactcttttttttttttttttttttagacagtgtctcactctgcctcccaggctggagtacagtgacacgatctcggctcactgcaacctccgcctcctgggttcaagcaattctcttacctcagcctcccgagcaactgagactacaggcgtgtgctaccatgcctggttaattttttgtatttttaatagagacggggtttcattatgctggccaggctgttctcaaattcctggcctcaagtgatccacccgcctcggcttctcaaagtgctgagagtacaggcgcaagccaccgtgcccagcctcaaaagatattctttttcttacctcaaaaactatgttttccaacttttcacagtggaaagttgaagtcgtgaaaatatcctcaggataaatctgaatcgtgtttcttttattgctgagtctggttggcgtgttcctggtatttagtggaactctggtcaacacaggctgaagttagtggggttctctctgtggggttctaaccttgaaataggagcatggggcttgccttccccttctccattcctccaagaaagagaaaggaaaggaagagaaaagaaaaagcatcctgtattatgtgtaagtttgtaagaatccttactatgagttctgagtacaacatctttttaactcttttctctccctctcctgcttccttcttcaatctccagctaccattcatttcctgatttcatttataggtcttaccaggcaagaaggccaagcagaaggaacctacatcagggaagtgctgggctacgggccccacctggacttggggttctgggcagcctgaacacaggtttcttagtttcctgaagtaattgagcttgttgccttaacttcagttaaaacactgatcgtgctttacttttaactgagcattgagacctcttataatattccataaggctggatattgttttgaggaagacgatttttcctcttaaccttgcctctgtgtttgtgtgtgtgtttggtcrgtgtttagacagttttccatgcatggaccctgattacagcgggagcaggcaacgtgaggtgcccscaatcagacatccagctccacatggtggcctccctgcycccagctcatccttacgcagtgccttcaaattgagtgtcttcaaaggtgctgcttagtctcactttggttgttgtgtcgctgtcgtatttttcttttttcgcagtattgaaatgttcactcctagggaccgaacactggttttagtgtccatagtggcaaaaaaaaaaattttttttcaaaacttgtttctatttggtcctctgtgacccaagttgttgcttagctttcctgcctagtaagagccagaaacgagattaggacgtgaatggtattttctgaaccctcagagtgtgtacaataccattttgtaaagaaaagcatctatattcaaggtagatctaaataattcctagaaatgccarattgttctcccattcatttttcaagacaaatatgttctaatccataggagagtgagaatttccaagttcattaattcgggttcctgttaccaaytcatgttttacagcccatatgaagttttgtttcactgaaacctttgattatcacaagtagaacttgggaactctacactgctgtctccagacaagacacagagtttcacttacattaacaaaggatgatccattcagaactgtaaacaaatgctacattgtgcccttggtggttgtgacccgattcagtcctgctttgaggctgaggacagccaagtgttggcccaaatcagcataaatcagagcaacagaaaatccacccgaggtggggccctggattggacgtgctttggacagcaggtccacagcctgcacctgaatgaatcctgaggcgggcttctgactctgctctaaacactcatcctgaagtgtatctggatcattttaagtaccactctagcagtggtacttagttacaattaatataaacatgtcattccattaaaagaaacctgcagcttctgttaagttgggtcaaatataagatactggggtttaaagatgtaaatagaaaattcagtttcatccagcaaggaatacagagaagcagcaatagagcctgccagccctcggggagcttgcagtctaagagaacacaaatatgtataatttaaagtaaaatggaagtgtcactaagcgggtgagaggatgcaaagattgccttcagttagagtgataagtaagttaccgtcacggcagcatttgcaggtattggagctttattgtaagtttcttcattcagcaaatacttccgagcacttttgtgtctgatcctgttatagctggtggaaaattatagactaacaacccatgtgcaaatgacaacatcgtgtggcatgtgcagggctggcagctacatggggacattaacagagcccagcagaagggcacctcactccacacctggggagaaaagaggtgtgctgagttttgtttatttttttatttgcacttgttttaccataaatgaaatatgacccttcttaatatgttatctgtgatatgttggcatggatatcttaatgtataaaacatgcttatatttatatatgacattatgtttatttttggctacatccagaaaagaatttgataaggcttaaactattaaaacatgtgcaacaggctattaaaggaaacaaaataactagaagccagttaggaggactagttcagctttygaatggagctattcaacagtttcagaaattttttttacgctactaatgggccagtgggcatagcatctttttaagcttccttccagtttgtggtactaaaaccattgcagatgcataaaggaagatgcttatcatcctgtctgagttgtaagatgggacacaactccttatcatagtacattccttaaataagtacaagaattacagttgacccttgaacgtcacaagtttgaactgcacaggtccacttatatgtggatttttttcaaccaaatgcagattgcaaatgcacaagattcgagacctatgtatacagagggccaacttttcatacgcacgggttctgcgggccgactgtgggacttgaatatgcgtggatttgggtaagcgtggtggtcctagaagcaatccccaacatggaccactgtagtctgttacttacattggctttaaagttgagtttaacttgtccaaagacattgttatttaagcagcaatattatgatacagctttgaaggcaaaacttaaaaaagaacccatggatagccttggaaccatggaaagattctaaccctgagcttctaaatagtattgcatttgtagaaccaaagactagcaggggatcagcaaaggctgagagcaagtggtctgtatgtcctcataatgaaaaggagcagaacagaacaacagaggtaaagtgattttcttgctcctcattcaggtaatcattggagatttgttcagcaataatagtcaacatagaaatctacagtgtaggccaaatagaggatttcttgttatcttctttcttcgtactgtgggatagatagcccaggattcctccaagtgtggcaagtgcacaccactgctaacggcagttattttaagtgattcagagttgagtattattttactttaataattatatattgatgaatgtgaaaatatataattagcacatcaaatccatggtttcttgggttattattgcttaggacagggcttagtaaaaagtgtatccatttaaagcaaaataccaagtaaataagagcctgactgtacacagatttgtgacgatcttgaaggtgttcatgcaggactgaagtacgggaaaccccagggtgggcractctgggttccacctggggaatctgttccgaagacaccttcccatctctttcttgggttacaagcagtggagacacacttgggcttgcatagatgaagacaagtgtttttaaggcacagtcacagagggactccacacagaggagcagggtggagckggactgtggaggcagaagggtccagactccagcagcgtgagtgacccctctgtgtcctcatccaccccgccactcccagtctttgcgtgtcatgccccttcttccccgcgctttaccgtgtaatttctctgcatgcycttctgcatttactcagtaacataatacagttagcagttgtgggacctccagcaagtattgaactgttgagtggctgttcttcatttggaaaatgggagtgataacagtttctctctcacaggacagttgtggatagtcagggaggttgcagtgtgaacactaggcacagcatctgaaacgtgctggaatcagtcatgtccacactggcagtgattagatctgcctgattcttcccatgttccgtctagtgagaagtcgtcagtagcttcagttttcaggaggaaaactttgacttggtcaaaactttgtccttgatcaagttgtttactctcacgccaagccgccctggagtgtggtccaggaaaaacatgggcgcctaggtccgcccctcggccagccgtggccagaggtcactggtgctgctgttcacatggccggtgtcagggttttaattcgaggtggagcttcccagccgttctggtaatgaggagtcttgcctgatatgtcttggccagctctgattggtcaaatgtttgaagaagatagggttaccaaagattcctagactctccaagtttggcagaagttgttagaggatcacacagttacctaaaatgattggtttaattatatggtttgatcattcttcagaaaccaccaccttgggtaaaccattgttcttaattttcccttcattttttgctctcattgtctggccccaaagacacacccccttgcgattttgtaaaggatgcatttcattgagaggacacagtatgagggagcagcacatggacctaaacttgacttccaccacccccagccagatgaattgctgagtcagttcactgttccaaaactgttttctcaaggcattatggtaacaggccatgtgaaattccctaacatgactaggggttttcacttcccagctttattcaatccaagggtttttttggcattttttgtttttaagacggagtctcgctctgtcacccaggctggagtgcagtggcgcgatctcagctcactgcaacctctgcctccagggttcaagtgattctcctgccacagcctcccatgtagctgggattacaggcacccgccacctgccaccacgctcggctaatttttgtatttttgtagagatggggtttcaccgtgttggccaggctggtctcaaaactcctgacctcaagtgatccacctgcctcagcctcccaaagtgctgggattacaagcgtcagccaccacacccggcctgaatcagttttgacattgtctcttcctctgggtggcaaatgtgatccattcaagacagattatatcccatgtgaagagtcaccctgagaatttgagcagggtgtgctgtgtggttacttggactccagacccttgtctgcagaactggtgggaccttgactgggtccggttctcctgtctgcacatgcaggccatggaggtgctgaggttgcagcagtgacggcagcactgagggtcagcttcagggggaccctcttcaagccaaacaaaaagtcttctcaaaaaatggaactaaagatggtcccttgatgtggcgtctcagtacggctgctgaggtatctcacaaggccaccagcaagttaatctaaggaggcattttcctcttgtgatcaggcagctgttccagcagaaatggctcaaggagaaattctcctcccagattcagtgtctggtgggtgaaacttcactggtgcgttgccagccctggcctccaaatctctttaaattatgaggtcatagaatgcatgcttaaagccccaggcctgtcaagtcgcttggggacattcatactgaggatttattaagatattaatttggttatcaggagtctggatggggatgagaggaggggatctttattacatgctgggaaaatcagaaatcaactctaattgactacctctactctttcctctcccaagatgactttgccaaaaagctgtgagaaaaagtcctcaaatctcagagattgacttggtacttgattatatccagctcgctggtgggcctgtggccacagagcctcagaagaaggttagaaggtctggccagactttagctttgctccacctacttggcagggtcaagcctacttgccagtggcttggagaagtgttttgttttgttttgtttactttttaggagtgtattcaaagcacattcacagtaaggaaaaaaaaaatgcagcctgtgtcttcagggactgggagtctctgattccagcacagccgactgtccagcaaccccagaattggtaggctggacactgggctgctcctcatggcggtgggagcatgggctgctcagctggggccatccaaggaagcaaagatgtggtgctgtcctgtggctgggggagcaggatgaattgggataagggaagcccagggcagggtgttggcacagagctgggaggtgcattacaccgaggaactgacgtggcctaaactccacagtgacttccacctgggatcacagtttacagtcagctgagtgctcaagagaactcagtagaggggaatgttgatgattcaggtatttggttggtgatcatgttatcaagtcagacttgcagttaaggtagtgtcccagacgtttgttcagagggctccttcccacttgtcatctgtaatactggctaatgggaaacctggcccatgtcaaatttgtattaggaaccattgatttcaattcacgggctttttccattgaggaatttaaaggtcttagaagtaatattcttgttaaggcatctgaggtctcccgggggacagacacagtcttcatcttgagcaggaacggtgagaccactcttctccctgtaagggaccagtagcatgtgtgggaccacgccgcctgcacagccgtcccctcacggggtgcctcttgcccttgcagatcaccaggtgctccgagctgccctgcctgggctcaggcatcagcacggtcccatctgagcgtcgccttaacctctctgtagacctctgtccttgtctatctaatggggatgatggtagcccctctgtgtgttcttactaggattagtgggctgggaaaagttacagtaatatattaccagcatgtagaaaatacccaataatgatgaactattagtattccttaaaagaattaaaagtgaaaatagtaggaaacactagtaagataaaatacaatgggaaattaaatttttttaattacttaaggaaattcctcaatccacaagcaacaataaataagaaactgagatttcctagcagctgaaaggtttttttttttgcagttgaggctgtgaagctgggcagggtttcagctgagctgaggttggaagtccctgaccttcagctgtggccgcctacggagcagcagggagagcaaacccatggagaaccccgcggcccccaaagcatggacggagctgccagccttctcccctgcccttcttcctctactcccgacctgccagccttctcccctgcccttctgcctctactcccgacctgccaaccttagcctaaaatcagagctgctagaatcacacacactgtcgtagctggttttgtattgtaaatgagtcattctgttattttggaaacttatgtctcatgccaggatctgcagatagttctttttcaaaatattgtttagacaaaataaatttctttaaatataatatctctacttyaaatgcctggggtgttgcatgcatttttctaggctagcaaagcttaaagattatttctataatttcagttacatttacctttatagatgggttactctaagtaacaaattaaacacacatggatcttctaactttggctttaaatcctaagaagagataggtaatatataaaagagtattaaaaagaaatggagagtaaaggtatatgtcgggcagatgcagtagaaaagcaagggtcatgacrtcaatgctgggcaaagctaaattgtgaagacaaaacaataatgaaacagggttattcatcacgctaaagcgtacagtccataggatgatataactaccatgaatttggcctaaatgattgaacattgaaacacataaagcgagaactgtaggggattaaagacaaaatcagtgagtgcagtgctggtgggagaggcgcctggacttcttggcccctcacaggtcatgtggtagacataagttgttattactgtgagccagtagagactttcaggtttgatggctggaaaacaaatgctcattttataagtttttttttgttttgtgttttgttttgttttgtttttgagacggagtttcactcttgttgcccaggctggagtgcagtggtgcgatctcggctcaccgcaacctccgccccttgggttcaagcgattctcctgcctcagcctcccaagtagctgggattacagtcatgcaccaccacgcccagctcattttgtatttttttttagtagagatggggtttctccatgtcagtcaggctagtcctcaactcccgatctcaggtgatccgcccacctcagcctcccaaagtgctgggattacaggcgtgagccaccgtgcccgaccctcatggtataagtttttaaacttaatatatactagcttacagaggaaaccgatgtgatttccaaaaatttgaaataattagaaaccttattctcacattataatgcaataaaaatagaaataaacacacaggcggaaaccaggcatccctgggagtcccttggggcagagaagagcttcgtcgctcaagcaaaacttccatggaggcgaggactgtgggctttgttggaagctttatctccaacctctagaacacgagcactaagtagattctgaacaaatcttattaaatgaataagagctaataatcctaataaatatgttgaaagcactattctaagcatgtacatttattatgtcactcactcctcacagtccctgttcgaaggaggtgctgtcctcatccgcatttcacagatgggggaatgggaagggtaggctcagtcacttgccccagaattgacagctggcaagtgggagactgagattcaggctgggctgtcggacttggccgtgttctcatgtgcagaaccaccattgcctccaaattaatgaaaaaatgagataaggtaatggcttagagttaatgtgtaaagattgttattaaataagaatcaaaagaagtgatttaaacactaaagaggtagcaaagaaccaaagtaagttgaagaattactgtgttctttaaagacaaaagcagaaatgaatcaactaagaaaaagagagaatgaaaccaaagaacaggttttggaagggggcagacagcgatgaagcggggagagtaaagacaagtagacctggagccggtgtggtggaaaaaggagagaaatcatagcgtgtaagaagtagtaatcgtcgaaggaaggtgaatgcaagcgtcttgtgaatctgaaaatggcattttgtaaaattcactttccattcctgatttgtagtttgtttgcttatttgttaactttcttaaataatttcaaaagcatggaaaagttgcaagaatgatataaagaatttaatcaaaatttcacccatttgtcaatattttgccacatttgctgcacatttctctcatatgctctatatgttgtaacgagcaggcrgtcttcccagcccctcctttaccttcagggccctggcctcacytcttgtccccctcgccccaggaggctgtgaaaagcaaagcactgtgcctcccaggcacatgatcttctcagaaaggaggagccccagggaaggaggaggcagcccctggcacacagcctatcctttgagggttgtgttgtcctttcttcttggttgtataaatcttcactattttggctgggcatggtggctcatgcctgtaatcccagcactctgggaggccaaggcaggcggattgcttgatgtcaggagtttgagaccagcctggccaacatggtgaaaccccgtctctactaaaaatacaaaaattagctgggtgtggtggtgggcgcctgtaatcccagctactcaggaggctgaggcaggagaatcacttgaacctgggaggcagaggttgcagtgagccgagattgcaccactgaactccagcctgggcgacagagcaagactctgtctcaaattagaaaagaaaaaaaaaaaaaaagccgggtgcggtggctcatgcctgtaatcccagcacttgggaggctgaggcaggtggatcatctgaggtcagaagttcgagaccagcctagccaacatggtgaaatcccatttctgctaaaaatacaaaattagccgggagtggtggcacatgcctgtaatcccagctgctcaggaggctgaggcaggagaatcacttgaacccgggaggcggacgttgcagtaagccaagatcgcaccactgcactccaacctaggcaacggagcaagactctgtctccaaaaaaaaaaaagaacactcatttccagagtcaagttacgtgaccacaggtggcacagggcctgtgagaacagcctgcgacgacttcctgccagtcctcttcttccccatctgtgcccctactccacaggcacctgtggacaccctgacctgagctggtgaggcttcaccagtgcacgcctggctgcttccctgcctgccctccggccctgtgatcccatgtcctggaaagtgtaaactctttacaaaattccctgtcgttttagtgaggtttcagaagagagtagactcagataaatgtattccatcctccatctgtaatcataaagtaaaacattatttgtgatgtaatgcttttaaagaacaccatgagaascctgacttgatttattgaatcgtagcacacatgtccagtgaaatttcaaacagttgacaatggcattacctatttgttggcatgtgagacatgctggacacgggggtgtgggtagagaacagaggagcccatgaagcctggctctcagtggtgcgctcgtccgcacacactcggagatgccagcagtgttctctctgggttggcctttcctgtgttgtttggatttttttttttctattttacagtgagcatgtattatttttctgaaaagaaaattcttcaaaaataagttatacatgtttacatatcacattagccattgaatactaagttgtttcatgtaaagaccagtggtcactatacacagagcgaaagatttcatttataggtttttatatggtccttcttgtagtgcccaccttgtaccttattttcctggattaaaaaacatacatatcacattattcttttctctgttcctgtttagagaccctgttgtattttcattttttccccctctctgggatttgctgctggcactcaagttcctgaaagaagcattctctcatagtctcaaaagagtcagaaagaacctcatttttcaggtgtagaaactgaggcccaaaaaggtcaagcagctggtcacggctagttaatagcagccagcgtctcttgcctttttcgtccgcttgctgctttctggtttttatcttcttacccatgtgagcttccagcaccacctgctccccccaccmccaaaaaaaaaaaaaaaaaaaaaaaaaaagctccactccaccggtcttttataacctatcaaactttaaggatatttttccattcaaatctagttatgccacagattgataatactaagatgtttgtgaactcaccaaacagattggcccccccatgacctagtgggtacatctgtagtaattggatttggggttcattcagcctctttcaaccaacatttaagtagttcctattgcactgccctgttacaagatcaagaacagcaaagcactattgctgtgctgtttatcagggcatatgcataattgtgttatgcagaaccagacattgtcaaattgagattccgcctttcatttggtacaaatttagttgctgagtgcagtgcattagaggcctgcttggacatgcctggagaggatgaaaatgttgcttccgttggttgcttccattagttgcttctgttaccatcaggagagtaacaagattgagttatagatgctggtaagtcacttgatacatcattaacaaaaaacaaaaacaacatttattgaggacatgctayatttcagggatttttctaagcactgtacatctcttaattcacatcaaccccagtaaagacaatattcccattttccagttgagaaaactgaggcccaaagagatcgttttctgcccagggtcactaaggtagtcagaggtggagttgggactccagctgggctttctgcctgagttcttaacacctttgttttactgctgcttcctgtcttcgaggctttacagatatttgctaaatgaaggattcagagttagaaatgaagggggcgactgtgcctagtaatggcctcagagtgctgtgccttgagtgtttttagtttagctataaaacttggaccatagggagcaagtcctaggaagtactgtgtacagaaaagtagactctagaggacagcctgtggaggtttccccaaatgccaccacctctcagatcacccaactgagcttccacattgaaagacacggggccggctcgttccgtgtccagacagacactttcactctgtgcctccggagatgaggctccctgctgagcggtcagtcctcacctgaggaggtggggcgaggaaagggggttgcccacggtcactgtggtgttggtgttctttttgaaacgaaaccttccagtcgcagacacaaaagccgtagagagtaaggcagaggatcggccatgcttctgggaggcaggggaggggagcacctgtcaaaggggaccctttgaggccaactggggcagtggggccaggtcagggagcagggctccagggccaggtggacagccaggaggctggagtcrtgcagtccctcacaggctgccctargcttagtctggaaggtggggagcgcctcctccttcagagaccactgagctctcagctccccatggagcttcttggcacctgatttctagtgccaccttttgcggctcctgtggagagtccagctcacggaggccccccagagccctcgttatacctgcaggttccccccaccaaaccctgctgtgtcaggaaaacagaarttcagtggcagcgcagacttatgggtagagaagggtcccctgtctttcaacacttacccaaacactagaatgttactcatttccatgaataataaaaatatcaaatctttaggtgacgtatcttctccagtggaaaaatgaaccttttagctggtaaacctcttgaataaccggccagccatattacagtcgtgttacttagggagtgtgatatgatgggccctttgagaaagcgatcgaaagccaaggtttccgggtgcagcctgccccctcaagtccccactgaaacaggaggagagggcaggagcgcccgtgggctctcagtggctacgttgcttgttggtttgctttcctgcctggtgagcggccactggagcatcctgaggaaaggggagtgaggagcaagctggggttcggccccaaccggggtgctctgcgtgcactcatcagggtccccacccaggtgtgctggtgacaggcatgagggtactgtactggggagctgtgagtcaccacctgaggggcgcctgcttctatcccagaatcatcctccaggtcatgcatctatgtccagcccttcccaggtgtggtcagtcccctgagagcagcgtggccgtggtgcctgctcacacctggcatgggtagaccagccttagctcgggagggcatggatgggagtgatgtgtcttttttctttttttttttttttttactttattaaaatactgagttttatttcgcatgtattttttttatctccccaccatttccgtgtctgatcaccgctactactatgtcctatcatacttacttaaaaccatacatacttaaaaccaagcagagagtggagttccatctttaataactaaacaggcattttgggctgggcacagtggctcacacctgtaatcccagcactttggtaggccagaggggaaagattgattgagcccaggagttcaagaccaacctgggcaacacagcaagactctgtcttctacaaaaaaataaaaagattagccaggagtggtggcatgtgcctgtggttctaactgcttgggaggctggggtgggaggatcgcttgagcccaggaagttgaggctacagtgagctgtgatcacaccactgcactcccgcctgggtgacagagcaagaccctatctaaaacaaactggcatttgggaacaacatattcttggcaatggaacctggacagcattgatcaaacatggtagggaaagttctcattctgcattataaaaaggactgccagatatcaactgttagagatacgaaataagatggaacatttttaactgtttattttcttaaagagacttcctgccctgccagagatcttgaatagccccctagtcagtcatccagaagccattcacataattgattttcttggcttccactctgaaaagagaaccaccttttgctatacttggctgcatgtttgctttaatgtcttctgcagaactaggttcttctggtgttttaggagtattttcctattttttgaaggattcctgaccttttcttgacattggtgacttggagtcttttccattctggtttgattgttgtgcatgattgggtagagtatctcgtatagatttcttcactggagatttgtcttcagtttccttatcatcatcatcatcatcttcagcaacagcaaattttacttttttctgtggaaccttgctgccacctccagggggagatcgctttccagatattctgaagagtttcacatcctcctgtctctgactctgcatcttcctccccagctactaagtgccatccattgatacacacgggccctgaaccacacttcacccacaacgccacaggtggtggtatttcatagcccaagggaagcccttggctgtacagatgttttcaaagccatcagtgttaccgtaatcggactaccttcatcattcattgcctctgcttcaacaatgcacaattcatcctttgcccctacgatcattcttaaagatagctagtgctcattttcatcatcatccatcttaaagtgattatctgtttttggtgttttttttgttttttttttttttttgagttgatggccaggtgaggtggaggccagaacgcaaagtaggttaataccaataccaggtaactaattcgaatcttagagagtggaacggtgggtatttgacaagttcgaggaggctggcagcttgcgggaggggccggagcggtctggcactggtttctctctgtctcacctccccagagattggacacacacgtgcacacagttctgatatcgtggtttctggcacgtgacatggtacccgtgttgctctgtggccctgatcccccggctgcccctgcaaggctggagctccggcagcaccgcagggcccggtaggtcctggcacacaggccgcatgctcattgggttgtgtctgtcaccgaccctccctgctgtcatccccgggctggacgtcatttgaaggaagagccaagtttcagcaagagttcgtgtctagaaggaagcacttgaacctcctctgtctgagacatggagaaaggaagtagagaacataaaaagggcctggaaaagtgtgtgtattttcagtgtatctttttcacacctctacactgctttgtctgctggtaaacatattgaaggttctggaatcaatttcaagatggaattgaaaagaacttattacatcttcttgtcaaatgttaagagctgttacttttcctgagacagtacctgcctttgttctttggataaatgagctactgcattgttggagcttcttgtcaccaggtgcagtaatattgttaacattcagtatttcaccagtcatgctagtgaaagtggaagatgaagcgataacgggctgcacgaagggtgttgagcatttagtaatcagtgccctgggtgcctgttctccccaaggctttctagaactagagtcctatrtgggaaatatggcctgtatctggaaataatgctgtgctggatttatatctttatccctaggagtttgtttgacctgtctcaacctttccctgtttaaaaaaaaaaaaaaattgaatcttccaattcagctaacaccgttgaattcctcttgttgcctgcagccggagtgaaggttcattctgaatgtgcatgtgtgtccacaggagattttacagctgaggaacctgaggctgagaataatttcatgactttaccatgttctgatttggcagagtctgaaccgggagtcagtttgttcttccatatgactccctttactgaaaaattcactgaagagcttttccgaggaaagcagcctctcctggcctttgcctatttcagcctgacttctctccatccggggcgcctctccactccactccaccccacccttccccacccattccctggtagaagctgccagtcttcatgggcggaaagcatgaatgaactagaatttagcttcaaccactgccttttgaaatgaaaaatatctgccttattaaattatactgttaatttcatgagaaagggatgatggggttggtggtagaaagttgtgggggaagtgaatactacccctttcttcatatgcaaataaaaccaggctaacaaatcagaaaaacccaaagggtttaaggtaggagcagctcaggtttgtgagggaaccccagcttggtcctggggttagcagatcttcctctccaggaaagataatgtaaccttggtacatgtgtacaacaaagctggataaaccacagcattggaacgttatggtggactgtgagccatgggttgtctctatccaaacatgtaaacgagtgtcagtgtagaaactgcagaccagccccacgttaccaaatttatacccaaatgaagtgtacctggcggtactgttcattttgcccgaaatccacccacacggagtggaaagatggtttcagcatccctggtgacaggaagggctgtgcaccacctctccgggtttctcatggagccccgccaaacagacctagctacaggcagccacatgctggaaccgggaacacttagagtgggcacattgaagccagcttgcttcaactccttcacattgggtggtacagacagacccggagggaggcggggacattggctacatttgaatgaaataacatccatttagaaacctgagcagaggcacatgtgtgcagggaagctaagataccatatctcatcacacctaaggcactgttcattgtagtccaaaccatttttaaagaattaccaaaaaaagaaaaaggaaagtgaaagatgtaacttgattttagagacattaatatgaaaaatgtatgtattagaatggataaaataagacacttgcactttgaaattaagaaggatttattgtaaatttcagaagtcatctaccgagttacaaacagtacgagaagattaacccaattttgaagttatgtaggtgctaagggtcagggtagaagttagtcttgacattttgtagatatatagaagtatttcattgttatgtttattgagctttcaagttgtagaagcttggatttatagagtaagagatccttgttaccaaaaatgagggctggcaggcctgtaccggggaaggcagagcttgtgtgtcgggtttgcctggaagagggctgagggctgggttcatgggctgtagctaagggccttctcttctgaaggagaactgcctacctctggcttcttggtttcagttcacccatgtctctcctgaacagagatcaagttggatcgctcatctgcttaaaaatcctctgattcaaatctctcttcccacagaactttttagatttttctatcaaagcacctctgactgcagagattccacagaagagaaatgcctactaagagcagtttctttgaagacctgagttttatcttaaaagtttatgtagatgttgcattctactctgatacaggtggcgttattttgatataaatatatttcaaacggtacctctcagttaaattacctgagtttgttttcctcagatggatctgttcattcagcagacatctgtggtcccactatgtgctggccagttttagatgctgaggataaaaatggtaaaaagacaaagttctcctctgagaaaatttataattaagcatccagtatgattaatgtagggtatataaattattatcaattgttctcgttttgaagatactgtcttttgaggaaaattgattttccaggagaatgcagcctgattaatatctcctgtaacttcaggcccctgtgattgacaagtgagtgcctctagacagtctccccatttagtgcagccttcagtgccttcccagcaactgcagcctctcctcagctgtggttcctgttctccctgagccttcatccgcatgtctcccagcagaattcatcacctcccatattctggtagttttcttttagatcagatactgtcttttaatgtatctatcatcagtgcctagcacagtgcctggcgtgtatgtatgggatgcgtttgcgaaatacttcctagtgatgcaggctgtgtcctcatggttggggctgctctttttttttttttttttttcctgagacggagtctctatcrcgaggctggagtgtggtggcgtgatctcrgctcactgcaacctccgcctcctgggttcaagcgattctcctgcctcagcctcccgagtaactgggactacaggcacatgccaccacacccagctaatttttgtatttttagtagagacggggtttcaccatgttggccaggatggtctcaatctcttgacttcatgatctgccctcctcggcctyccaaagtgctgggattactgcgccactgtgcccggcatgagccargcatgagccactgcgcccggccttgagactttagttcttatatcccarttgctccccacccatgctttagatctgataagcaygtcataccacagtttttattttatccatttgcaagcataattactgatctttcttttaagagagaatctttatataaatagaaaaaaattagagatcacctagatccttatcttaattgggaaagtttttcaatcaaaaaattagaagcttaaattcttcagcatgacacactatgtagaggaacgttagaaagtgtgttggggggccgggcgtggtggcttatacctgtaatcccagcactttgggaggccaaggcaggcggatcacaaggtcaggggttcgagaccagcctggccaatgtggtgaaaccccatctctactaaaaatacaaaaattagccaggcgtggtggcgagcacctatagtcccagctactcaggaggctgaggcaggagaatcgcttgaacccaggaggcggaggttgcagtaagccgagagccaagatcacgccactgcactccagcctgggcaacagagcgagactctgtctcaaaaaaaaaaaagaaagaaagaaagaaactgttgggatttcgtgagtgcgagtatgtcttctggtctcaggtagatccaggtgagtttagaggtcgtcggtgttgacgcatctaaaaccacgcaggaaacggctgacaatcgtgcagccgartgtacccctggagcagcccagggacaccccgattggcaacagcgggagttgggagaagagagggaggccagagggtgggtgtgtggaaggagactcacgtctcactaggttctttccattttcattttttagccatatgcatgtatctttagcctttgttatttgaaatataactcacatacagaagcatatgaaacaaatgtgtagtgaataattataaagcaaatacccacataaccaccattcaggctgggcaccctaaaagccccctgtaagtcttttatagttttagggattcctgtttcttcctataaatgaaattatactgaataaatcctccttatctgcccctttgatgcaacagtattttgtaaggcatatccatattgtgtatagctgtatttcattcatctctatcgctttggaatgttayatagactgcatttgcatttacctaatccaccactgatgggcatttggttgtttctagtctgagctgttaggacgttgtgctgtggacattcctttacctcggttgtgatggacgtgtatgtgagtgtcgtgaggtggtatgccaggagtgctgtcctggctgtcaacctcgtgtatcctcaacaccactgataatgcactgccccgcccatgggtggtgttcgggctccagccacaaagcagctccttgaggcactatttggtgttgtccgtagtggttttaatttgcatttctctggtggttattaatgagagtgacgagcccttcatacgtggttagccatttggatctattttgtgaagaacctgattaagactttttcctattcttctatttgtactctgaagttttcttactgagttattggacatgtttatatattctggatatgagtctrttggttatatgtattcaaatagttctatcctgtgccttgccttttcatccttgtggatgtcttgatgaaggaaaatgtttaatttcagtgtagatatatgtatataatttgatccagttgcttcctttctttctttcttcttttcttttctttcttttttgtccctgtgtacctagttgtcccaacacaacgtgttgaaaggccgacttttcctcactcctctgcaaccctctgctgtcacaagtcaggtgtcgatttatgcatgagcctgtgtgacagcrcagagcctggctgttttcattcatgaagctttacaggaagtcttgatttctggaacagcaagtcctccagcttggttcttctcaggggtgtcttggttagtcttaaccccttgcatttccacatacattttagaatccaygtattsagttccacagaagtgtgtgttggaatatggattgggatagcattgaatccrtaggtcagtttcttactcgggtaactgttatccacaggctgctagagcaagcatcaaatcaatggttagctagtaaaagctcccctctgagtcggggatgggtgcaaggggccgttctcactgctcctctcagcgttgcccagaggtcctggtcagcgcagtagataagaaagagaagaacaatgtggggacttgcagatgaaaggaaaaccagagggatttagcaagatagctacatgtaaaagtgatactcaaaaaccattttttctgtattgcaacagcagttagaaaattaagtgtttttaaagataccattgacgatcacatcaaaacatagcaaatacctaagaataaaatctgaaaattaatgttttgcacattttgagaagaaaattagaagactttattgggagacatttaaagagaacttgagtaattggcgaaacagtccatgttcatgaattggaagactcaatcctgccaaattcttaagttctccccagatctgtatgggaaatataaagggccatgagcagtgaaaacgtgaggagggaccaggtgcaggaatcaaccagacattaagtcttctagggctctagaaactcagactccaggtggtgcaggatgaggcagtggccaagaagagagagagccctgcctgcacagacactgctctaggacacaggagacactagaagtcatggagaaatggtcatttcaaaaagtggcatgtgaatattatctttaaaaacaaaatagaactgctgagcttttgtttacttggtgggggaaactcatcctctgctaagtttcctcatctgggacatagaggggagtggaatttagtacatattaatgatgaatcccaaatttgccccaagttgttagttcaactttgttcctactcgttttgtactaagaataaatacatttgaaagacaagatggcaccgtcrctaaatgttggctcctgcctttccgagagcttgagcgcttctttctgttttgcgtgagatctcttgtctgtgggctcgcgacttgcatagacctccccaggaccctgggagcaccttgcatggaagaatacacktggggctggcatggtggctcacacccgtcatcccaacatttttgggaggctgaggcaggaggatcrcttgagcccaggagttcaggaccagccttggccaacatagtgagattgtgtctctataaacaatttaaaaactagctgggtgtgggtgcatgcctgtagtcccagctactcagagggctggggcaggaggatggcttgagcctggaaggtcaaggttgcagtgagccaggattataccactgtactccagcctgggcaacatagtgagaccctgtctctagttaaaaaaaataaaaacgtgcatggaagctgagggtgctgcttgacctgatgacgctgtggtctctgtgtttgaaacttgrctgcttcagctgcttagtgaatattacgtgagtgaccagggagtacttcccacccttgtgagcctgcacattctggggtatcttttgagttgtcactgtctaggctggtagtttttgcagctgtgtctccttgctccatcggggtaatgcttatttggaaggccccaacatctgtgcagcagaaagtcctggttctgctgtctttctgcagctgccatgctgaaagttggtcctttatggtgtcttggagcatttcttttgaccaccaagacttttcatgtaaatgtgggcttggcttctttttttcaatcagtttcctatccacagtttacatgatgcctcttggtgcatagtgacaatttagtaattcagccttacttcctcatattctatgatttggtggctaagcatgtatgtcacagctctcactcccttctgtaattgaggtacatgttgctagcaacatcggtgaagttggctgtggtattcgccgtttaggactcatttacaaaagccttcactgcccagtagtggtctccaaactcttctgtccacgcttgcctggcagcaaaaacaacctccagcacacacctccactgcgtgtaaatttgtctgttgaatattagtatgttgtaatttcttgttctttgtagaagaaagtataaatagacaccctgctgttttcttcctacgttccaatcttgagtaacccccaggctcaccctgcactctagatatcactgaccagtgaaacgcattcaatttctgtacctccctgactgttgggaccaggagcatgtataaagctagacaggaatgctcccagcctactttaaaggagatctttgttaaacatctctatttatcactgattaataacaggcttccctttagtaaatacgttttttaaagaatagcacattctttttttttcttttttttcattttctttttctttttttttttttttttgagacagagtcttgctctgtcacccaggtgggaatacagtggtgtgatctcagttcactgcaacctcagcctcccgggttcaagcgattctcttgcctcagcctcccaagtagctgggattacaggcacctgccaccacacccagctaattattttgtattttttagtagagatggggtttcaccatgttggctaggctagtctcgaactcctgacctcagatgatccacccatctcggcctcccaaagcgctgggattacagacgtgagccaccgcgcctggccagaatagcacattcttatctccaccttctttctgtcattttggatgccctgggtcttttctcctcttctcctacgggttttgcatgagtatgtccatgtatattgctccggggtatgattgaggatttatcttgaaatatttggaaattgtctcaaattcacaataacatattaattaaataatgggaaaagctaaaatgatctatacaagtatgaggcatttgtaataacactttactgttacaaatcagaatacgtaaaggtatgaagcatattcttccaccacctccacccatttttgtttccccgtggtacagtcctgtcaacgcagcagaaaataagatttttaaaatatgttgatgaagaagttgttaaattaacttgtattcaaaaaaaaatggaaatatttgatagggcccaaggatgcagttttttacttttttacccaattcattgttacaggttttttttaaaacagtaaaattcttttaaaaaaaaaatagtcaaatgagattttttaaatgaagaaaagaaatgaaaaaaagagctcatgagattataatcacaggcatatctgcttatggtctataagcaaaaattctacagaaacaccctgtctggaagcctagaagaattgaaattcacttgccttttagaacagtttggatagaaattttattaaaaaccgtgttactctgctcttccttcttaattgtaataaatttgcttttgtgtttgaatgacaacttagtcttttattctgagtatcagttactgwgcagtgtttataacgcraatgatgcttttagggcattttgaggcatgtaagagtgatttaactccactctgaatgatcccaacatccttttgagtttcagttccctgaaaagggtacatttggccctcgtgtccgtatctgccacttcatagcaccgtggccttaggcaagctgtgttggctctcgtacctgtgtcctcgcctctagatcggggtaacggcactggcttgaactgctgttaggaggatttggcgaggacatgttcttaaaggacttaactggctactccttaggagccaagctgtgcatagcgtggctcttagggagaacggtggactctcagttctctgtagtgccaagaatgtgagaatgccaaacagctccaaatacacaggctgcgacaacacacacgagctcatttaaggtaatcctggcaaattagggtacaaacaaaggtgtagaattgatgagaattgaaggcaagcaaagaggtaattccaaaaatgaacgtttttcattgaaaaagactggatatctgaatgtgaagagtcctgaacgctgtaatgacagttactcgtttcaaatagttgcacagccactgagttctcagagtatttaggaataaaatttttgttctcatggtgttttaggatcctacaggcagtacaccccactcccatggccttgcgtgtgtgcttctgatctctgaatgcagcgtaggaaacagggaaaccgtagcttcctacagaatgggtctgctcagacagcagagtctgtgtgcttgttatttgcaaggctcaatgttgggcctttgggcatatagagaactagaagacatagtcacatggcacctaccctcaaaaagcatctagttgggagtaagaggtactaagcagatagctaactgtttaaagcactaacaagtgccagatgacttgctcagagtcatacatcttacctaggcagtaaggaaaggccttgtagaagaaacctcaacaggaagttgacagtaggggcagggaagggcaagaggagtgtggaaatgctcggcaccagaggaagcagaggagctgcaggaaagcagcaacaccccgccgcccccaggacactccctggagcgaggctggcatggggcagtgggtctcagggccccagtgctcctaaaaaactctgcaggacgtgaaagagcactctttatgtgaatttagctattgctactgacctatttgaaattaaactggagaaatttttaaacatgtatttattaatttactaaaatataataaacatattacattttaacagaaataacacatttttaaatgatctagccacgttggccaggcgcattggctcacacctgtaatcccagcactttgggaggccaaggcaagtggatcacttgaggccaggagctcgagaccagcctggccaacgtggtgaaaccccgtctctactaaaaatacgaaaattagctgggtgtggtggcgcacatctgtagtcccaattactggggaggctgaggcacaagaatcatttgaacccaggaggcrgaggttgcagtgagccaagatcacaccagtgcattccagcctgggcaacagagtgagactctgtctctaaaagaaagaaagaaaatacccatgttttctaaaacaaaaactaatttagtggtaagagtggcatagttgtatatttttgcaaatctctgcaatgtctggcttactaggagacattaagacaaggattcccctgtccgcttctgcattcrgtctgttgccatatgttgctttggtggaagtttgggaaaacgtggttgggaagggaggagtattttagtagccttttcagatagtcgtggacatttgctttgatattacaccaaaagttagtatgggtcgtttcttaaaggaatctgtaaggtggaatctgaaacyatatcagtaaaagccgtctgtaaattttattccattaaatcaagtggtctactttgtactttgaatggctcttttgcccttgaatggtgttaacactatttattcatcatttggaaaatacttgttcacggagttatgcaaatctcctaaaacattttgcaaatctttgacacatttcagtatgtatgtcagtcagtcccgtttattcgtgtcaccactgatctcctcttcagcccagggaagatgtcacgctcacagtggcagacagaagttttccagacttcccagaatactggaccgtcattcagagcttggtttgaatttagcttcatccacttgccagcactgagtgattttctaaacctctttctttatgtctgttgtgctgttataaagattaaatggcaagaaagtgtcaatatgtgtaaagtttttaggatgatgtctggcccaggtaagcactcactaagtaatagttaccgttattgctgtttctaaattgccatcatcattaacgtcagtcgtcatgtgtgataagccttgactgtagaccaggatgagggaaatgcagtgtgcttggtggggctctaaggtgctaactctttgaatgtttggaagttaacagtcagtttggactgttacatctttggactgatgccagttgctctgtcatctagcaagcgtggacaaccacctgcccttcccatgttgtaagctgagggcctataggcagacataaggaggcatccttccccctctggtcttttttaccctgcctgaacctaaattctgcagatatcacctggtgtcaatgtgtccacgccctttccccagacatggaccttactggttgcctctcattccactgcccgacacggtgcctgtgatcattgctgctcagagagtatttgttgaatgaacacatgtagatggagtttatttctaacagtgctctcaacatggtttgaaagagttaaaaagcataaaaacttcctcataccaaacatataatatgaccagcgactagctgggttttttcgttttattttctttaaggaatagcctttgtttaccccacccatctccttttttcttgaatctctattcaaaataaaaatagaagaaagcttaaatgtgtttcacaataactttgggttaagcacttttgtgatsaatatactttgctttctgcttttcagatgttcctcctgctgatcaagagaagctttttatccagaagttacgtcagtgttgcgtcctctttgacttygtttctgatccactaagtgacctaaagtggaaggaagtaaaacgagctgctttaagtgaaatggtagaatatatcacccataatcggaatgtgatcacagagcctatttacccagaagtagtccatatggtaagtgattacagtttaaccagtgtgtcccagttctgatttataaacaggacaggccaagatctctgagcctaacacagtgctacccaggagaagaatcctcctgttccagaatttgtagttgtgcttgaagaatgaaaattttctttgtatcctggattgtaatgataataataggaagggaagtcagttgtcttctagggaccagtctaagtgctttgcatttattaactcatttaatcctcacaactaccctatggagtagaagtgttagaatttgtatttctatttattattttatcttctttaaatttttttaaaacatatttaacattaatatactagtgcctttttatagttcagaagtaaacattttgtccatccatgtgcaggaaaattctaatgatgggatggagttgaaatattgacagaaccaagctggtgtcagaatagwtcatgctgattggctgagaaggcctccacctgtcagtgctgggatcaggacagcccatgctgattggctgagaaggccgccacctgtcagtgctaggatcaggacagcccatgctgattggctgagaaggccttcctctgtcagtgcttcctctgtcattcctctatcaatgacagtatgtcctgactggctgaaatagtcttatcatcctgcagttagttcactgttggttttattcagcccccagatctcagtcctctgaagtgtcaaactttacagcccattcctcagtcagtaccacctggaaacacttcattcagtgccattaccaaaattcattgtttgacgctgaaatccagttttctgttgatttttcttgaattgttgatattttatctgcctttgaaactagtaccccccacacacacacttactggggagtcagtgtggcttagtgtaaaatgttaagtccaattttcattgaactctttgttaagttactgatttttttttccaaagctatatatttcagaattgactggacttcttgacctaaaatacttttatttccttctttagtatgtttgctttggaaaaagatgaaagtaatgttcttcgttgtagttcagtctactgtgtcagaggttgagatcaacttgattgttttaacttgttgtttttaactcttaaagttcagaattcactggcatggctaccatgtagtcggcctaaggactacaaaggccatgcgggttcctgtcccagacttgtgcctgaagaagagtaataggcataaactgagcagagaatatataccctraaaccttacctgttcagactaatgacacttggggaatagcttttttctttcattaattttaactctcaattactttggaggcccactctagccccagaatcataaaaatctctaatattttctcctattactttcataattttgttttgcgcatcacattttataatcttttttcttttaggtatggatatgtaatagttgtacatatttatggagtatatgtgatatttaggtagaagcatagaatccgtaatgatcaaatcagggtaattggggtttccatcacctcaagcgtttatcatttctttgtgttaggagcattccagtttttttgtttgtttgttttttgttttttgtttttttttatgatgtgggttagggatagaacttcattttcttttaaatttattttcttctaaaattattgaaaaattatttctccctacatcatgtattgactatttcatttccccctattgcttaatgcttccttattatgtgttcattttattttactgtatgttagatttataagtatataaattctatattaagtttacacgtgtggaagattttcctatgtttaagaaagtctctgattcccactctttaacctaagagggaagaatctacaaagaatgacaagactcccgctggcctggttcaggtcaaatgcccrcccttgaaccgagtgtgctcccgactgcttgaaaccgcctctcgtttgtatttcacagtagcagtgtgggttactggcaccacttaggatacttaaaagcccttgaggctgtttttatagattaagtcatcattgcctctcctctccctgtcataattgtttcctaacttgattctcctcctgctgtattaacttgtttcccacccaaacctcgcgctgggctccagagcgttgccagcccctgggctccctaagcagtaagcagacactgagcatccatcatgggccaggcacgttttggggtgaggaaatagaatggcgaacaagacttctgccctcctaaagctttcattttcacctaaagctttcattttcacgtgggagacaaccataaaataagccaaccaataattttcattttagattacggtgatgccgtgaataaaagtaatccagatgaaatagatagggttgcaagactgggaatgtgatttctgccttatgcccacgtgggcgggaagaaggcgcagagtggaaactgggtgatgaattagactgtccygtgaagatgggcacacatgagatgctgtctgtggtcactgtgagagcaggggacattttctttcctttctgctctaagttcagaaggcaacatagcctttccctaccccttgtttgtctggatctggaggtagaataggggatggggacagattggatttttggttttgttgttttgttctgtagctagagggcattgatgagaagtatagtgaaagaaggaagaacacaggcggtggggtggtgcctggccttggtttgtgaccctcttgtcaagaatttragcaaccagtacaaggcctctgtcccaagcagtgcctgggcctggtgtggcaggcagcaaaagcctgggcctstttgtggttcacgtctgatgagaagctctgcagcttagagcccctgtgtgcccaacacttaagcagcctttagccatgcctgtttttctctttgtttcttattggggatggggktgtgtatattttggtcataacagttttagagacattaatttccacttttttttttttttgaagaatccaaagctttatagttgttgtactcctgatgctgctacttttaagtatcctgcttattagactggactgctagatggttttttttaaacagatctactgaggtattattcacatagcctagaattcacccatttaaagtgtatgagtcagtgatttttaatatgaatatagaattgtacagccagtatcacatctggttttagaacagtttcatcccctcaaaaagaaatcctgtactcattaatagtcactgccattgttccctcctccctcacccacccccagccctgagcaaccactgattgactgttcatctctatggatttgcctgttgtggacatttcatgtaagtggaattacagaatatgtaccctttggtgtccgccttccttcacttagcataatgttctcaaggttcatccacgtgccagtacctcatgcctttttattgccccataatattccatcatacagatatactacgttttatttatccacgtatctgttgatggacactatrttatgtccatttgggggctgttatgaatgactgttgtgaacattgatacgcaagcttttgtatgaacgtgtgttttcgtatctcttgggcatatacctaggagtagagtcgctgggtcatatggtaactttaacattttgaagaactaccagaccgttttcacagtggctgcaccattttacgtttgtatcagcagtgtacgggagttccagtttctccatatcctcaacacttgttatgatctgttttattacagccgtcctagtgggtgtgaagtgtacctcattgtggttttgatgtgcatttctcgacaaccagttgtgttgagcatctccttgtgtgttgtgtatttttatacatcatagacttcagacctagaaattaatggaaacgtcctgatcatctagcttgacccttttcttttccagataaaaaggcttattgggttcagagagatgcgggtggtgaggagcaattcccaggggagccagttcttggcgtgcagtttcccaggcctaagttataccagctccatcattaatttcagccgtatttaaatataatcagcctcctgttttttcaattaaattatctagttaatctgtttctcgggcacagaccttcttctgatagtcacaataccagtagcaaaactaattgtagcttttaaaaaactcaatgtagtaaaagtaaagctgctttgttaacagtaactaaagagttaaggttaggggttgcaccctttcaaaatctgaaactttgacatatctagcagtttttacatggtttcagagggttcaagcctcttagagcctacagtagaccccaaattaggaaacgtagagtctcttctaaatcgggattctcatccaaatcaggggatcacagatacctggtctccttgagagcctttcggagggcctgtgatgttagaactatttccatcatactgctaagactttaattgactttttcactgtattgaaatttgtaccgatggtgcagaagcagtagtgggtacaacatygcgcaccttagcaagaagcacagtgatggcaccaagctgacaaccacacaccccagtagaaatagaaacagccagtttcacttagtggtctaaatgaagcaatagaatagattaattgtattatttcatgacccttgtgcacacatggtcttaggactctatgatgaaatgtgaaggtttcataaagctcttctgctgccggcgccagtcaggagggagagcgcttgtgggatggagctgccagccaaacatgccactgttttcatggaacaccatttttacctgaaaactgacagacaaaccagttattcggactttgaatatttggcaggcatcttctgaaaaaataagcaaaatgagaaagtcactttaaggaaaataactgacagagtttgttgtcagtgataaaatgtgagctttctagggaagttttgtttcattttgtttttagagatgcsgtcttgctctgttgcccaggcggagtgcagtggcacagtcatagcccactgcagcctcgaacttctgggcttgagtgatcctcccacctcagcctcctgagtagctgggaccacaggcttgcaccaccatacccagctgattttttaaatttttttgtagacacggggtctccactctattggccaggctggtctcgaactcctgtgctcaagcaatccacacgcctcagcctcccaaagtgctgggattataggcatgaactatcgcacccagccagaaattttcagttttggaaaatttgtatgcaccagggtgagcttcagcctcccaatgctgcagacactcctgctgagctcagtggtgatgggaatgagtgggatttttaatagatatgatgaagtgagtcaccacttggaagagccacctaactcaatgaacaagtattttccaaatgaccggtaaaggttacagagtcatttgtggcaagagagccattcagagtgcgcgatccagcactggatttgaatgtgagagtatagacccctcactgataaggtttcagcacccatgcaggagctcacccctaataaactactactggttgagttttgatgtagacaatgacctaaaaacactattagatagatactcctcccttgtcaactacrttgtctgtgtgagaccagactttcatcctatatttcaacctaaacattctgaacacagaagcagatatgataatctagcatttttctattaaaacagacattaaagaaatttacagaaatgtaaaacagtgccactttgctcacttaatttgttctggaaaatatagttattcataaatacatgtcatttacactaagacatgatggattttttttttttttttttttttagatgaggtcttgctctgttgcccagactagagtgcggtggcatggtcattastcactgcagactcaaactcctgggctcaagcaatcctccccctccccctgcctcagcctcacaagtagctgagtctacactgcaagtgtgygccaccacaactggctaatttttttttaaagagatggagtctgggccaggtgcagtggctcatgcctgtaatcccaacactttgggaggccaaggcgggcggatcacctgaggtcaggagttcaagaccagcctggccaacatggtgaaaccctgtctctactaaaaatacaaaaattagctgggtttggtggcacactcttgtaatcccagctacttgggggtctgaggcaggagaatcgcttgaacttggaaggcagaggttgtagcgagccgagattgagccactgcactccatcctgggcaacagagtgagactgcttctcaaaaaaaaaagacatggagtctggctatgtttcctgagttggtcttgaactcctggcctctagtaataatcctgccccagcctcccaagttgggattttttttttaatttctstggtttaatttataatatggccaatatcaatagatatagttcttataaacaaaagttctttaggatttgcaaccgttytgaggagtttagtaggggcctaagaccaaaaagtttcagagctacttttctaaaacagtgccactcaaaggctgcagcttcaacagcctttaggcttgttagaaatgcagattcttggccaggtacggtggctcacacctgtaatcccagcactttgggaggccaaggctggcggatcatgtgaggttgggagttctaaaccagcctggccaacatggtgaaaccccacctctactaaaaatacaaaaaattagctgggcgtggtggcaggcgcctgtaatcccagctacttggaagactgaggcagaagaatcacttgaacccgggagtgggaggttgcagtgagccaagatcgcaccactgcactccagcctgcgcaccacagaataagactctgtctcaaaaaaaaagaaatgcrgattctttgggtcccaccctagacctgtggactctctgggggtgtgttgcagtgctgtgtgttttcagtgctctccaggtcatcctcaggcaagccaaaacttcaataactgttttgaataatcgtcctgcattgtcccatctttggatcgtcagttcccccagagaacaacttgttatactcttgcatttcttccactgaattcagcacactgccttttatagactcaataaatattcattcaatatgaggttttctgcatagacttgggcattaagactcgtcttaacagtcacagatgaaaataacctgaagatcagaaaaggaattgcttggattggtgattgaatgagtcggatgactcagaagtacttcgcattagagtggacctctccagaaatatccaaatctattgtgctggaccactgagaacgcaacctggtgtactcaatcatgcaagaaatgtgtattgcagacaccatgctacctcttggggctaccccaagractaaaataatatagtctctacctatatggcatccacccttactggtctgggagacaagaagaggcagcagacgtaatgatacgagggccaaggactgcggtggcggtcagtgtaaggtctggtaagagcacaggcataggaggcctaaccccttgcctgggcgccccagagaagtggcctctctacaccagcggccagtgcttcaggactagctggctcagtgaaagcaatatagaggagggaaggggaggggagtgttcccagcagaaggaacagctcctctaaagcccaaagactagagaaagtaagatgtgtttgggtttgagccaagcctggagctcccgattgggtgggctagagtctggatcctggggagcttgatggaacccgaggacctgaggttgggtgggagagctgggaccaccccgtttgctccggctgcagtgtgaagaataggtgggaatgggtgtcagaatgacgcatgaagggaccagctcaacatctgctgcggcatttcaggagagaagtggtggaatgagccaagcggctttgatggcagagagaaatgggcaaatgcagagatgttaagaaggtagaaacacgattcggggtggatttgtttgagattcctggggagaggaaccaacgcgcaggtttctgacttgagcaagtggaatgctggttcaggggaaagagcatgggccctggtgtaggaaaggcctgaggtgggtctcatctgctaacattatttagagctctttgggttaacgggggcaggcacccaattcactgttgtttacactcacaagggagtttaccaggcagacactgggtctctcacacttrgtccacagagtcacagggacagcttttccttccgtgtcccatgtccccgctctctgtatgcagccttccttctttggggcatccctctatgatgacagaggaaagcatggcccttgctggcttgccagaagaggcctgatgtctcctgtctcctacctgcccttgatcccgttgccgtaactagggagatggggtactgtggttgtgactcagactgggtcatgtgcccaccaaaccatgcgatagagtcaaggagcaagaattccccagaagggagggagtcgtgtgcttctctgggcagatgaaacggtcggatctgtacccaactttaatctgctaactgtgctactttgggtgaacggcttggttctgcaagcttggttctgtctgctgcagacaaatagctgtaatgcttctgcctcacagagcagctaggatgaaaggggaacacatggaaagcttgggcagyccccgtgacaaagttgtcagtgtcctcggaagtggccagaaagagacaagcctccaagatttctcagaatgcttaccagggggacgcctcaatgcagccttctttcttcatattcgtacgggacttatttctaattctcgctccagactctgatatcttgaggttacttaacttttttttgagacagagtctttctctgtcgccaggctggagtgcagtggcgtaatctcggctcactgcaacctcccaggttcaagtaattctcctgcctcagcctcccaagtagctgggattacaggcatgcgccaccacacccagctaatttttgtatttttaatagagacagggtttcaccatgttggccaggatgatctcaaactcctgatctcaggtgatctgcccacctcagcctcccagagtactgggattactggcgtgagccagcgcccagcctctattttcttatttagaaagttatcatgctgtggaactacttcatagagagttagttagattagtttaaatggtgattggaagattaaaaatacatggtctgaagtatgatttcatgtttgtaacatataaataaattcatgaaaataaaatcaaacttagggagagaaagtaacttgtgaaatactctacagagtacggtgacccagccctgtggcaccatccacaccacagattgatttggttccattttatcgatagatttttaaaataaagctgaaggcctcgccaacatggtgaaaccccatctctactaaaaatacaaaaattagctgggcatggtgttgcacacctgtaatcccagctacttgggaggctgaggcaggagaatcgcttaaaccctggaggcggaggttgcagtgagccaagatcacgctactgtgctccaacctgacggacagagcaagactccgtctcaaaaaaataaataaataaataaaaaagctgaaggaatatagtacaaactgttaatagtaggtgtctttgggtggtatcattaatttttcccttttactatacacttttgtaatttttaaaaaaattcagaatgggccaggcacagtggctcatgcctataatccaactttgggaggccagggcaggaggatcacttgagatcaggagttggagaccagcctgggcaacgtagcaagaccttgtgtctacaaaaaaaatttttttaggccgggcacggtggctcacacctgtaatcccagcactttgggaggctgaagcggacagatcacctgaagttaggagttcaagagcagcctggccaacgtggtggaaccctgtctctactaaaattacaaaaattagccaggcgtggtggcgcatgcctgtaatctcagctactcgggaggctgaggcaagagaattgcttgaacccaggaggcagaggttgcagtaagctgagatcatgcaactgtactccagcctgggcgacagagcgagactctgtcaaaaaaaaaaaagcaagaagaaagagaaagttttttaatagctgggtgtggtggcgcacgcctgcacctatatgcctagctactcggtcggggctgaggtgggaggcttgtttgagctcaggagcttaaggctgcaatgaggtatgattgtgccactgcactcctacctgggcaacagagcaagactctgcctcaaaaaaaaaaattaataattatgtaccacatttgtcatcatcaaaaaccagtaaagatatttttctttcttaaaaataaaaacaagcggccaggcgcggtagctcatgcctgtaatcccagcactttgggaagccgaggcaggtggatcacctgaggtcaggagctcgagaccagcctgaccagtatggtgtaacctcatctctactaaaaatatgaaaattagccaggcatggtggcgggcacctgtagtcccagctactcgggaggctgaggcagaaggattgctggaaccctggaggtggaggttgcagtgagccaagattgcaccactgcactccagcctgggcgacagagcaagattccatcaaaaaaattaattaattaattaaaaagataaaataaaaacaagctatccgtatgtaatatagtactgtttttatcaggactcttgttggtttccagggaaaactagttgatcacattattttaatccgcactgtctgtaagtgatttgatgttgacttacacgttttatgggcatgagagtgttcttaggatctgttggccgggtcctgggggaggtctcacaccctgcacccccagatgggtgtcctgtgcttcacttagggactgatgtggggcacgttccttcttctatttttatagctgatatttacagtgtgttctggaaagttttacttgctataagggtgatgatagtttgggagaggaaagaatgtgttgaattaagagggatagtacattgaccaatggagttgcagtcaaatttatttcaagtgaggatttaaatcatgcattcccaagtactttttgaaatccagagaatgatttttctactttaaatatcagtaagctgttttttagaggtttgtttgttcttacgattttgagattttcctttgatgtttttaaattataaaagaaatacatgcttatgtgataacaaatgaaacaaatacgaaagcattttaaaaagttaatctttttcctacttcacccctccccagttctacccatctctacctccaatcagccaattcatgtttattgtattttcagaaggctgctgagaaacttttgggatgatgagtatgttcattatctgattatatgattgtttcacagatatatgcatatgttaaatatcaaattttacactttaaatatgtacatttaattgtatataaattatatctcagtaaagctgggtgttttcagatgtccaaacttgttaggtatttcttttggtctaggggtgcagtgaagaaattactaagacaccaagggcattgtgaaccaagaagttttgggaacttatgacctagtgaatatctttccataactttttttaaattaattttttatttacatatagtgaaattcactctttcttgtggccagttctcggaactttgataaatgtgtatagtcacgtcttccgcaccacagtcaggatatagaacagtttcttttggttttgtttgtttgtttgtttgtttgtttttgagacrgagtctctgttgcctggctggagtgcagtggcaccatatcagctcactgcaacctccgcctcctgtgttcaagtgattcttctgcctcagcctcccgagtagaagaacagtttcttcagcctccagaaacatggctttatgctcactttgtagtcagagccttccccttcctttctctctgcccctcactagtctgttctctatcacatcattttgtcttttccagaatggaaactccatagaaatggattcagtgtatagcctttgggtctagcttctttcgcttagcttgatgcattggacattcgtccatgttgtcacacagtttgttccttttccttctcagtgttgtctcattatataaaagtaacaccatttgcttatccatttcctatggagggatatttgaggtgtttccagttttatttggagcaataaaacttttataaatacttacataccgattttagacataagcttttatttaacttgggtaaacacatagggatgcaatcgctaggtgaatggtaagtgtgtgttgagctttctaaggaactgccaaaccgttttccaaagtggctgccccgtgtgattcccccaacagtgcgtgagttctcatgcctcccgtatctttgtcaatatttggtgtcatcagtccttttatctcattttgattttaatttgcatttccttaatgactaattatgccagccttgtttgtttgttttttggagacagggtctcgctctgccagccaggctggagtgcagtggctcaatcatggctcactgcagcctccacctcccaggctcaggtgatcctctcacctcagcctcctgagtagctgggactgcaagcgcccatcacacccacctcatttttgtatttttagtagagacaaggtctcactgtgttgcccaagctggtctcraactcctgagctcaagtgatccccctgcctcagcctatgaaggtgctgggattccaggcgtgagccaccacacctggcccaagcattttttccctgcgctttttgtcgtttgtatatcttcattggtgaattgtctgttccaattgtttgcctgtttttcaattgggcttttttttttttttttttttttgagttttgagttttgagacttctttacatatctgggtacagattttttgcgagatacatgatttgcaaatattttctctcagtctgtagcttgtctttttttttgttcttaagtgtcttgtacagagcaaaaatgtttaattgagataaagtccaacttaggatttgtcctttatcagtagtgcttttggtagcatatctaagaagtctgccaaacctaagctcacaragatttttctcctatattttcttcatcgtttcacattttacatgtaggtctgtgatccattttgtctgcagttcgttctttggcgtatggatttccaattgttctgtttgttgaaaagactgatgaatatccattgaactgcttttgttcctttgtcaaaaatcagttgagcatgttgtgagtcttcttctggactctgtcctgtcgcgtgtttgtgtatctctgtttgccagtctcacactgtcttcagtacagtacttgatagtaaattttgagatcaggttgtgtgactgctataacctctttcttctttttgaaaattgttttgactattctagttattttacctttccatataaattttaaaatcagcttgttatctacaaaatattctccaggggtttactgcatgcagtgaacatgtagacttggagaccattgacctcttaacagtgtgagctttgcagccyatgtacacagcatgtctccccattttggtcttcttgttttgtagttgtcagcaaacagatgctataaatatcttcttagactcgtaaattagtattttggtttttggttgtcattgtaaatagatctgtttatttcccatttgtaattgtttattgtcttgttgtaattatatcaggttttgcttcatgttatatatattcatataaatattcagtgtatatcccctcttggtgaattaactcttttaccatgatagatatgactgtattgctggtaatattatttgctctgaaatccactccgtctcaccttaatatagccattccagcgctcttctgactagtgttggcatggtatgtctttttcttcccttttacttttgatcagttcgtatctttatacgtaaagtgggtgtatggtagatagcgtattgttgagtcttggtttttttttgttttggtttkgttkttgttgttgttgttgttgttgttttgagacagagtctcgctctgtcacccaggctggagtgcartggcacaatctctgctcactgcaagctccgcctcccgggttcatgccattctcctgcctcagcctcccccaagtagctgggactacaggcgcccaccaccacacccggctaattttgtatttttagcagagacggggtttctcaccatgttagccaggatggtctcgatctcctgatctcgtgatctgccctcctcggcctcccaaagtgctgggattacaggcgtgaaccactgtgcccggctgagtcttgcttttttattcagtcagacaatccctgtctttcagggtgttgaaaccatttatttttcatgtgattatgaatgtacttgggtttaaatgtaccaccttcctattttttttctatttgtcccacctgtttatcgtttcycttctttgtctgcattcttttggatcaattgagtactttttatgattcccttctatctcatttgttggcttctttatgataactccrtattgtttgattttaattgttagtcttttctagaacacacctttaacttatcacaatctaccttcaagcgataacatactatttcatatagaatataagacatttacaacagtatacttctatttctcctctcccagcctttccgctattatcatacataaacccstcaatatcttattatttttgttttaaagaaatttaagtgatttttaaaaatctttttttattatactttaagttttcgggtattaaaaatcttttatatttacccagatagttacaattttcagtgttcatcattcctttgtgtagattcagatacccatctgatatcaattaccttctgcttgaaggactgtcttaatatttcttatagcacaggtctactgatgatgaattcttttagctttcgtgtatctgcaaaagcctttcttttcttttgccttttttttttttttttttttttttgagacagggtcttgctctgttacccaggccagtgtatagtggtgcaatcacggctcactgcagctttgacttccaggctcaatcagtcctcccacctcacaccccaaccccaactctgccccagtagctgggatgacaggcacatgccaccatgtccagctaatttttttactttttgtggagacagggtctcactaggttgcctaagctggtctcaaactcctgggctcaagcagtcctttcatcttggcctcccaaagtactgagagtacaggggtgagcctggtcttgccttcagttttgaaagatctgcttgctggtatagaattccgtgtcgaccgttttatccttgaaaaacttttgctcgcctgttgtcttgcttgcattatttctgatgagatgtctcctgccattcttttctttgttcctttggacataatgtaccctttccccctctgggagctttcacagttgtctctttttaagtcatttgattatgatgggccttggcatggtttccttcattttgcctgtgtttagagtttgtttataattttcatcagtttgagaaattgtctcttcaaatatttttttctgtcccatgaccctttctctcctttagggatcccaataacgtgtattaggcttcttagagttgatgctgatgctctatttctcttaattcttttttttttttctgtgtaacatttggatagtttcctttgctttcttsaacttctttaatcttttctgccatgtctattctgttaatttttattacagtaaatttttcatttcacacattttttttaattaagtgagcaaatttacttaagcaattagagatctgtgggtacatattgttgttgtcatctctagtggtttgatttgtgtctttttaaaatatctttcacgtccacctaactttttggacacaatactgtattcatgtccttgtctgcyaattctaacatttgtgtcakttcagtttagttcagttgactggtttttcttctcattataaatccttctcctgcttctttgcgtgtctggtaatttttaattggatgtctgacattgtgaattttgctttgttgagtgctatatctctattcatgttcttgagatttgtttggggatgcaattaagttacttggaaatagtttgatcctttcagttcttgctttttcagatgttttaggcaggaacagttatattaaaaccagagctaattattctccaccactgagacctttctgattaggaagccagtgccctatggattatgaatttttcccatctggttggtgggaacagacactgttcccagccccgaacaagtactgggttctcactaatcctttcaggtggttcttttcccaacctctggtagttttctcacacaaatatgctgatctgtactctgctgaatagttgagtgacctctacaaataaatcactgtagttcttctctgtgtgcagctgtctcccctgtggaactctgccttgcaaattctaatccagtttgaatcctgggtcccacctgggttctttctgcctatactacaacctaaaaatctatcaaggcaggagcctggggcggtgtgggacgtgcctcacttgttcccatctcagggatcactgtccttatccttcgttgtctgaaatccagtgtcttgaaaaccgtaattttatatatttttgcccaaatatttggttgtttcaggcagtagcataaacctcatccttgttactccatctcatctggaagcataagtctgcttcatttataatagatactcaataaacacttaactccgtccacccaggggatctagcaattattataaaaatgaaagactgtttgcataatttataatgccataatttcatacgtcatttggggttaggggaaatggctgtgcatacatgactgggaagtgataaggagtttagctctgaaacttcccttctcagttgatttatatcacgttggatagagagtatgttgttctgctatgctaaagcattactaaactttctcataccttactgcaaaaagaaatcagaatacatgataaagcaaatatattagaatgctaatggtaaaatctagatgatagctgttcgctataaaattctttcaactttattgcattgaaatttttcgtaataaaaacattgggaatacatcattcagaatctatacgaaactaatctttggcccagagtaaataacttaagagcacttccaaatccagtgttatctttaaatgacactagttgaattgaattataagtattatgaattatttcttatgtataaatattctaaactcaaaaaatataaactcatgcacataactgtaaatgatttattttcatgcttatctgaagatgatcttgttatgaaactgtagaaaattaaaatattcattgtttgaaaagtttagactaaatttcctttattaagtattctacaaaggtttgtaagttgtttgttttttttttaatttgagacagagtcttgctctgtcgcccaggctggagtgcagtggcacgatctcagctcactgcaacctccacctcccaagttcaagcgattctcctgccccagcctccagagtagctgggattacaggcctgtgccaccatacttggctaatttttgtatttttagtagagacagggttttgccatgttgrccaggctggtcttgagctcctaacctcaggtgacctgcccgcctcagcctcccaaagtgctgggattacaggggtgagccaccgcgcctagcccgtaagtttttatttccatatctttaactgctatttaggaacatatttgaatagattgtaaaaatagcaagttattcaaagtaagaattttcaatgttgtggttcttttcttgactgtcacatcatggcatctatttggaggtgaaatcgattctttgaaagcagctcttgctgtggaggaagcgcgaggtagatttgtgggaagaaggctctgctctcccttacctctcttcactgccgagcactcattgtgtgccagggccagcaggaagayattaaaccaaggacttcccggccacccagtcatacttgagataaatattccaaagaaaatgtacagcatcatagaagagcttaaaattaggggcccaattaggactgtaattattttgcagctgagacgtaaaggtttaatgagacatttttcacagtttccaggtaattaattggtgttgcagttaataaggtgactgatgcgtgcttttcccaggatccatttactctcagcaagtgtttgaggacctcctaggtgccaggcacagtggtaggtgctgggattgctgtgcatttatgttctctagatgatagctgagttctggtgccatgaaagcagattcaaactcactttacaaatggggaaaggggtagtatctccctttaagactgctactacgatttttactattctacctaaattttaggttaagttcattgagttcatcaaaaattcagtttaagattgtgtctgctttatacattgctctgcgaagttccatctttgtaatatgatctcattccacatcaaaggttcctccgttttttcgggcattcttcagtgccttttattagagttttctgctttctccatcaaggccttgtaactaggtcagtaattcccaggcactttgtagtttttgtgtctgggtagctggagtcttcgtctctgtttcttktttgtatttgcttaattgttagtggaaaggtggttgctgttggtttcatatttttgatatttgcatgtggtagtctagttgtgatggtctgtctgttgcttctgttttccagctatatcatttgcaaacaaatgacaattttgtacttaaatatatatatattgcraaggggcttaacactttctgcccttcccagaaatgtatctcttagcaatatgactcgtagaacctaacagttccatcacaggaggaagtgttctgcagtaactgtaatttggcctttgatggattcatctgttataaatcctgttgacatgaataaaacagagaataaataacagaataacccttgtggttttgaacagagaactgtaaataatcaaacctttctttcctgttgcctctaaagttagactrtcagcggtttttttttttaatgtatcccttcatgtcttaaaatttttatatgttacactgctgcagttatgttacggcataaatattcactcattggtaatgaatgataacacatacagaaaggctgcatgatattgctgaattgtaagaattttccgtaaagttgcttcttgggccattctagtttacatctaatttaataaatttagcaatttggagaacatctgcaggactgatgtaagtactgaaagtggaagtgtcagggaggcagcagaagcaggtgcttcctgatattaaccagagacggtcctggcacagatggggccgtgtgaatcacatgcagacatacgtatgcastcacgtgcgtgccattattttcatgtggaggtcaaacagtcagaaacgtttgggaagtgctgtgtaatgytaactgttcgtgcataatgttttcccatttagtaagtgctgttgcatgygttttctgtgattctcaccacagcccaatgcaaaaaataaaaaaaggatttacgcttttttttttttttttttttttttttgagatggagtctcactctrttgcccaggctggagtgcagtggtgcaatctcggttcactgcaacttccacctcccagattcaagtgattctcctgcctcagcctcccgagtagctgggattacaggcacccaccaccacacccagctaagttttgtatttttagtggagatggggtttcaccatgttggctaggctgctcttgaactcttgacctcaagtgatccacccgcctcggcctcccaaagtgctgggattacaggcatgagtcaccgcgcctggcctttaccctttccaatggaggagaaaattgagrctcaggcaggctgtttggtctgaggtccttcttctaggtgggaagagggtgtagagagactgtttccatgaggctgtgctgcctttgttgggcagcgtgattctgcgtctgtgcctctgggtgtgcgctggatccgtaggtctcatttgagagatcacagtgaccctgtgtgctgcccagaagacccgggactccttagacctcagagcttctttggtgttcactgcataacgttgatgtcttctctgtttcctcagaccggatccatgcatccaggtagcatggcagtgacatttgcacacagacatcagcaccccaggtttctgtacctggggctcctgcccctgattcgcccctgcagcttttgtgttaagaaatgttgctaggtcagaaacccaagaagaatttgaggtgatagaccgttggccctctgttccttccccccgccccagtattactttttacttaaccttttctagagatatgcactaaattaatgcaatgtaatgtggtaagaaaggtgtgtagaagttaggagtgcaagtttttttccttacacatgagaaatgactttcaatcaatcagaattggcctggaatgaaccttcccggacctaggtcggtcatcagtcaaggaygctgtatcagtctgctcaggctgccgtaagaaaataccacaggctggtggcttaaaccacagaaatgtgtcttctctccattctagaggctggaaagtctaaactcaagggtgtagcagggtttgttccctgctgagggccttttctggcttgcagacggccactgtgccctcccatggcctttgctccgagcaagtgcagagaaggcgagtgtgagccttctaccatccctccttacaaagacactaatcctggagggccaaggccccacttatgacttcattcacccttcattattttctctgaggacccatctccaaatccagccacaccagggtttaggtctttaacatgaatgtgaggaagggaggccacaagcattgagtccatgacagacactgaaaagaggacattgtgttcagagcaagccatctgagtcaccttgcaggccctcagctcagcatcaaggattcagtgagtgtgcaggtgtttgagacggggcctagctgctgggctgactgtcactgtgcgggagagcttcaactggaaaccctaatcactagctttcctgctagtagaaaccaccagtttacttaggaatctcagctgactgggtgcctcagtcagggctgtgcagagaaacagcaggagagacagagattgagatctcaaggacttgccttctgcagtgggtgagtccagcgggcaggtctggactccgtggacaggcagcgggcacgagacttggccgtggtggacactgcaggccgcaggtggactctcctcagagaagctgcagtttgggtctcacaggcctctcagctgactggttgaagcccccacattctcaagagtgatcgctacttgaagtccattgattataggtgttaaccacatctataaaatgccttcacaggaacacccacagcagtgtttggacagctgggcactgtggcctagccgggttgacacatacggccagctggcacagtcggggacattttactttttttcagttatcgcctttaaccacgatgggtgaaatcacactttcctgtgcctaaataacatcttaggcaagttggttaacttcttagtcatccctggtcacagaaatccaatctaggttaaagctttcatctcagaccctctgcaaatggcatctaagccgcaccccaggcagcctggccagggagggacatgctgtgggagaggaggggaagcaagggtggctccgagcccctcttgcccgccctcccccggggctttgagcagaacccagagcagaggggaagggcagctgcctgttctgctcagttgctccctgtggcctcggccagaatggtggtctcttcctctgtggcatgtctgtgactcttgggcagcaggcctcttccagagggacggctgtttcctctcccccaagacctacagcctcrtctctgggtgagctgacccctctctcccttggcagcttcctgggcggcgtggccctacrgctcctgctctggcctctgtatccctgatgggcagccccagaaacctcggaagcagtgaccgtgctttccttccaggcgccatggttcctcaggccctgatgtcacaggctgttcccagagtctcctgccaggcatagtcctgttcacagattcctctgccacccagagttcgtgcccaggctctgccctccccacactgtgctctgcccctgtcggcaccaggccgggcccacagctctaacccaccgaagaacaaagtgccatctccctttcctgaaggtgaccctgtcctgtgggtgactggaccctcaccccagtctcttggctttgagagagagggtagaaaccccagttcacgaatgccacactccccgtaggagctaaagactcaattcagactttcctttctctgcccttcatggccctrgaagttatggagagcttcagcagtggctgctaatgacaggaccctgggaggacatggcggcctgcccaaagtgtgtgtgtgtgtggcctttccttaatagttgagcttttagcatctgcttgttcacgtctgtgggctttggggtcagggtgccaggaggggcagactagacccctgtctgcgccgagtgcctgtgggccagcaactgaggcagggccgtccacctgtcaatcaccgttctttgggaggctccttgcagtgccctatacacacactagcttcacagaggaggggacagtccctggagagtagacattgccagaaattataacaccagtgagagtcaggttaactctcggttttagattgcaaactttygtctttgtacctatgtcttaggaacattactcatacttttactagaagtgttttttaattagttgttcctggcttttcagcccsttttttcatccctgcgtttctacagtatccgtgaaggccattacagttggtctttacgtcagctcccctctcagatgacacagagaacaagctcagatgcttgatrctcagatgcttgatgctcagagcttttatagctgatgactttctgaaaaatgatattaaggtttggagttcagtatcaataccagtaaagaagggaagaaacaggcaggtgcggtggctcacgcctctaattccagtactttgggaggccgaggcaggaggattgcttaagcccaggagtttgagaccagcatgggcaacgtagcgagttcttgtctctgcaaaaaataaataaaattagcagagcatggtggtgcgtgctggtagtcccagctacttgggaggctggggcaggaggatcgtgtgaacccaggagttggaggctgcagtgagcgatgatggccactgtactccagcctgggcagcagagagatgccctgtctttaagaggaaaaaagaaaagggaagaaacagcagtggtgacattgagtattagcttggtctttacaagactgggtatctaaagccagccaagtttgccctggactctctagaaacatcttctcgttgttatcgtagagtcagattttaatcttttatgtcaaaggttttgattttgtgcttctgagagtggtgggactggggttgtgatcacctataagagccattcaccagaacccagttatataactggcatacgatccgttcagagattcaataaggtaaccaatcatatttagacttagtataaaagagggttgggcatggtgactcacgcctgtaatcccrgcactttgggaggctgaggggagcggatcacttgaggtcaggagtttgagactggcctggccaacatggtgaaaccrtggtgaaatcccatctctactaaaaatacaaaaattagccaggcatggtggtgcacgcctgtaattctagctactcgggaggctgaggcacaagaatcrcttgaacccgggaggcagaggttgtgatgagtcgagttcgcaccactacactccaacctgggccgcagagggagacgtcacctcaaaaataaataaataaatacatagatttagtacaaaataaaaataggttataaatgtatgacatggaaacagtaatcttttctgtttatgtcactgatctgtcagtatgtgttatacaagtccaaacagactgagagaaatctaacagcccatgcctgggcgcacagccatgctgcccctaccgatcctctgtgcccctgagcagtcctttctctggaaatgatcttagctgccgactcaaaggtcgtcccactctgactgttgctttcctcatcgttgcggattgcagaggatgtyggtgccattgtcacacgggtcctccctgcgtgacgcagcccttgccatttccagcattttcagctgtgaatctctgctgcgtctttcgtcatctcatccctttcttactctcattttgagcattctccttggtcttgcacccactggatagtataagacctcagaagtcatcactgtgccatcagcctttgttggtgttggttgtcattcaaagtttgacagtcaagagtccaartaactytggtggtcaacttgcgtgcgcacctgtccaaagtgatgtttcctgctgcagttttgatccaggctctctctgaggacccacacrgcttctgcgttttgaggatacggaggagctaagttaccatgggaagcggctactgttagaattacctaagactttataaaatgttgtctgtaaatattttaaatgccctgattgtaattatagaatatgtggattttagtttgcagttaacatgtttcgaacattaccaccttcctccaatcctacgggagcggaatttgacccggaggaagatgaaccaacgttagaagcagcctggcctcatctacaggtatcgggctctgggtgatagactcggagggcactggtgacacatgggaatggcctgggatccacagagcgggcgcactggtctggccagatggacctctcctcctcagtagcatgggcctcgtaaacccatatgtacaagaaaaatatttcagcagaataaagttaatgtgtgtgtttgaccactttacaacagccagtgaagatgtgtaattgtgagtatgttctcagtgaagatggcckctgtgttgatggccgttgaattgaattcaggcccagaggtcctaagccaacaatctcccagtttttgctcctcatatttaataggtgcctgctgggcccccaggtcctgcgctggccactgcctttccccagggcatttgtaaggcagaaggttggttggcaaggaggcgccagggtcggcatgagcagagcgggrgccaggtgtgcgggtgggagggccatccatccgtgacaggcggcccacgctgtcccacccagcatgtctgcacagggaaagaattgtcccagctccaggaggtcatgattctgggtccacatcttagggccctcttacctggcagccccagagttcctgtgtatttggttggctctgcgccttggcattgtgggacactcctaggcgacaggctgcaaatcccccctgcagagttgggtcatggcttggtttgtggcatctgtgccctgtagtccctgaacagtgtactataactgatgacatcagccatggagatcattttgtttaaatgccgtttaagggtgtagtctgtgggtttcaccaaataaaataattaccatcaccatttatcattgaattaagccatgtaatttagcattaattctgtagatatgtggctttgagaggctaatatttgcataccaataaagattcaatttctggtatattttaayckccattcaataaaatctcatgttatttgactcattgttttttttcctcctagcttgtttatgaatttttcttaagatttttagagtctccagatttccaacctaatatagcgaagaaatatattgatcagaagtttgtattgcaggtaaggtacaaattagctgacactctgaaagccctgatggaatgatgacacccagccactaagtgtctttttcttctcaaagcttttagagctctttgacagtgaagatcctcgggagagagattttcttaaaaccacccttcacagaatctatgggaaattcctaggcttgagagcttacatcagaaaacagataaataatatattttataggtaagtcncgtgtggatggcgttgtccttgtgtgtggtgatgctcatttcccccctcgatgctcccctaccccatcgtctcctctgacaggactcagcatrtggagggggtttctcaaagcctatttgtcatgtgcaggtggacccccttgtgcactgtgtgcagggggctgctgggctcatcctccctgccttcctcccctctccccacagctccctcctgagccaccaagctccccagcgcctcatcctgggtccctccattgttcctgtttctactgaaaggtcaagtttcctggaaatgtggatgaattggttccatccagaccaactgtattagtgaaggttctctagaaggacaggacgcataggatagatgaatatatgaaggggagtttattaggagagttgactcacacgatcacaaggtgaagacccacaataggctgtctgcaggccgagtcccaaaacctcaaaagtagggagacggacagtgcrgccttcagtctgtggcggaaagcccaggagcccctggcaaaccactggtgtaggtccaagagtccagaagctgaagaatttagagtccaatgttcaagggcaggaagcatccagcacaggagaaagatggaggccagaagactcagccagtctagsccttccacgktcctmtgcctgcttaattctggccgcaccggcagctgattagatggtgcccacccaggttaaggatgggtctgcgtctcccagtccactgactcaaatgttaatctcctttggcaacaccctcacagacatacccaggcacaatactttgcatccttcaatctagtcaagttgacactcagtattaaccttcacaccagctttttccttctacctgtgcatcacctcattcttcccgtggagtctcagtgagaggaggcggggcaagaagtgatgtcattcatctgtagaaagcctgagatctgtgcacctcggttaaaggtttggagactcccactgtgcaccaggggagggaaagccccgctggagcagccggtggaggaggacagagtccagtggcaggcccacctccaggcccgcccctccccagccagcctctgctcagctccaggctccttccacgccagggctctgtagccagtgttggagcctcctggaatgtcttttttacaccagcccttccctcagcctcccaggcttcctgaaacatcccttcactgggaggctctgcctgacttggcggtgggtctggtctcccgcaagggcagccaccatgtcagttgatttgtcgcacgccccaccccactgccagtttcgtgctccccactgcggtggcaccaagtgaatgtcaatagaggaaacagttcctgttgtttctttttgttcctggaaagttcactaaatgagcagtttcttctacaagttacagcttctctggtcagcttgcctctaaggcatctgactccaggatgttgcgaggtagtgacacatcctggtgatggtggggacggtatgatggcgtgtctctgtgagataagagcatgagcaggtcccacacagcctcgctgcagggccagggtgtggacagagcacgggccatggcctggagaaggggccaggtgtcagccacgcccaacacgggcctcggggtcctttcttagtcacagtgaccacgggaaaagaaaaggggcatctgagacagacagatggcagatgagacccccccwgccaaaacccacagccctggcccctcccatcccgtgccggcttgcacagcctgcgtcgggagcaccctgcctttccgtctgcagtcattagggcccgcagccccggcctctcccatcccgtgccrgcttgcacagcctgcrtcgggagcaccctgcctttccctctgcagtcattagggcccacagccccggcctctcccatcccgtgccggcttgcacagcctgcgtcrggagcaccctgcctttcccctctgcagtcataagggttgcattccctcctgacctgcacacctgatagggcatttcggcgtgagagcctttgattttgcgtgtggctttcctttgaactccttccaagtaccccacatctcgtttgtaaaatggagcccggtgctggacatagcccagacctgacacattaactataacagagaatgatgtcactttcctaaatgttatgtttctattttatgtttcttggtatcatgattcctttttaacaagatcattacttgcctggtatacttatctatgaaaacataatatacattatttaacatacaacaggtacaatttaaatttccagtcttcttgacctaaaattaaagctctacctaacatatttctgttttcttaattctagtaggttttgttcagatagcagaatcacaaatctattgaacatctgcatttaagaagtagaaaatgggccgggcgtggtggctcacgcctgtaatcccagcactttgggaggccgaggcgggcagatcacaaggtcaggagatcgagaccatactggctaacacggtgaaaccccatctctactaaaaatacaaaaaattagccgggcgtggtggcgggcacctgtagtcccagctactcgggaggctgaggcgggagaatggcgtgaacccgggaggcggagcttacagtgagccgagatcgtgccactgcactccagcctgggcgacagagcaagactccgtctcaaaaaaaaaaaaaaaaagtagtagaaagtgttttgtaccttaaagaaccttaggaaatacttaaatagattagtattccaaagttattacgcataatttacttgagttctcactaaaggcttggtgctagaatatggcatttgtgtctgtgtgcatgcttttgatagtcttttctgtaattrtgtgcatgcttttgatagtcttttctgtaattgtgtgcatgcttttgatagtcttttctgtaattgtgtgcatgcttttgatagtcttttctgtaattgtcctgatacgcgcagtcaaaagcaagcatgctatctagattccgtgattggtttgggtcctcattgtcaataccactacctcctcatttcatgtgaggaaaaaaaaagaagaaagatcttgagagttgcattcagctcatctaggtttttttcttttcttttcttttcttttctccttttttaaggcagggtctcactctgtcacccaggctggagtacagtgatgctgtactccatagctcactgcagcctcaaacccctgggcttaagggatccttctacctcagcttcccaagtagctgggtctacagatgtgtgccaccacatgcggctaacttttaaaatttttgtagagatggagatctgtctcactgtgttgcccaggctggtctcaaactcctggcctcaagtgatcctcctgcctcagcctcccaaagcactgggattacaggcgtgagccaccacacccagccagctcatctaagttcaatatagaacagctgtgtcttgtaagaaaaaacattttgaacatatttggctcaacttaactgaaaatgtaaatataaggttgctgtttatttctatggtttatcattaccgtcagcttaagtgtgagttaaacagtgctgtccataacccatggtgcctgctctggcacacagcgggacctggaggctgggcgggcagggcagtgtgccgttccttctcttgctgcataaccagccatgggtcatgctctatcctcaccctggccctgcagcaaggctgtgcagcacctgctcatgctcttatctcacagagagatgccatcaaactgtccccatcatcaccaggatgtgtcactacctcacaccatcctggagccaggagccaccgccagctcagtggcttcygtcagcatggtccatcactcctcacgatgctgtcgtctgcgctaggctcatccagacggttctgctccgtggcgtgtgctggggctggagtgttcacaggggctgctgagcaggtccccacgctgcctctgtgatgccttgagctcctccaggttgtctgagtttctacagccacggccacgtccaagaggggagaggcaggacccccagtcctcctaagagtttggcttggaactggtgcagagtgacttctgccctttgtgttggtcagagcagggcacaaggacagcccagcttcagaggaaggagaaatagagtccacctcttcccrtgaggccagaatacatcatacaggcaggaaaggcatttagaatcctttctggagacttctatagccagcaggttcccagcttagtgtctggggggtctgattccctttctgctgaaagagtgagaaacactctctccggctcccagggatctctgtttccctcccagggtgtccctgtttgtctcccgctggaaaaggaagaaggaaaagaactgtccttatttcttctttcttctgcctacatcaaagcaggtttaaaaaattagaaattaagaatttatcagtaagaatgtagtaatgttgatttaggaaaacaaaatggcttataactgcaagccatccttatgtaaatgttaaagctgatggatctagaccagaaggggtccaggggtctttgtctcggagaggcccagatcacagctctccaaggtccatgcgagaggaatagtaaactgaagccacacggctgccgtgtatgcaaagggagcctgcagggtgagtttcgtaaattaaagcacctctcggtgtagacacacacagactgacttctgcttggtcacagcttccaagcctcagggtaggtgcaggctgagggacaccaggtgcgagcattttctgtttcttgtcatggcaccagtgtcgttcctgtcacccacggcactgagctctgccctggtaacgtccctccctccctcttaggctttggccacctgcattgttgtgctactgggtctccctgctaaaggttctgcttcctggttcctgcaagagcagatctcagtttttctgttgtgttgttttgttttgttttgttttgttttttgttttgaaacagggtctctgttgcccaggctggaatgcagtggcgccatctcagctcactgcaacctccatcttccaggttcaagtgatcctcccacctcagcctcccacatatgtgggattacaggcatgtgccaccatgcccggctaatttttatatatttagtagaggtggagttttgccatgttggccaggcccgtcttgaactcctgacctcaggtgatccacctgcttcagcctcccaaagtgctgggattacaggcatgagccactgtgcccggccagatttcggcttttctaagctggccttccagcctctccatgcatcttgcccaccccactccacggcacagacctttgttccagccaaacgagttcttctccctctccacactgccatataaaaaaaaaaaatctgtgaaaatcctccttcagtacccaattcaagcaccacctctcagtgcattctgatgtttgggaacatagaaatgttaagacccattcttgaaaaatatttcacatctgtggatgttaaggtcacactatttcatttgtttcaaacaaagtgaacgaaatttcagagttgaattttttaatcttctcaaacttatttttggcttaragcggtctctaatcaaatggttttcatctgatgggcagggatctttcagaccctctcactgcatgcaggatacccctcgtggactgctctagaccaatcccaggtgcacgaggcttggggcaggagaggcttctttgtttctgtaggagccctttgcggggaggacattttcctgtttccyaacatgtccctgttccctctctttgtgcccggtttattcagcagacgtgttttcagcatcaaacagatgccaggcttgctcctagccctgggaacatagtcacgagaagtccttggccctgtctttgcagtggccccatctggagggagacaggctggcacagagggtagggtgcgtgtcctggggctcccctagaagcaggcgcagtggacagagatgtctcagaggaagggagctgggtctgtcgcagatgggtgcttcagaaagatcgcacctgagacagcacggaggatgcgtgtgggtgtcagtggggaactgggcaggtagaataagaggagttcaggaatcacttctaccctttgcaggaactgtgctaaatattgcgggctttaaaattaagtaagacattggcctatgttgaaatacagcaaaaacgtaagatggattaatgaacgagtaaaagatggatgaacagatgtgcgtgtgatcaagcagatggagcacattgctcgtggtcgaatctggtggttgaaatgggtgttcactgtagaattctttccgttttcctagatgcttgaaattttccaaaataaaatattgagaaaaaaattcgtgcaagaccaagttctctgccctcgaggcatttacagctgcaggccttgaggagtttctttggttcctgaagggctgcttgctcaccacgagcagtgtttgcacaaatagatgygcttcttgttgcctggctccatggctcctcctagagcattgttttcttattcaggttagttcagtgtctaattctaatgggaaaattgttttttctaggtttatttatgaaacasagcatcataatggcatagcagagttactggaaatattgggaaggtaagcctctgttatgggtagcaaacggctgtagatggaatttataccagagtgatccatttcattgagtccagctgcccgctttaaagcaaggcagtttaaaccattctctaaaagaattcaaatacaatttcactgaaagcaggagttggtgagctcttagattagagcacgccaaatgacaaatctctcccatttttatggttctgtacgtagattctacttcgtatacctcagtatcattactatggaaacacaattccagttatttcctcaagagcaatgttaaaaatagttaacctaagaaggtttatattagaagcttgaaagaagaatagattgtacatttggggtatcatgtaaatgctaatatttttaattacttcrgttttttatatgtatatttataaaataattaacatttcaaaactttcatcatctttatccaagtaaagtttttagttgccctttttttttttttttttttttttctttttgagactcttgctctggcacccaggctcaagtacagtggcacgatctcggctcactgcaatctctgcttccctggttcaaacgattctgctgcctcagcctcccgagtagctgggactacaggtgcccgccaccatgcctggctaatttttgtatttttagtggagatggggtttcaccatgttgcccaggctggtctcgaactgctggcctcaggtgatctgcccgcctcacctcccaaagtgctgagattacaggcatgagccaccacgcccggccacttttatttaattgataacccgtagattttatattagaccttctaacccactgtttcccagagttcctcagggtcccatggttagtaagtgtggaagtgctttttcctgcacctttttagggatgtagtgtagatgggcagttccgggttctcaggagcctgtggtggagaagtctggcactctggatggatctagtgacgctctgcagctcctgagcacaagactctcttctcagggtggatcaggtcctgcccagtagttctgagaaaagctattcttgccactttagatgtaatttgaaaaaatgtcctcgctgacaattcttttagtttagacaaacttgggcggggtttctccctcagtgcagtgcagtgagtggtgaagaggatgcctctcttactagatgtgtgaccatgggcaggtacttctgtaagataggcgcatcctcgcatttccctcctaggttgtygcagggaccggagcgctgtatgacatgtgttccacagcccgccatgccgtgtgcgtagggcccccrtgtgcatagggccgccgggcagctcccgccgagaggctgattagttttatccttcttccagatgaggctgagccttcgggtgaccctgtgagtgagcacaccctccttgatgggccgctccaggctcgcccttcccgcattgtccgctgtgccgcgcagagtcagtaatggaagaccaagttagagacagctctgtctacttctgcagctcagtggcagtcactcccgtttgcctaattacaaaaccaagacaataaactagttgtttgagacaaaaactttgctttggaggctctaggtaggacctcttttcttgcacaagggaacagctttctgtttttttgtttgttttttgtttttgtttttgagatagagtctcgctctgtcaccgaggctggagtgcagtggcccgatctcagctcactgcaaactctgcctcccaggttcaagcaattctctgcctcagcctcctgaatagctgggattataggagcccgccaccgcgcctggctatttttttgtatttttagcagagatgggctttcaccatcttggccaggctggtcttgaattcctgacctcaggtgatccacccacctcagcctcccagaatgctgggattacaggtatgagccaccgcctggccctaactgatttttaaccagctstcatccagcatccactgggtctctgttaccaacattagaataacatacctgaattactccaggcagcaagaatkcctaccagatggataaggctgagggaaggtgttgggtggggggtsggrggggtcccacgtgaactgtcccgtcttcctggcctgtttagggaggaagattttgccaccaggagctcctgctgttgagccagctycctgctgttctgggtaacacctgtaaacccagaatttttaaattatgtagttacaaagataaaaataactatacttcctggtaggcatttagyatttttaaactttttgctggtatcctcttttttctgatacacacacacatacacacacacatatgtatatatataggaagaatcctcggatttccctcttaggctgttgcagggaccggagcactatatgaagtgttccacagacccctatataggatctcgctatactacccaggctagagaacagtggctcttcacaggtgtgattatagcrcactacagcctcgaactccgggttcagatgatcctscygcctcagcctcccaagttagctggggcacaggtgcatggcaacatgcttggctacgtatattttgcctgctgggttttgatggtgaaaacaaaaattgaaagacggcaagatatttgtttaaaacctggaattcgtaratgttcaaacctaataaatgttctttttacagtataattaatggatttgccttaccactaaaagaagagcacaagattttcttattgaaggtgttactacctttgcacaaagtgaaatctctgagtgtctaccatccccaggtaaggggcagcaggactctaggaacacagctgttggcatttgrtcaggattgaacacgagatagtgaatccggccttgactgagagtgctttcttctttataggcctgtactaactttggtracaaacttctggtgataatcgaaagaataagggggtaaagagagattccttttaagaaattcagaaaaatctctgtaatacagaatttttcagttttaagcattgagaaaggagtaactctctgaaaggagtctaggaagacttctgagaggagttttctgtagtgtaatctaaaattcagtaccttaaagagaaaagcctatataggtccatggccaatgaatggcctatgaaaacgttttttaaaaaaataaagctgcctataatcccagcactttgggaggctgaggcggacagatcacctgaggttgggagttcaagaccagcctgaccaacatggagaaaaccgtctctacttaaaatacaaaactagccgggcatggtggcacatgcctgtaatcccagctcctcaggaggctgaggcaggagaatcgcttgaacccgggaggcggaggttgcagtgagccgagatcgcgccattgcactccagcctgggcaacaagagtgaaactccatctcaaaaataaataaataaatgaatgaataaagctgtgaattttttaaactgtagtaatctaagtacagctgtactgaaaaattggtcaataagtggttaatggactgcatttacctggatttggttttctctcactctttggctgcagtgggcgtctttgttcacttccggctgtcacagggccaggcactgagcagtcacgccccagcacaggcrcaggggtgcacaaggctcctctctgccaggccccactttcagagcttatggtaggggctaaatgacaaaaagtatattctttaattgattcttcctagaacatatttattttctctgactgctcttaactggtaatatctttgcatccagccagattatcatattgttgtacaaaagaaattaatagttcagagatttaagatggaaccagattttaatttgttgttccccactgttagatgactcgttgattgtagtctgcacaaggaccccaagaaaatcccatcatactggattgacttagcggtggttagactaaaaagactgtttcctgatttatttttcttatttttatttttcagctttctgatctatcaccaattaatgggcataaatgttaatgcccgttaatcacacaagggctttgtctgtaccgtgggtccytgtcttgctgtgggaaggtgtttaacgatgattctagaagaagcacagcagcatttttatgttgaaatgttaatgctctttctccttttactttttagctggcatactgtgtagtgcagtttttagaaaaggacagcaccctcacggaaccrgtaagtactgatgctagcrcgtcttgtaagatgtgtgcatttcactaaatgtaaatattacaacatctgcttcaccaaattgccattcattcagactttttcatcttaaattgcaatactaataaacaggctcatttcattcatgggttataggttttcaaagtatagtcattttaattgcagattcctttattatagtgattattttatgtaatgagattgccaccttgtccctcgttgcactttactgtttgaacgtaaagcacttgagcggttattgtagccactaaattttagtgtgcaattcagtagtttcacatctgcttggtttgacaacatattgaactgattatgatcagaggaattatagttagggtttgaaattattgttgtactaaagaggctttaccgccttgaaaatacttcccaagttacactgtaactattttatgatcattgaatcacaagtgaacgttagattactgctgttctgtgcgtggatytgtaattttttttcagcctccataattatgtcagaggatttataattttcttaacattttatgtttattaaaataggctatcatagccagggttaacaaagccagacatgtcaggtgccagtttaagcatttaaatacattttttgaaacaactttattgagatataattcacataccacacaattcacccatttaaagagtacaattcaaaaatttttgatacgttacattttgaatttttttaaattgtggtaaaatacatataacataaaatttgtcattttaaccgcgttaaatgtacagttcaccagcgttaatgacattcatagtgttgcgcaaccatcaccactatttccaaagctttgtcatcatcccaaacagaaattctacccattaaacaataactctccgttctccctccctctggcccctgctgacctgtaatctactttatctctgaatttgactattctaggtaccttatataaggagaatcataaaacgcttgtcctttcacacctggcttatttcactcagcgtaatgtcttccagggctcattcttgggttgcgtatcagaacttcattcctcatcatggttgaatgctgttctatcatatggatagaacacattgggtttattcattgttttttcagtgtacacctgggttgttcccaccttttagctattgtgaataatgctgctatttggatactggtgtacaaatatttgctataatccccattttcagttcctttggatatatatccaggagtggaattgctgaatcatatggtaattgtatgtttagctgcgggacagacccccatactgttttccacagtgactgtcccgttttacattccctgcagcaatgcacaaaggctcccatctccccacattctcaccagtgctgatgctgctgctgctgctgttgctttctttttatttattttattttatcttatttttttgagagaaagtctcactctgtcacccaggctggagtgcaatggtgcaatcttggctcaccacaacctctgcctcctgggttcaagcgattctcctatctcagcctcccaagtagctgggattacaggtgcctgccaccatgcccggctaatttttgcatttttattagagacagagtttcaccatgttggccaggctggtctcaaactcctgacctcaagtgatccacccgcctcagcctcccaaagtgctaggataacaggcgtaagccaccacacccgacctgttgttttaattatagccatcctagtggtgtgaaagagtatcttgttgtggttttgatttgcagttccctaatgactgatgatgttgagcatcttttcagcgcttgttgaccaaaatctgtatatcttcttggccgggcgcggtggctcacgcctgtagtcccaacactttgggaggctgaggcgggtgaatcacttgagcccaagagttggagaccagcctgggcaatatggcaaaatcccatctctacaaaaaatacaaaaattagccaggcatgatggcgtgtgcctgggcaacacagtgaaaccctgtctccaaaaaaaaaaaaaaaaaaagtgtatatcttctttgcagaaatgtccatttaaatccattgcccattttttacattggagtttttttttaattatttgagtatcaaagtaaggaatgttaggaaccaattcaaatgtttgaatgctcttttaaaagtcactgttagactagaaaaagtagatcttgtcactcctgggccctttctctctttcacagttcttttgtgaagttgtaatttttatagtgaaattgcatgagaaattcttaacattgaatttctgagttaaactggcttttgggctctgctttcttgtaagtttttaaattctatgtgtagattccctccatttcacccacaaaattcaagaagagctcttgtcctatgactgcagaggtagcaggtgctacagagccacgagctgggcccgccctgtcctgccgggccctcgtggaaggacgcatccctgcacactctccctccagcccctagatacctccgcctgagattttggggacctcccaaggaaatgtaccaaatctcatcacacttcagcatcaagcatagtcaaggcttagggtgaggaggtgttatttttatccttcttaacgactgaagacatgtttaggtaggaaaaagaaaaatgaacagtgttaataaaactcattggggattttttttttaaactgtattttctccagtggttacatgccctaactcttctgcctatatctgaggtattctccaaactgaagggtgagaggttgtatttttttttttttttgagacaggatctcgctctgtcacccaggtcccacaatagcccgtctgcaagctgaggagcagggaagccaggcccgttccaaagctgaggaacttggattccratgttygagggcaggaagcgtccrgcacgggagaaagatgcaggctgggaggctaggccagtctagtcttttcacgttcttctgcctgctttatattctggcctctctggcagcttaggtggtgcccacccccattaagggtgggtctscctttcctagcccactgactcacatgttaatctccttttgcaacaccctcacaggcacacccagtgcatccttcaatccaaacaagttgacactgagtattaactatcacagaggttttactggagaaagtaatatgtaaaaaaaaaaaaaaaatttatctctcccctcctctcccaccttttcctattcaaaaataaaagacaactgggcacagtggctcatgccsctaatcccagcactttgggaggccaaggcaggaggagcccttgaagccaggagtttgagaccagcctgggaaacatagtgagacctcctctctaccaaaaaaaaaaaaatttaattagctgggcatggtgacatgtacctgtggtcccagctactcgagaggccgaggtggaagagttgtttgagcccagggggtcaaggctgcagtgagctatgaacgcaccaacttcactccatcctgagtgacagagtaagaccctgtctcaaataaataagtaaatacaaatggaagggaaaaaaagctatggaaggagagatttttgaaagtatgtatttttctttcatgaattttctttgtgcgtatttctcatatcctgtagtggctgaacaattcaccaaatgccacattgcgtttaccacagacagaggctgctcccacctaagccactgtcccagcatctctatcccgccatccactgtctgtcagcctgaccctaaccttctccaccgagggctcggtgaatgagcctcaccctattctctcttccaccgaaaagtaacacaaaagcagagaatgtttgtaaaagtttttaattcccactaatatagtaaataaagtgaatatcactttgcaagagtgagagctgttaattgcagtcctgtctaaaagagggcaagagaccccrtgccggcttcagttgggtccttccggcgtaaatgttacatgcaggactctgacttggcaccagcacaaaggaggtgcaaaccccaccaacctaggccccgatgttcccacccggggacacttcattgcttagtttcctgctgcacagataatgtaatagtaccgtcctggctttagaaagcagattcaatttcctacatgttaagaacattcagaccctcatgtcagtaaattccctcttttgaaatgcctatttatgaaaacacaaaggccattttgtcttatttcagcattgaaagcttgttaatgagatgatcaaagtataggctttggtgcaggtgtacatctcttggtagcactaaggacacctggtgtccacgtccatctcccaggcctgcaccaaagggactcctgaagccatcaaatgtccaggctcaggaatgtttaaagtaagatccacttagaagactgagatatgaaggacatgtgttgccccatttgtagcctgtaattagtatttttcatttgctaattgtgtacagtgctcaaaagctttctgggcacatgaaacactttctctgttggaagaataacaaaagctcatcagagattttacagaagtaaaactgtgttccgttttcacccacctgcctcttcagtctcatcacattttactacatggcatagtagcggctctcctttctccttggtctaccaggacaggaagggggctccccaagactcaaggctggggccactggctcgcctgccctctgcagggagcgggcagtccttgggcttccaaaggaaaactcggggccttgtgctgcacccagcagcacacagccattgttgcctcggattcacattccctgagtagacaccctcctccacagagcacgccacactgacgcagcaaaatagctgataccgatcacagctcattccaaacaatgtgaacaggaaggcccgtgtgtgaatccgatcccagaaatgataccttttccagagaaatggaatagctaaatcggttgtgttgtatagttcacaaattaacatatttctcctaataaaattccatttgacaaatgaagagaaatagatgtaggaagtgatttccatctgctgtgtccttaatagtgattccaatacacgcaaagtgtggtaggaacacaataaatacttattcaatagttttgagctaggagaaccattaaatgatgcatttttagaaataattccttttaaagacacttgtwtggtagatttttatgtcagacttgaaaactagcagcacttccttttttatttttatttggctcttttggggtttttgtttgtttgttagattcttggagtacagtggcgcagtcatggctcactgcagcctcaacctcctgggctcaagcaatcctcccaccttagcctctcgagtagctaggaccacaggtgcccatcaccacaccaggctaatttttaaattttgtgtagagacaggacctcaccacggtgcccaggtcggtctcgaactcctgggctcaagcattcctcccacctcgacctcccaaagtcctgagattacatgcgtgagccaccacgcccagccttactttcctttgtttcatgaattttggagttttataaagtgtaatatcataaaagattacctgggagcccaaatgccaaagcatcaaaacaaaatttttctaaatggatgttaaatgtccacctttttaaaaaatcactgtaatgactaaaaggctggcctgctaagccatgagttggtgcgatctactgagctggaaatgactagtgagtgaaaacgaccaggcggtcccgggggccagcacttgtggcaattgcacagcacaagagtcgggtagaagccccgcggtgttgctgtgacgaggccaaasagctgctctaacgcaccggattgcacttgtacaattcagtgtgtaagcacatatatgcacttcatatgcaaatgcctgttttggattgttgtactcttttagaactaagatggctaaactctaaaaatattatgaaatctgcatggattcacattcagtattttgtactggtatgattgyggtaagacatttggaaactacaggaacatataaagaaaggttgcccagtggaaattctttctagctgtctgacttggccaaggaacataaaacatccactatccacaaactgggaaaccactgcagtccgacgggctgtgcctggcagagagctggtggcacagaccctctgggtggtgacaatcctggctacagctgccactgcagcctgctcaccgcaggcccagcactgctcaggctgttgtatctgacgcccacaggtgtgcgcacagagagcacagtacgccctgcccgggaggtcccatcgcagtacctgtggatgtgagttaataaggtcagcttaattcacatcactccttttgatatattttaacacagttgaaaacactgtctatgcatacagaagtatgtgtgtttgtgtataaacacatatggatggttgataaatttgagaaagaaatgggttgtgtacacgtggcccacagtttcagtactggctgcttccacaactaaaatgtacacatgaattgataatgctctgtgttttctccgttgatcttattctttctaaattattgtcctaacttcttatttttttttctttttttaaaaaaaggaatggactcttactgaaatggtgtttgatcagagaaagtgggttatataaactaaaattgtgtaatttctgaagtgtataaaattaagccaggcaggtggtacgtgcctgtggtcccagctactcagaggctgaaagaggaggatcacttgagccaaggagttcaagtccagcctggacaacataatgtgacccatctctaaataaattgattgatcagatagataaccagacagacagacctacttctcaaatacagaaaatcacatatgatgactgagtcactgttccctctgtaaggaagatggcaccatctccgtgtgttgccttgcagtggggccaccgcagtgaaaacacagacttcttaccatgcaggtgttggggcctcgtgggcatcagtcactccacgtgtcatttcttttgtaggtggtgatggcacttctcaaatactggccaaagactcacagtccaaaagaagtaatgttcttaaacgaattagaagagattttagatgtcattgaaccatcagaatttgtgaagatcatkgaacccctcttccggcagttggccaaatgtgtctccagcccacacttccaggtatgtggggcttgggggacctgattaaattcttccagtgttcatttgggaaaggaaaagttccatgcgtagctggccatgctttgcctctcatgcaatttaaaggtaaaatccaagtttttacttgaattatacttcaaatacgatgctgtaacttgaattctatagaatacccttgagcatcttgtcccttctgccgcgatactttttctcactaagagcagtcatctggcttctctgtaaagctgtctttatcttcatgttcagtgtgcttccaagttcataaacaccctcctttccacacctgagcatcaatattgatagacaacgggtggccaaagcctcggctctgagatgctcttgctgccgaggcccttcgttcctgacactgtgtaaatctgtctccctttaccctttcaaaaaggctgagagctctgacttttgtcactgccaaattcctgtgcgagaggacgaccttggtcagagctactttctactttcttttcccaatttccttaacccttcaagccagcctcggctcatcacctcttttgaaggccacccccacmcaccttcccagcctgcctgcctctgttggacgtgctagccacctgtccttttgcatcattgagcggattttattgtgcactcatcatgaacaaggtgaaaataggcacaaaataagcaagacctcccggtgcccagggagcaggccacacagtggaagagagtgaccatgtcacaccaccaccttacagccaaacgtgaagggccagrtggcgtgtgcagcaggctctcagaaacacatgggcagttaccttagcacaagtctaagtggttagaaaaagtccacaagaatgaggggtcctccaaactgagcctttcaagatggttttggaaagagatcattgaaaccaacaaaactaagacaagaaggcaagtgatagaagagtaagaagctctggagcacgggcagccatagtaaagtgaggccaggctgagtcgggttaaaggaaggaactgctgtggtgtagtctcttccatacaaatattcaggttattttcattttataaattccaatgagttttcacattaggaactaagaaaggaaaattatgttttgggttttttttttttttttttcatcaatcctggcctacagagaaaataatgtttctcaaggctttcagtgtgagcactttgcacaaaggagcatggtttcctagaaactgtagagaccagcgccacggagccctggctgaagtacagggcgttcgtatgccaaggagagactggcagtcgtgggaagtgtcccaaaaacttgarccccttccccagatgcaaaattagctatcgctatgggtaacgttagaccttcaagagaagacagggacaagyggactcacaatgtgctgttttgcataaaagcatgtgacagggcaaggaggaagggaagtccaggtggggaaagcagagccaaggtggccgcgcagctgccagtggcttgggtgccactccacatgtcacagaagccttcacgtccctgccaggaacagagcatgaaggctgccagggcggcctgccatgcctctgatgagggagttcagtgccaggacccactcaggccttcagctgcaggcccagccccccaactcgccctcgtctgtgtcccccacgcacgcttgcgcccatcttggcttytgcttcttagaggacctgatcagcacagagtacattccagaatcttttccagacacatatgcataaggccaactcattcttaattttttttttttttcctttgagatggagtctcactctgtccctgaggctggagtgcagtggtgcgatctcggctcattgcaacctctgccttccaggttcaagtgattctcctgcctcggcctcccgagtagatgggattacaggtgcgtgccaccacacccagctaatttttgtwtttttagtagagacggggtttcaccatattggccaggccgatcttcaactcccagcctcatgatccgcccacctcggcctcccaaagtgctgagattacaggcataagccaccgcgccagctcattcttaacttttagatgtttttttcacacccaaaaaaagtactggttttaaaaactggaaaaatttaaagtttaaaccatcaagcatcttaagcttctgttttctaaatcaggcttaaaatattacccccaaatatattggtgggtggtgggtgggtggatggatggatggatggttttgtttttggtttgttttctttttagacaaagttttgtgcttgttgcccaagctagagtgcaatctcagctcactgcaacctctgcctcccaggttgaagtgattctcctgtctcagcctcccaagtagctgggactacaggcgcctgccaccacacctggctgatttttgtatttttagtagagacgggatttcaccatgttggccaggctggccttgaactcctgacctcaagtgatccacctgcctcggcctcccaaagtgctgggattacaggcgtgagccaccatgcccggcctagatggttgctttttaaagtacaaggtattgaactcttaagtaagaactagcctaggagctgtgatgcgattgtgccttgttttgaatccacgccgcactctcatgcatgccctcccctcccccattacctaactcactccttttctgcaaagttcatcccagctcactgcctctgaggaatcagccctgattcctgagcctggcacaggctcacctgccattctctcagcatcccacccatacacaccgcaccacaacctcaggatctctaagctgtaggcttctggcaggagaagcgtcagccccatgctgctcagagcctccaagtgctgctgtgagttgtgtgcagatgaagggtgttgacagtagttatacaggtgaagctcctcttcccagaggcatacatgctgtgatggggacaggccaagtgtcctggtgactgcctcgaactcccagatagttctgtggaacgtgcacttgtgtgctggtttactacggagagaaaaagcaaatagggtagggtatgaacagtgttgaatctgggtggagggaggtgggcactcattatgttagtcttgcagctttgtctgtttttgaaagttttagtaataaaaatggggggctgagtgcagtggctcacgcctgtagtcccagcactttgggaggccaaggcgggtggatcacctgaggtcagaagctcgagagcagcctggccaacatggtgaaaccccgtctctactaaaaatacaaaaattagccaggtgcgatggcgcatgcctatagtcccagccactcaggaggctcaggtaggagaatcgcttgaacccaggaggcagaggttgtagtgagtcgagatagcaccactgcactccagcctgggcaacagagtgaaactccatctctttttaaaaaacaaaaatggatgggctaggcgtggtagctcacgcctgtaatcccagcactttggaagaccaaggcaggtggatcacctgatctcaggagttcgagaccaacctgaccaacatggcaaaaccctgtctccactaaaaatacaaaaaagccgggtgtggtggcgtgcgcctgtaatcccagcccctcaggaggctgaggcaggagaatcgcttgaacccgggaggcagaggttgcagtcagccaagatcacgccattgcactccagcctgggcaacaagagcaaaaatccatctcaaaaaaaaaaaagaaaagaaaaatgggggaaccaccctctagtggcttcccgtgagtaagcgccagtgcactcaggccctgttcccctgccctcctactgttcatgcccccactgccctctgcagtggtcctcagccagccccgtgctgacaactcaggacctctcctccctctggtccttgctcagatgtcacctcctccccattgaagccaccccaccgcacacgcaccgccgctgcctgttctcctgccctgctgccctttgtatgtgacttatcgtttctagtaaattaataatcatccatcacctgtctcctccccactagaatgtaagctccgtggagtcaaggatttctgccttgctttgttcagtgctgaatgctcagcagaacacagcacgccctcttgacctgacagatgggggaggcgggtggataggtggaatggcctcctttgagttgtctcctcagcatctagccagcatctagcataaatgtttacggaataagtagagaaataggtgacaatgttcttgatgagttgatgtacaagaagttgtctgcctctttgttgaaggctcttcagggttacaggttacagtctagaatattttgaatttgtagaaataatcataattttctggtccaaggtagttcattacccgactcacaggtttaacagcaaggacagccacctgatgtctcaggcacaacctccagcaagccatccacttgtgtctttcaggtggcagagcgagctctctattactggaataatgaatacatcatgagtttaatcagtgacaacgcagcgaagattctgcccatcatgtttccttccttgtaccgcaactcaaagacccattggaacaagtaagaaagaactggctgccatctttttcagtcattttaaaatatggcacgttttactgctacttcagtaagaataaatatcagaattttaaatatcaattaaaaaacaagaaggtcagttgctttgtggactcataaattaagtagcagcgtgggttgtttctgtggccgttgaatttaccaccttataccttcattcctgccagtatagaggcacattggtttgcagccacctcccagtagcagcagtttctaggcctcttcctgagcgtcctgcagagaagctgaaggtctctgcagagcccagtggggctcagccccggcgggggcacagtggccactgcattctcggggtgtctattgagctctgctgacatgcaccctggatgagcccctgtgtgagacccaagaaccaccccacagtggtcactacctggagaagaagagggaagccaggtgatctgaacacagccccatagtcccagcagccaaaaacatttcctcctactccgctccttcatcttttgacttaaagaggatgaataaatccgtttactgagcaatagtcttctgagactttaaaaggaaactgttgatatgggtgccacattatttatttatttttcttttttaaaatttgtattttatttgtttatttttagacagggtcttgctatgtccccccggctggagtgtagtgtcacgatcatggctcacttcagcctcgacctcctgggctcaagcaaacctcctgcctcagggtcctgagtagctgggactacaggcacccaccgcyacgcctggctaatttttgtattttttgtagagatggggttttgccatgttgcccaggctggtctcgaactcctggactcaagtattccacctgcctcagcctcccaaagtgctgggacgacgtgagccactgcgcccaggccatattatttattaatatggtatcatctaatattcctgctatttaaagaaatacgactgagtttttctttccccaccttctttcatctctttccattgtatattgtaattataactcagaacttaaagaagagcaggttatgctatccagccctcctcccttagtttatgggtgaggaaggtgagacttggagggcattcgcagcccagtctgcggtcccaaagctggtgagcggcactctggcccggtgcggtctcctaactcgcagtgtctattgggcacccctctggctgtgctgcacagtcaccctgctgccggcggaccagccctctcccatgcaccctctctccttgtccgctcgaggctgcaggtggcactgcctccttcccagrattctgcagggcagcagccagacaggtgttagccctggagctctgagccagacccccgagcgagcgtccagccagtccactcgcgtcaagtcttctgagggttgccgcccagaaattcaacagagaagggcaggcagatcagagtgaggatgactttggttcacattcctgccttcctcctgagcagctgtctgaacccggggaagttagctctcaccaggtctttcttagccacagtttctctttggaaaaactgagaaagtaaagtgctttgccttgcaacaatcttcacttggttgtgaggattaagataaagttaatatgcgtaaagtacctggcttatgataggcaccaagtaagcatttgctgtcacttagtggttgtagggccagcagccatgctgatagcagtggaggcagcagccaagaccctcatggcaatagcgtggtggttgtagttgttaatacagcacatccaccctcaacaacctgttctttgtagcattgatttattttatttatttatttatttttgagatggagtcttgctctgtcacccagactggagtgcagtggcaccatccyggctcactgcagcctccacctcccaggttcaagtgattctcccacctcagcctcccaagtagctgggactacagacatgagccaccactcctggctaatttttgcatttgtagtagagatggggtttcaccatgttggccaggctggtcttgaactcctgacctgaagtgacccacccgcctcagcctcccacggtgccgggactacaggtgtgagccaccgcgcctggcttgcattgatttttttttttttaatcgcaacaatgacaacaaagcccctggagtgtcgccatgtttcttgtgtgtaatttagtttagtatgtaagtcagcacaattcataactgacttccaatccccgcccattgcaaagaaaaaaatgttcttttaagtgttttctaagtacaacttgggttttattacaaagtggattaagaaggaattatgatttgagggttacgttttttgggatttatttgtttttagctactggcacctgttgctcacagtcctgcgggtcgagcaggtcctgctgcgcaggctttcgctggtgtctgctgggggatcggggctcttacagggctgcagtcccatggcagctgggactagagtcacccagaggctcagctggaacaatttggcctctttccctctccatgcgtgtcagagcctgagagctaagcattgattaagctgttttatgctcattttattttctctttcaaagctctgtgttgccattattaaaattaatttttctgtcctcagggaataagatgaaaagaaactgacatttataggaaatcaagtattgccattattgtcctctttataattttgtcttaactatatttgttcaagtttcaatgtttttaattcagyttctgagcaaggtcgtttttggctactgtcagctggagacagtgagtggagtggcctctgtggctatgtgagagccactgtgaagaaagtctcgggatgtgtggctgtcagaaaacaagtaacgcggaatgagcaggccttgcattttagaccttagggatcctgtgcgatgtgggactgttggaatatggagsagcctgagagtggagaggcgagggctcagcaggaatgcgtgctcccaggctcaccgtgcggttttctttataggacaatacatggcttgatatacaacgccctgaagctcttcatggagatgaaccaaaagctatttgatgactgtacacaacagttcaaagcagagaaactaaagtgagttgttcctttcacaagttactgtttccaggatttttttcttaatcctaagtaaacctcttccactgttttgtcctaaaacggtattcttcactcgaaagcaaaaccaagcctttcatacttggaaagcaaattaaaactgtgttataataacgtattttgaaagaacaggtgtttaaagntagctattctccccccttgtrttgccagattaatcatctttgcaaaaagtgcttatgtaagcaagaatttaacattcagaattttttcttttcttgggctataatgggcttaaaggctataatgtgtagtccattttcatgtttataaggcagggatttgaattatatcctataaggtttatcccagagagcaagaatcttcatttcaatgtagctttattctgatttaatgaactcagcgatgtgggtgttctctggaatctagtctgtcctttgcaaaatcagggtcctgccctcgtgcctttgagcccacatgtgtccagggatgatctaagtgacaaagtacttcgtccctaggctgtgcaagtaataatgtgattaaatagttgttggaggtcacttcttccaagttgagtatggactattggcagattttattttttgcttgtcacttaaaactggctaaggtagataagctttgcacgaatgtaattcaaaatacactgtatacatatgtgtgtatctatgtgtgtgtgtgtgtgtgtatatatatgaaacaactgccatttagtcattccttagacaaatatgtgaatatttaccttatacaccaggccctgttttagattctggcaatatagcaatgaataaaacccacaaaaatccttgcccctgggccgggtgcggtggctcacgcctgtaatcccagcactttgggaggccaaggcgggtggatcacaaggtcaggagattgagaccatgctggctaacacggtgaaaccccatctctactaaaaaataccaaaaaagggccaggcgtggtggctcatgcctgtaatcccagcgctttgggaggccgatgcaggcagatcacgaggtcaggagatcgagaccatcctggctaacacaatgaaaccccgtctctactaaaaatacaaaaaaaaaggccgggcatggtggctcatgcctgtaatcccagcactttgggaggccaaagcaggcagatcacctgaggtcaggagttcgagacaagcctggcgaacacagtgaaaccccgtctctactgaaaatacaaaaaattagccgggcgtggtggcaggcgcctgtggtcccagctactcagagtctgaggcaggagaatggtgtgaacctgggaggcggagcttgcagtgagctgagctcacaccactgcactccagcctgggagacagagagagactccgtctcaaaaaaaaaaaaaatacaaaaaaaaatcagccgggtgtggtggcgggtgcctgtagtcccagctactcgggctgaggcaggaggatggcgtgaacctggaggcggagcttgcagtgagccaagatcacgccactgcactccagcctggrcgacagagcgagamtccgtctcaaaaaaaaaatccttgcccttttggggtttatattctgggtagtgtggggaaataaaagaacacaaaatacacctaagtgaactatagagcatgagagatgacaagtcagtcaggaaagggccggggagacagaccagccattcctctagagctgccagctgcrtggtctgttctcatctcagctctcagtgcagttcgcaggtaggaagcatgcaagcagcagggccttctgatggcagatcctcctctcgtggaatcccacagctttcccaacaggaccttaaaggttgtgtagtacattttctgggttgaaaaacttggatcctggccgggcgcagtggctcacacctgtaatcccagcactttgggaggttatggctggtggatcatttgaggtcaggagttcgagaccagcctggccaatattgtgaaaccccatctctactaaaagtacgaaaattagccgggcggtagtagcacgcacctgtaatcccagctactcgggaggttgaggcaggagaattgcttgagctcgggaggtggaggttgcagtgagccaagatcctgctactgcactccagtctgggcgacagagtgaggccctgtctcaaaaaaaaaaaaaaacttggatctgagttaagcgattgaaagtcatgtgactcgcagtggagtcagtcaacaacccaggtctcctggctcttaagacgtttcctttttaatattataggaatgggaatgctggctccttttacagtactggtccctttacactgtactgcatactcgttttttcagtggatatatgagcttcttgtcaaaattatgtgggtcccatgaagaaacatctaaccaggggaagggggaaggattgagacataagacgtacttatataagatttcttttaagaattccaatcttggacatgttaaatttttttatattttctcatgtttaaatctcagttcgtttttcatgctgtgctcagcacgtaagtgtggggaaatggagcaggggggctgcgggaggagccgctggctgggctcaacatgcctgtgcctttwccccttcagtgtgttcttgtgtctgatgcatctctaacacagatgacattttactgtttttcagagagaagctaaaaatgaaagaacgggaagaagcatgggttaaaatagaaaatctagccaaagccaatccccaggtactaaaaaagagaataacatgaaaacgcccagggttacttgaatgtttttataagataggaatatatgtcttcaccatggggggggtctcgatttcactaacgttgtatatgaaaatgtctgcaataaaaagtacttttaaactttgtaaccctccttttgtacaagtacttattttgccccatatcgttttaccacagaattgacttttttcctctgctttttaaataagatctgaatcttatgcatatactgtggtaaaaagaaaacttgaatacagcctgagactgtgcctcctctctcagatatcatagatgctgtcactcaaacagcatttccctttctttttcatatgaaattagttctaaaagaaaggaaattagattggaaatagattaagtatgacgttttgatgtcctctttctttgtatgaggtttctgtaagcccagccttttatcattaaaaatcagctgaattctgccacattagcagccaaccctccttcccaccccagcagcgggtgccagtgtgctctggtgagtctgcgcygatggccggacgtcccggagctgccggcagttccagctgccggggctgccagggtccgggagggtttcctggtgtcatggtctttgggtttgatgtacgctgctgtaaatgactagagcgttatgacagtttcttcacgttctgtgtgcctgattataacagtgcctcttaaaaagaaaatctttttcagaaaatcttttgtctgaatctttgccactcttaagaattctcaagctttccttcaactctccagaaaagattttaccgaacaatgtatttcttttagtgagagatatgcatagttacctaagttggtttttagatttctctgacacttaataaaaagttatacatgaatataaagttaaaagtatatctttacctatataacaacatactggtttgtatactctgataaaactgcaatcaggaaactcaaatcaggaaaacggaatgacatttctaattgtgagcccttgagtccacctaaaacaggtagccagcatttttctagcagttatttactcatgctgacagaaatgctgttttaagattactgtctaaaactgtataatccttaattgaggtaggtagctataggcgtctccttttaacgaattgaatttatgttgaaagtgtggttaaaatactgatatttgttttaaaacatggtaacactataaacctgggcaagtttataaggcccagccctgcctgacgctgccctgcgtgtcttgctttgttctgaagagcctcaggcaaagtgggtgctgatagccctcaggattgtcaaggaccccagtacacatgcagttgaaatcagtagcctcgaaaacatgtgagaaatgaatacacacacacacacaaacacacacacacgaatcagaaggtctgattttatgtacctagaatatagagataacttattgaaaaattgcataaaattgttacattacaaatcaagagctggttgtttgtgttgacaaacatggcccagtttcactactgcacatactgtacgtaaccaatgtttcttctgaaatacgtattgttctcttttttctttttctcaacttttcctgaatgttctcaagtaactttctgtattctttttggttgctctctttgcaaacgtctgtggtggtggcaggcatgccgtggttctgcataggagctttgacgaactgtgatgctgggagcttagccctgccttgtcctcatgtctgtgttgacgccatctgtgacgcagtccccatgagtctcgtccacatgctctagtcgcatggcacatggtctcctaaacagaaaatacttcatgggtcaatacctcagagctggaaactctggcctcgtacttgcttctcattctcaggagaaaatatctaaattctgatcactgcttcccattacaacagcaacaaaaagtcaataattttgtggataatacagtctggttatttctgtagtgaaaatagttgggttttcaaagtttggttttccatctcagatcygcctgtggagaattggtttgcgggctttgtttttaaggtgggttcccagggactcgctgtgtgttccctgatgccccccgtccttgcagaccgagccttcgtccactcaaacgtgtgacagcacgtacccagcaggcgttggggacccgggaaggctgcggtgccctcaggagtgtgtcttatttgagcagttatggcaactttattggggtttttaatgtcacagatgatttaattttctaaaatcatgaaacattggcagtttctaacataaatgtgtttctcctaatccatcaaaaggggccatataatattttactactcacttcccccagcttttgtgggaatcatatgaaatgaagacaggcacttctgtgagactcagagtagctgtggctcagtgtttgcaacgaccaaaactgccatgagcaacccagggcagggtctgggacggatgcctgcctttccttcgagagaggagctcatgtgcggaatgcacctcagtgaaggtttttgttttggtttggtttggtttggtttgatttggtttggtttgtttgagatggagtcttgctctgttacccaggctggagtgcagtggcgtgatctcggctcaccacaacctccgcctcccaggttcaagcagtcctccggagtgcctcagcctcccaagtatgctgggactacaggtgcacgccaccatgcctggctaatttttgtatttttagtagagacggggtttcactatgttggccaggctggtctcgaactcctgaccttgtgatctacctgcctcggcctcccagagtgctgggattacaggtgtgagccrccgcacctggccttcagtgaaggtttttattcctagtcagaaccctctcctgccagtgcccgctgtgtgaggtttattttgctgtgaacatctggtagcattcttgtgtagggacactctcctttgccccgagggccagagagccgtgctccaagcggaggctgttggtgggtcccatgaagagcactgcttgttgcctggagtagtcaaaagcagaagaagcgttggtgtgaaacagtcccygcaagtctcaggagtcttgcagccacttaggtttctgtatctcccacctgactgtgagccccctcgaggaaaggtgctgtgtcctgaattgtggaaatttctagggatacaaagatgagaacaagacatagcccccagcctcagggagcttacagtccattaggagaggcagatgaattcagctcagatgatcagattgtattaataacatacctgggggagtgtgctggagatggcaggaccagcttattcgttcccatctctaaagaaagacacacacagtacgggggcctggcctcttggtttgactgaaggggcctcacccagtcagacttgagggaaggtgcccgcggcagaggtagagaaaagcagggacacagtgggtgacaggtgtcggtcytggtggggtgtcagttatggggtgggccggtgcgatctgctgagaggtgagggtggagagggagcagaattcccccaaaatgtcagcagatattaaagagccataaagggcaaaatggcccagcccgacttgcatttttgcaagctctttggcgcagcatggatggagtgctggggctgtcggggtagggtgtggagatgtgtggagatcgtggtgctgggcggagctgtgggagtgaaggcacagggcgctgaggacctggtctgactggccttcaaggaaggaacccagctgagggtgtgtgccccgtctgtttttgggggacgtggaagccaggtgggctgagttgagcagcagggcctgggcctggaggcatggaagccagggtgaataaggagggacagagggtgtgggaaaaggccgaagacagcccacagaggaaggagcccaaggcacctggaggagaggctggggtcacagagaccgagggagggtgcaggttcagggctgaatgatggcgtccayggtcatcattcctcagagaggcccagtgaggcaaggccgggaagggcttagcagccagagggcacccataggcctcatgccagaggtggctccgtcagaggatgagggccaacaccagacggtggctgagaacggagctgctstgggctggcagggtgtgaggggcaggggtgagggggcagggggtgagaggcaggggtgaagcaggtcagcaggagggcgctgctgtgacaggagctcagcctgaaagaggccgaagctgtgggactcactgggcagagaatggaggggtgtggatgagagcagcctgggcaggaacccccgctcccctctcctgaactcagaggccctgagcaagttccccagcccctccatgtcccagttcccccatcagccaggtgagggtggcagtacacacacacgaccacgcaggacaaacaggcgccccacacagttcccagctcacagcagacacagatgccacttccttcgcctgtgccctcagagccagcagacgctcgtcacagtcatactgtcctgtgcaccctgtctcatggaaccctcacagccaccctccggggtgaccttacccccgcactacactcatggaaatggagtcaaccaggcccagtgactgagggctgagccatctgtgtttcaatccagagcacagggagagtggagaagtcccagggccgcccgtagggaatggagagggagcgtcaggctcacccaggctgcgtttgttttggtggagagcaagtcacccgggatgtgatgagagggtttcataagcaagccgggaaaatgggataaaggggagagagaaccgtgccagctgtctcgatgagaggacatgatcgtgagaggaaagggaaaagaatcatgaggttggaggtcgctggcaaagaatgggcggccagaggtgagggttccagtggtgagacagctcccaccaccgagcccagggtgcgacctcgcacttggctgctcacgtggagtcagaactgcagaggccatggggtgtgggccagggtatgggcgggccactgtccatcagatgcagaggggtcaggaggggaccagctgctttactgtctccactgagtgctttctggtttcagaagtcagcagccgcatcatgttgcaggtgtaggcgagtctcccactgagtgggcttcctgcgggagagggccctggggggcggcaggggagatgagtccctagccaggatgagaagcttggagttcagagcctgggcacctaacagagcgactccacgctttgcattgcagtacacagtgtatagtcaagccagcaccatgagcattccggttgcaatggagacagatgggcctttatttgaagatgtgcagatgctgagaaagacagtgaaggacgaggctcatcaggtaaaagtgcaccgagctcagctgggcacccatgactgatttgcttaagaaatgcacatttttgtaggcgatgtgatttgcatcagtgccttctgtttaagctgaaattaaaacttaaattttgctagtcttataggaaacattgtatcgatagatcttagtgatcaaattactagaaacagtttttaaggattaagtatgtgcctgagatgtgtatctccatttactaacagcagtagtaatcccaactcttaactgttctttaaatgttcactccagcaaaatygaaagcttcacagccatatccacccctcgctgttttcttcacagccctctggcttctgcttcgacccagagaggctcccttagctcttcacagcgggtgctaacaacccctctccctaggacacctcaccctccttgcccctccccctgtcccctcacccccttgcccctccccccttgccccctcacccccctcgccccgtcgccttcccccctcacccccttcatccccctcgctcctctggccccccacccctccccccacccctcagccttctcccctcgcccccctcatccccctcgctcctctcgcccccccacccctccccccacccctcagccttctccccttgcccccctcatccccctcactcctctcgcccccccacccctccccctctcccccctgacccccctcgcccccctcgccccttcccgggcactgtctttcagtgctttggtcacaggccacctccaaagagagcctccgaccactgttactcctcagctgggcctgtagacacttaggacaactgactcagttcctgcctgggttcaaggagcgtttcagctgccgtgtttccctgagcgtccctccctgtttcaaatgcctgtaaactaaaacagtagtcccaaatggcctggggacattggcctttctcactgagaaactttaacctctttttgaccagcgaaagaattccaaaagacatccccttctaaaattctgaggtaagaagtgaaagtaggcgccccgcctgtggagtagccattgttttactcctttactgcattaaataaaatatgttgtttgaatgaatgccccccatttcttttttacttcttgaatgtgactgctagaagattmggaattagcacatggctgaygccatatccccggctcctttcckgagttgcacaggaaagggctcacggcaccaagtccccacggcagccacggtcatcggcctcttctgcccctctaattcctcaactcaggttaagagcaaaatagatgactgaatgcttttcttagctcatcaaagcctgaaaatactagaaatacagtggaaaagctcactgaagacttggaatatcagtaactaattttctatctaatccagttggttccatattctcctcaccatgaatgttcttagcaatgaatagatgtcatcaaaaatatgaaaatctgtatatatttctctctttgtgggagtgttaatgttcttcttgatatttttttttaactcaggaatttaaggttgcctttttataccattttgattttgtggcttcaaatttgctcaagacttgttaagttgaccttgttactgcacacagaaggaaatcacagtcggtgtctcttctgtgagggaacctgcctgggagtttgtggccacgtgttcatttttaagacacgaggctatacacagttaaaaagccaattcttggccgggtgtggtggctcacgcctgtaatcccagcactttgggaggccgaggcaggcagatcacctgtgctcaggagtttgaaacaagcctggccaacatggggaaaccccatctctactaaaaaatacaaaaattagccaggcttggtggcaggttcctgtaatcccaactacttgggaggctgaggcaggagaatcgcttgaacctgggaggtggaggttgcagtgagccaagatggtgccactgcactccagcctgggcaagaaaagcaaaactccgtctcaaaaaaaaaaaaaaaaaaaaaaaaccaattcttacacattaaatagcttagggttggggaatttttatttttggtatagcctttgacttaggtcagaattaaagctagacaaagaataaactaggtccaaaatgtgatgtacctgaaaggtgtgtgcatatttgcaatttaggtcctgctctgtagtagatcaagaacttgatcaagaatgcaaaccaaaatagcattctctcctgagtaaagctgcctttgaaagtcagscctagtatctgtgtgatattcggggccccagaacgtccaactgcttggtctgtccactgcccttagaaaggggcacgtcccctcctgggarggttaccttatacagtgacaggaaggaaccagtcctrtggccatccacgtgtctacttgtaaatacacacacaggcaggacagttcttggagaactcctgtagcatgtctgcttccttgttttcacaactcttgaaattgtattctgtcaccgggtttcctgtgtgactgatattcttacaacagtgattccctcacctcatccttagatctctatgaattatgttcctgagtcagaagactcagaagagtcattgggatgtctgttttccccagattaacgtgctctccattagaatctcagcaggctttttatcctcaagaagttgagaaagctaattctaaaattcacatggaaatgcaaaggatctagartagccaaaacaactgtgaaaaagaacaaagttggaagactaataatactatgcaattccaagacttcttatagtttttgtttgtgtttggagacagggtctcactgtgtcacccaggctggagtgcagtggtgtgatcacagcacactgcagcctcaacctcctgggctcaggcgatccttctacctcagcctcctgcagtgctgagattacaggtgtgaggacctgtgcctggcctgactccttgtagatttctgtggatcagttgaatcaattgaattcagttgaattcaacctatccagatgaaggtatttatgaagtgcagtctctaggtgtaatatttgaaatgataaattctgctttttttttttttttttttttttttttttttgagacagggtcttgctctgatacccaggctggaatgcagtggcacaatcttggctcactgcagcctcggcctcctggactcaagcaatccgcccacttcagcctcccaagcagcagtgactaccggcaccaccacactcagctgatttttgtatttttagcagagatggagttttamcatgttggctaggctggtctcaaactcctggtctcaagtgatctgcctgccttggcctcccaaagtgctgggattatgggcatgagccaccgcgcccagccaataaacttttcttaagttgaaaaatgtttggagtcgttttctggaaattctgaaagcactatggttaaagcaaaaagaaggtaccaattcaagtctgcagtgagctatgatcgcaccactgccctccagcctgggtgacagagccagactcggactctgaaaattaaaaaaaaaaaggtaccgggatgcaggaaaaaygtgcacaatttggtgaccaaattgacgtaagaaatgatagctgaaaattaagcttttttggtttttatatatagtcatttgattatattcagtgcccttttaattttattttcagctaactttatttttccaaaataatttcacatttctttgagatgatgtgagtgttgggtagggagaggtgtgagaggtagttgaaggaatagctggagagtgggaagcaggctctgatgctgatggatggagtaggctggatttttgtggagaaattcaaccatgtatytacctatcctttatttacatttccttcaagaaactagtataaccctatacagaacattcaaagaaaactagcaaatatcatgtgaataacatttatattatagacattttaaatgtttgcaattctcatttttaacagttggtcgggagaaaagcagtgtcaaccacgcaagtaaggaaggtgtagagagacggaaggtgggcagtgcaggctctcattactcaacgtgtagagcacattgaaggcctgttctccaggagaagaattgacgagttaacgtggacatgaagtaktttcccttttgtccatgtcattccagattgtgatggtcaaaacaaagaaagaaatttggcagctgggaggccgggcacaatggcagatgcctgtaatcccagcactttgggaggccgaggcgggcagatcacctgaggtcaggagttcgagaccagcctgaccaacatggtgaaaccccatctctactaaataacaaaaaattagccggacgtggtggcaggcacctgtaatcccagctacttgggaggctgaggcaggagaatcgcttgaacccaggaggtggaggttgcagtgagccgaggttgcaccattgcactccagcctgggtgacagagcgagactctgtgtcaaaaataaatataaaataatttttaaaaagaaagaaatttggtggctgggcaccatggctcacacctgtaatcccaacactttgggaggctgaggcaggagaattgctcgargccaggagtttgagaccagcctgggcaacacagcaagacctcatctctagaaaaagaaaaaaaaaaaaaatagccaggcatgtggtgcgtgcctgtagtcctagctactcaggagactgaggcaggaggatccctgaagcccaggagttggagtctgcagtgagctgtaatcatgccactgcattccagcctgggtgacagagaccctgtctctaataaaaataaaaaaaaaattttaaagaaatttggtcccttaagaaatgttgattatttctatctgaaattaagtagtaaagtttgaagttacacctttataagaggaaggaaacttgcatagccatgtatgcccaatgcctggtgtgctttcagcatttacggtttacattgagccttccgggtctgcccgtgggctgcagaagagaggccacctctctctgacttgtgtctcctgtggtccgctccgcccctgccagcatgttcacctgcacatcccctctgccaggccsttcatcagcctgccatctgcatgctgtcttattctccctgcctgctgctgctctcatttttttgccttgtggatggtaaaattattctctgctttacacatcaatttaaaatgtctaagcagaaaggcccagatatatccaccggttttctgtcctttcagaagctctggggtcatgtttgtgttctcagtttgcattcactggttccagctccaagctttttactgttgcctttttctatgaatatgtttcttctctttggagtgcctatttcagctgtaattacatatttcaagtatataaaaatcttggttttgttttgcttcactttgttttacagatcaacatagaatgggcataaaattcagggtagaatttcacctctgggttgaaggtagacatgctttacatcctcacacgttaacacgctcttacaagtaccgtgatgggtgaggggaccgtgaccttcaccatctccagagatggatgattctcctaaaaccctcacgctggtttccagggaaacaagaaaccaaaagtcctgcccctaccatgagtgaatgttaatattcaaataacatttctagaaataatcctaaagtgatgtgacaaaattctttttaaaccttgacattattgctgttttcatcggtaaatttgcaaagaaccctgctgagaaacacttagcaaaaatttgaactttacattcaggacttctgcaggtccttgaatttttcattaaagcgaaggaaaatgtattttacatccatgtcaaaatcagacatctggaatttgtaaggcgtttttacgcttacgttctttttgttgtcaaaagactgacttaaattttgtctgctagacataccacaaaagtaacttagtctttttcaatacactgaacaaaaaggaagacttaattttggtgaagaaactttatccagaaaagtttctaactaattggcagtcagtcttctggcatatacatcatgtttgggtgatttagatggtttattgttttgtttcaraatattggtattaacacagtgtctctacttttaaactgaattatgtgtttattcatggaaatggatgcttttgatatgtaaactctccaaattaagtttcccttttattgcagatacagttatccaaatcctcatgcaaaaatgggattcacttaatttttttttaagtgaaaccaaaatttcctagactttagaaagacaatggattggagaagagagtatatatttttttcaatttgatagaagtttgaaatccaatttaaatatgttttttattcattctttttctttacctccaaggaaatttctacatcttttttttttttgagatggagtctggaggccctgtcacccaggctggactgcagtggtgcaatctcggctcactgcaacctccacctcacgggttcaagcgattctcctgccccagcctttcaagtagctgggattacaggcgcgcgccactacacccatctgatttttgtatttttagtagagacggggtttcactatgttggtcaggctgatcttgacctcttgacctcgtgatccgtccgcctcggcctcccaaagtgctgggattacaggcatgagccaccgcacccagccagaaatttctgcttcttgaaatgcttctgtaggggacatgcccatgaaatggctttaatgacatttatgaaataggaggttacttaggaaatttactaaaatgcatgaattctgcaaattagaggtactgagtcctttgtacaagcactgcacatttcagaagaccagaatgccagtattgaacacacaggtcctcaaacgagtcacgatttttagtagcaagacatttttggcaaatttccatgataagacctacgccgtttccctgtggccagggtgccgccagcgagtgggtgaggcacacgtgcctcgcggttatcctttgacttccacctcagaagtaagcttgcttttcagatagyttagtttgtagccaacgccattgcatttctaattccaggcacagaaagatccgaagaaggaccgtcctcttgcackccgcaagtccgagctgcctcaggacccccacaccaagaaagccttggaagctcactgcaggsccgatgagctggcctcccaggacggccgctagcctccggggcgccgcgtcggggccgggcccgccagttcttttccggattctgtagaaaatacatacttcctgtgccataccaatcagttacactcaaagctttcttggaccccgttccgtaggcaataacgtgcgtccgcctcagcgcgagattaggagttcaaacaatggtgacttcccagagcccgctggcagagccgcgggttgacgacggtgtcctcgcagtgtcgccrccaccccagcgtagtccaagtcagactatttcacaaagtcagagcgataggaaagcaccctgcccttcatcttcatgttctcccaaatggaacttaggatcttttaacataggtggttctgtgataacatcagtgttttccaaatcaaaggaacgctttaaaaaataggacctattttttaagactttacagcctttgaaatggtttccacgtgattgttacgccagcagttctcgttttgtttgtttttcaatctcagtgaaatggctctttgctttcragttctcacgcaacgtactgggcaaatgacaatcctcagccgctggtattttctaaggggtctcttcrctttgatgagtgacatgaacaccgtgtctccttctcttgtgtgtacctaaagccatatttccaagtctgtggtactccaggattccaggagtaagcctgtagaagagatttattttaaaagagattgctctgaaatttatcttaaaagagcttgctctgtctaccttgacagaaattggagttttaaaattatgtgttaatatttttatttgcagatttcgtttccgtcaacttaaacattgttgcccttcaacaaggctcttgaattaataaaattatagtctctaagaattccacattttatggaaagttagagcaaaatcattttgagttaagccagttcttagcctaatgcaaactgcagcgcctttaagcataaagtaacacaacagcattgcacggggccggcactgccgctgccttcactgaaggctgcagtgctgttctgagagcttggaggaggcaccagcgaggatgacgtttagtggagctctttctgttgaaaagagctcacgttatcaacaccttgtaaggaaaatacagtgtctgagttttcatcggtcttcacatgctgctatatattccacagagttccttgcatgtactgagcttttgttttagatggaatagcacaaggagaaaaatctttaaacttagtgctttgtctattctttatttctctcagggtggccagtattttgacttatttatcctgcttgaaagctacttgagatgtgtactgctattctaaacacgtgatctagtttctttcatctctggcataagattatataacttaatgttaagtgtcttgaggcataaaagacaaaatgtggcttattttaggatctgttttttcatcgaggtctcgggtatcctttcaaagatagtgaraagcagacactgctccttgtgcagctctggtacctsctgcccactgctgtcacttcaagccactggcaatgcttctgtcctcgtgtcttggaggaaaatcacctggggggaggggacttcttgtggtaagagcaagtgcaggtatgaaatgcgaagattgccccagctaaaagtggacaagtccgctttgtgagatgaatacttcctgagaaacttgacaagtatctctccattttaccattatgaaaactatcattaaaaaaaacagtttagatgccttctccttttgagggaaaaagggtgctttttattgtataaagcagcgtcttatgtattttgatataccattgtttgaacttccgtctttagctgatagattctcaaatatccttgattttggatgttcagtatgtttgtgagagaggtttctgggaagactctctttttgccctcgggaaaaagcaaaatatcaatgtttgggtgactgtgtaaagctcagtgtgtaagaacatctttttgtctwggttttctttctgctctttattgaagacaaacactcaccaaaaagaaaaataaaagttttcagagaaactaattttctttggcaagagtattacttaatattttggcctcctaaagtttccctagttagtactcggactcctgtgctaattgtcagcttacatatcattgtatagagactgtttattctgtaccaaactgatttcaaaagtactacattgaaaataaaccggtgactgtttttcttcataaagttctgcgtttggcatcttcactctttccaaaatgtatctgtacatcagaaatgtcacwattccaagtgtctttttagtgtggctttagtatggcttccttttaatattgtacatacattgtatctttgttttatggtaataagtaataaaaatgtagacttcatattttgtacaaaatgtcctatgtacagaataaaaaagttcatagaaacagcaaatataggtaagtggcacaattatttttctttagaaaatatctgtaactttatgcattagtgaaatgttaagtaccgacatattttttaacattttgtaattcaaaactttttgttttgacattgtttatgaagagaaacttcatacacttgccatttaatatgctcttttatctaattttcaaaaactctaaaaaacggtgtatcatatggactaaataaagaacatgtgaattttattgctcatcatgaaactaaatttagccatggtgttgagcaagctggctctgacgttatcgggttcccgttaggtcagggccgcccacacacagggacgctgactgcagaggggctggccatctccatccagcccgcctggagcgctggctgcgccagatgctagccacagctgttcaaagctaagtctatccactgatttttttacttacttagtggaaaaggcagtgtgactttttatagaccrcctcttggtttggtttgggttttggggctttttttgagtaagaaaaggtgaatcaatacaatttatagaaatgaaagtcttgaaaatagggaattgctgaaagtatgaatttaggatcctagttcgcccacctcctcctcagtggagagatcattatcctcgctgatgctcttgcgagaagcccrtggaaacaggactaaagtgttatctgctcgtgtcgtggttataacctcacctctccatagctgcgtgtggtcagcacgccggctggcgtgggagggcaagctctgtgcttagcttccttctctacccagtggcgtctgtgctcccttcgcactgacagaggtgcagacgccgtcactctgcagctgggggcacgtggacgaggctgagacccaggcagagtgtggccttcgcccaagggtccggtaactttgctggctgtttcgaagaaccgcacaygccccacttccacctaaaagtggactcgccagccagaagacttcacatcctgcaccgctactcacgtcgatgtttccgcagactagatgctcgcccgctgcggtccttatccctcatcttaaaattggaggaaacctggtgtttagtaacttcctacagcacgagagttcgagaggactcactcacagaggcatgctgcgatttcagcccagctgcatgctgctgctattttggggtagcaagaagcataaaggcaaaactgtactggcttcgtgtctccttccgtgagggttggcagcacccatcagcagtaatgacaaggagaactcatatttcttagcactgcctttatgccaggagctgtggtgggtgcctcatttccctgggttaatttacttagttctcacaacccaccaaataatttactactattatcctcattcacaaatgaggaaactgaggcacacaaaggtgaagtcacttgaccgaggtcacacaaatattgagtggagccaggtttcgacccaagcagtgtggcctggggtccaagccccgaccgtcatgttacatggtggaaatgccttctagatgggcagcatcatgggtgacggtgaacacaggtgagggcctggggacatgcccgcagcaccacgccaggccataaggaacacacccaggtggacagtgtgaagttacggtattgtcaacctaaaggaagaaactgagacaaattaatatagggagaggccaggccccacggctcatgtcggcaatcccagctactcaggaggctgaggtgggaggatcacttgagcccaacaggttgagactgcagtgagccgtcatctcactactgcatgccagcctgggcgacagagcaacaccttgtctcaaaaagaaaatacagggagagagcttatttgggccaaggttgagagctgcggcctaggaaacacttccaagttgccttgagaaatgctctgggggagaaaaagagaggcttctgcatttaaaggaaaaaggacggatcaggaaaggggcaattactcaagttgtttttcaggagttctcattggttgacagaaacacttggttagttctcatwggttgacagaaacacttggtgaatgattggctatacattgttgaactacaggccacgagttaccgtgtccaacgtggcatttttagctacatggcgtagctattggtaccagtctggaacccacacagcaggtttcaggagacgatctcccaaggcaggagggggagtggggcgtggctgctgtctcattccagtgcctctgggcctgatcgctgaaagggggctcaccttcctcaggtaaaaagtgtttccttcttatcctgaactccaggtgaaacccttgcatctgcattcaccaccacttgacacaggagaaccccgggccctgcaaggtcgaggggtgaccacggtcatgggccccagggtctgtccttcatgaccattgccccatggagacacccagggccgcccggagcccatgctcagccccgatgttgcattggggaagcagcccctatagagacagtgtcaagggatagctgtgacagctgtgggctctgatggtgcacttgaccccagaaccagaagagcttgattccagtccagtggctcccgttcctcggaggctattgtttttttgttttgtttcgtcttgttttgtttttgagacagagtctcactgtgtcgcccaggctggagtgcaatggcgcgacctcagctcattgcaacctctgcctcctgggtttaagcagttctcctgcctcggcctccggactagctgggattacgggcgcccaccaccacactcagctaattttatatttttagtagagacggggtttcaccatgttggccaggctggtctcaaactcctgacctcaggtgatctgcccgccttggcctcccaaagtgctgggattacaggcgtgagccaccacgcccagcctgaggcttttgtttttatgtaagtttagattkyataaaactttttttttttttttgaaacggagtctcactcggtttcccaggctggagtgcagtggcgcgatcttgactcctcacaacctccgcctcccaggttcaagtgattctcctgtctcagcgtaccagggagctgagattacaggcctgtgccaccacacccagctgatttttgtacatttagtagaggtggggtttcaccatgttggccaggctggtctccaacttatgaccccgtgatcctcgtgcctcagcctcccaaagtgctgggattacaggtgtgagccaccacgtccagcctgaggcttttgtttttaggtaagtttagattttataaaacgtcagcatttttttaaacaaacgtgctaaatttcagcatatttggagaccaccaacacattagcctctgttctcattatattactaatgtgaacctataaaattatcaaaaattcagctcttatttaacatgtagttttatataagatttcatttggaggaaaaaaaatggattctactgtcaaaaagtttgaaatgtactaagcttaattcagttccttttttagagacaggaatagacctagaggtgcagagatgggcccaaactgactggaagccaagtgccccctactctcataagactttctgcttcgtatgaaaagcatgatgtaaattccacagaacttgggggtgggggtgggggcaggggccacataaaaactccataatctctagaattcctattttcctacttacaggtcttactggtcatgtctggtgtagggtggttgctcttgaggggcttttagaaatacacagctaagggcacagcaggggagccctgatttttaacaaatccagaattgtatttaaaaaaaaatacacaggtaaataaacaagctggggctggcccaggtgtactgatttgtgtacttttataggataatatataacaaattgattactggccaatccaagaggggtttttgtttatgttttggggcctttgtttttagagatggcttcttgttgcccaggctggcctcagactcctggactcaagcgatcctcctcccaagtagctgggaccacaggcctgtgccaccacacctggcaatccaagagtttttttacctatcttcttaatttctgtaaaagcaatcagtaacagatactgttggtgaacgaacacgcagcacagctgtgatggaaaaagaatcgtggagggggaatgaggagaaccagtgctcaggagccccagagatgctaaatgggcactttacagccaacagcgctgctcaggtgcttctgcctcccagaagtgtctctcacacacacacacacacacacctggccacccccaaatcagaatatggatcagagggggtgccaagcaaggggaggattaggctggatcctggcgctgaagcataacattgagaagccaaaggctgccattctcccctgctcctctctccctccctttctcaggtgtggtggcctcatccatcttcatttctgcctccaaaacaaggctcccttcctgctggcgagccccctgctgactctcccttgggttcccctctgtgcgctgccctgagccggagcttccatgtctaatgcaacgcaggtgagcccgtccgccaggtacttcttgggtgtttaggtgcctgttgaaaatgggtcctcaattggccgggcgcggtggctcacgcctgtaatcccagcactttgggaggccaaggcgggcagatcacgaggtcaggagatcgagaccatcctggctaacacggtgaaaccccgtctctactaaaaatacaaaaaattagccgggcgtggtggcgggcgcctgtagtcccagctactctggaggctgaggcaggagaacggcgtgaacccgggaggcggagcttgcagtgagccgagatggcaccactacactccagcctgggcgacagagtgagactccgtctcaaaaaaaaaaaaaagaaaaaagaaaatgggtcctcaatcaaagagtgacccccagagtgagcgccatgcctgaggcttagagcagggtcacctcctcctttcaaacaggaatccatgctgaggctggagcctctttagaccmacgtggccccacagcccacagaaccaaggctgaccccaargcttgagctaaagcaaacagtcacgtatatcacgtgttgctatcagatgacttgtgagaagctgccttgtttccagtgctatcagagcccgggtgattctctagcaaatgctttgccgggaaacctggaggtttcttctttcgggattgcttctttgtgagtttcaaacagagtaaaataaaaagtctgccacagaaaattgacatcataattaaaggcccagaggtcggcgtgagactggcatgaggggcagaggaaggacatggggcccacccggagtctccgaccacccccaggctcaagagttccctctaaggactcacggaagtgagtaaagctgtcggacacacggctacaattatgagagtgaacggacactgatgaaaatcagcaacaggacaagatgcacaaggcagggccatccaggagatagcgggctctgctcagagctgccagccgtcctctccccgtggagccctgcggcgcgctggcttctcctggtgacggtgtgcaccagctcgcatggagtatcgccaaccagggaagctcgcccgagccttggcgtccacggttttactggttaatcatgtgtacatggtggcctcagtgtccagcccctccagaggtggggccatcctgtgtggcccaagacccccagcataaatcacgtttgcctagactgtccagcagggcccaaggcccccagctaaacaaagccactctcaccaggcacagcatgccaagggcctctcggctactgcaaagctggagaaaaggccagacttctctttggacaaggttgaacctttactgaacagctgtcctccccacaagaggaactagagcacagaggggctcatctgctgggccaaggtagctaagggcaatgtgagggtctcacagtcaacccaggacctccctaactcaaagctcttccctaactcaaagctcttcccgctacacagcaagaagaagggacttcccagctaaatggtgacatctgctttccactgaatctgagaaaggagaagcttccagaatgagactaaataatttgcagaggagaaggaacagaacttgccttcagaatgtggaccactccccgtaactcagagacaa

SEQ ID NO: 94765 - DNA, 85668 bp, Homo sapiens
gggaagcttgtttgagcccagtaggttgagactgcagtgaattgggattgcaccactgcactctagcctgggtggcagagtgagaccctgactcaaaaaaaaattgctgtttaacaccaccggctcacccttaaattctttcctgggcaaagccaagatccttcccagactaagccccagttttggggctcgcctgcctgtctgcatctaaaccacagccctgcacaaaaaccatcacaaccttacacaaaatactactgtgaaaacatctgcccagtaactgcctgtccaaccttggactgatgcttgttattgactaacccttgttactaattcttgtagcaagggataattgttccaaaacaacttactatgtgtaacgattctcacttttcctttaacccccgccccccctgctttttttttcaggtcaggcatagtggttcatgcctgtaatcccaactctttgagtggccaaggcaggcggtcccttgagcccaggagtttgagaccagcctgggtaaaatggtgaaacctcatctctacaaaaaatatgaaaattagccaggtgtggtggcttgtgccagtagtagtcccagctacttgggaggctgaggcaggaggattgattgagcctgggaggttgaggctgcagtgagccatgactgtgcaactgcgctccagcctgggcaacacaatgagaccctgtctcaaaaaaaattaaaaaacaaaaaacaactcttgttttcctttacctcctcatatgcccgtaggttaatatggtaccatattccacattgcaatgcttactcctgaattaattgattatatttggataatctcttttatttagtttgacaacagaactaaggtagaaagaaatcaactataaatataagagtggaaatcaattacatataaaagaaacggaggaaaacaacaaaaccgaaagctagtcctttgaaaagttcaataaaatatataaacatctcattagcctgataaggtacaaaagagggaagacacaaattgccaatatcagtaataggggacatcactaaggatcctataaaccaaaggtcagcaagctttttctgtaaagattcagggagcatgtttggctttgtgggccacacatgatctgtggagcaactacttaactctattgcagtggtaaaggagccataaaaattatgtatttatatttcaaaaacaggctgcaggatgaatttggcttgtggctgtagtttgccgccccatactatagacattaaaaggataataatggaatattctgaaacactttatatgaagacaatcaataccttagatgaaatggacacattctttaaaagactaaaattgttggggctgggcttggtggctcatgcctgtaattccagcactttgggaggctgaggcagggggatcacctgaggttgaaagttagagaccagcctgggcaatatggtgaaaccccgtctctactaaaaatacaaaaattagccgggtatggtggtgcgtacctgtaatcccagctactcaggaggctgaggcacaagaatctcgaacctgggaggtgtaggttgcagtgagctgagattgcaccactgcactccagcctgggtgacagagtaagactctgtctcaaaaaaagaaaaaaaaaagattcaaattgtcaaaaccaatgcaagaagaattagaaagttcaaatagctctatattagggtttctcaacctcagcactgttgatatttaggttggataattgttgtggggaagggctgtcctgtgtattgcagggtactgagcagtatccctggcctctactgactagatgccagaatgaccacccagttgtaacaaccccaaatgtctccagatgttaccacatgtcccccaagggagggataaaatcaccactgccctatatcattaaagcaattgagccaggcacggtggctcatgcctgtaatcccagcactttgggaggctggggcaggcagatcacctgaggtcaggagtttgagaccagcctgaccaatatggagaaaacctcgtctctactcaaaatacaaaattagccggatgtggtggcacatgcccgtaatcccagctgctcgggaggctgaggcaggagaattgcttgaacctgggaggcggaggttgtgatgagccaagatgtgccattgcactccagcctgggcaacaagaaggaaactccgtcacaaaaaaaaaaaaaaaaaaaggccaggcgcagtggctcatgcctgtaatcccagcactttgggaggccgaggcaggcggatcacctgaggtcaggagatcaacaccatcctggctaacatggtgaaaccctgtctctactaaaaaatataaaaaattagccaggcgtggtggtgggcacctgtagtcccagctacttgggaggctgaggcaggagaatggtgtgaacccaggaggtggagcttgcagcgagccgagatggcaccactgcactccagcctgggcgacagagcgagactcctcaaaaaaagaaaaaaaaaaaagaaattgagaagttggttaataggtacaaaaatatggttagagagaaggaataaattctagtatttgatagtaaagtagggaaattataattataaataatttagtgtatattttaaaatatctagaagaattataatgatcccaacacaaagataaatgtttgtgtttgaggtgatggatatcccaatcccttcataattgatcattatacatcatatacatgtatcaaaatatcacatgtactcccaaaatatgtacaattattatatatcaataaaaatcaccagcctgactttgggaggccgaggcgggcggatcacgaggtcaggagatcgagaccatcctggctaacacggtgaaaccccgtctctactaaaaatacaaaaaattagccgggcgaggtggcgggcgcctgtagtcccagctactcgggaggctgaggcaggagaatggcgtgaacccccgggggcggagcctgcagtgagccgagattgcgccactgcactccagcctgggcgacagcgagactccgtctcaaaaaaaaaaaaaaaaaaaaaaaaaaaaaaaatcaccagcctggccaacatggtgaaaccctgtctctactaaaaatacaaaagaaaaaaaaattagccaggtgcggtggcgggtgcctgtaatcctagctactcaggaggctgaggcaggagaatcgcttgaacctgggaggcggaggttgcagtgagccgagatcatgccattgcactccagcctgggcaacaagaaggaaactccaactcaaaaaaagaaaaaattaaaaaaaaaaaagaaaatagaagtgaagggacatttcctaaattcattttatgaggccagcattaccctgatatcagaatcaaacaaagactttataagaagaaaaaactgcaggcaaatacgactcattaactcagacccaagaatcccaacaatctgggaggccggagcgggcggatcacgaggtcaggagatcgagacaatcctggctaacacagtgaaaccccatctctactaaaaatacaaaaaattagccgggcgcggtggcgggcgcctgtagtcccagctactcgggaggctgaggcaggagaatggcgtgaacccgggaggcggagcttgcagtgagcagaaatagcgccactgcactccggcctgggtgaaagagcaaggctccgtctcaaaaaaaaaaaaaaacacacacacacacacaaaaaagaatcccaacaatatttaaaaagaatactgtatcatcggctgggcgcagtggctcgtacctgtaatcgcagcactttgggaggccaaggtgggtggatcacctgaggtcaggagttcaagaccagattggccaacatggcaaaaccctgactctactaaaaatataaaaattagctgggcgtggtggcctgcacctgtagtctcagctactcaggaggctgaggcagaagaatcgcttgaacctgggaggcgtgggttgcagtgagccaagattgtgccactgcactgcagcctgggtgacagagcaagactctgtctaaaagaaaaaaaatactgtatttgtatcatgaattgatgtgttttttacaagaatgcaaagttggttcatattgaaaagtcagtcaacatgatgcatcatagtaatggaataaagaagtaaaactggctgggcgcaggggctcacacctaatcacagcactttgggaggtgggcggatcacctgagatcaggagttcgagaccagcctggccaacacggtgaaaccccatctctactaaaaatacaaaaattagccaggcgtggtggtgcatgcctgtgataacagctactcaggaggctgaggcagaataattgcttgaacctaggaggcggaggttgcagtgagccgagatggcaccactgcactccagcctggtgacagagcgaaactccgtcaaaaagaaaaaaaaaaaaaaggagtaaaactgtatgatcatcttaacagaaaaaaaaaaaaaacttaaggaaaatcaacaactatcatgattttttaaaatctcagcaaactaggaacagaagggaactttctaaacctaagaaaggacatctatacacatgcaggtacacgcacacacaaaactacagctaacatcatatataatggtgaagtactaaatgctttcttcttaagaatgggaacaaggcaaggatgcctaccatcaccacttacattcaactgtgtactggaagtcctagccagtggaataaagcaaagaaaaaaaaaagggatatagatagaaaagaaagaagttaaagtgtctttatttacaaaagacatgaccatatgcatagaaaacctgaacagatttccaaaaagttaccaaaagtaataattgagtttaggaaggtctcaggatacaaggtcaacagaaaaaatcaattatattttaatatactagaatttttcttttgagacagagtctcactctgttgcccagcctggagtgcagtggcatgatctcagctcactgcaacctctgcctcctggtttcaagttattctcctgcctcggcctcccaagtagctgggattacaggcatgagccaccatgcccaactaatttttgtatttttagtagagactgggtttcaccacgttggcctggctggtctccaactcctgacctcaggtgatccacccacctcggcctcccaagtgctaggattacaggaatgagccacagtgccggccagcctttttcttgaaaaatgaacaaagtgagcctgtcacttcaaggaaaataactgacagtatttgttgccaataagaaaattccaaaattccacattcaaatgccaaataagaaaaagctttcggctgggggcagcgtgagccaccgcgcccggccaagttttgtattatttttcttaactatgtcttctcaaattgcggaagcgttaggccccacaacatttgacatcaccagtagggatccagtggagaggagggacatgatcagaaactgtgtttttaaatgatcattcaacagccaattatcagggtgggtaggagtgaggcagggagatcaaaaggcagggagattggctgggattacaggcattgttaccagaaaggggtcccgatccggaccccaagagaggttcatggatctcgcacaagaaagaattcagggcgagtccgcaatgcaaagtgagagcaagtttattaaagtacaagaataaaagaatggatagtccatagatagagcagctccaagggctgcttgcccatttttatggttatttcttgatggtacgctaaacaaggggtgggttattcacgcctccactttttttttttttttttttttttttgagacggagtctcgctttgtcgcccaggctggagtgcagtggcgcgatctgggctcactgcaagctccgcctcccgggttcacgccatccctcagcttcccgagtagctgggactgcaggcgccagcaacctcgcccggctaattttttgtatttttggtagagacggggtttcaccgtgttagccaggagggtctcgatctcctgacctcgtgatctgctcgcctcggcctcccaaagtgctgggattacaggcgtgagccaccacgcccggccaggtcccgaaacttaagcttcatttgtttcactgcaaatctgcttctgcctacaagcctrgtctcattttcctctacctaaggatcttcctccatgcaatttcggcctaggaggcccttcccgccccttttcgcctagctaactctttcggtactcaaccaccaactcctaatcctccctggtcccccaagtgggctaggggcttcttkggagtccctcgcactgctctaagcatccaggcagagtcattattccgggtgccaggttgctctttttccagcagccttcaggggactcctggctgggcggagtctgtagaggcgcgcggagtcctgggagagcgtcagatgtatttcctttcccttttttcgctcgtgtcccgccgggtggcgctcaccacctccccggaacacgcgagtctcctgtcgcggttccggtcggaattaccccgtggagcacgccgatatggctgcgctgacactgaggggtgtccgggagctgctgaagcgtgtggacctcgcgacggtcccgcggagacatcgatataagaagaaatgggtaaggtccggctgggggcgcaggagggaaaagtgagggtggaaacttctccagtctttccgtttcccggccctctagaacgcctagcgtctttcccaagcactccacggaacgtccttaggcacctccctctctcgtcttttccgtcaccgcctctgtccgcactctatgtcccgagcgttagtgtcttccacttgttacgtctgcagtctcctgactccgcccaagttgcgtcatcaccttcgccttcattcttttagtgatgtcactgtctcttgttccccagctgtgtccacctacctttctgtcccccactcccccttttacttccctccctcccctccccctttcccttgcccattcttccyccacatgacttctcctttcctcattgattttccagcccggtcgccctcacccctcggaaaataccatagcgaccttgcctgcactcctgggtctccgccgccttgcaggaaaggattcagccccttcctcaacctcgagctgcctctggcgaccgggcaaggttacagcgaccaccctgtccatactgccggcccaaaccctggcaaaaggtgcaacgaatcctctcatcctctggactctccttgcttctccagagaccctttttcttgcctcactggaagccctggaatttcttctatgaccggcacgcccccctgcccaccccagccgattccctcgccacctccaccatctcttccacccccacaaccttcctcgcactcagggagatggtcttttgagtcctcttccccactcctggaaaggacctactgccgctagccctgccactcgggttccccactctccagcccttattttgagcagttcagcattccggggtcaccccctctctgtcagcggacaccttattgcagctggatgagtccctccagaatgcggcgtccctgtcttcaaggcacgtactgtgaccagcacactaatctctgttactctagcggatggccttcagcttttrgaaccagcccggcaacctcctttccccttgctcatcagtccccgggaacgagcccagtgacctcccctcagctcactcatgtacccttggaaactggacccatgatttcgcctcctcctacacataggaccccgggaacttgcctcacgatttcacctcctcttgctcgccggccggtggaaactagtcctatggcctccccaaccctttctcacagagttttggaaactgggctgatgatctctctgccctctcactggttctcagggagaagttataatgacccccttctctccccagcatcttccccacctactggcagcttttaccatggcagccttaagcctctagactcttgtgaacccaaaccacagcttgacctgccccttgagaaaaattgttgtggcttcccactctcttctcaggcaggcatgcctggctctcycagctcacctcaggagggctcttatcattactcccatctttcctcagaggcctacatacctacccctgggagtccttgctatgccatctgcctgtgccccgggagtactgattctccttgctcaccccagtcccaggctcccaggaaggcttgcattgagtcccttctctcctgggaggcaactgggaactcttacctcatcctaaccccggacaccacaacttctggtcccccctgttcccaggaaccatctcgtccccatggtcctcattctgtcctttccttcccttcacccctgggcaaccagtttatatctccaccccagtcacttccccgcagaagctataatgaaccccctcttcccactccagtttccccccaaccgaagtcccctaagtccccagagttaagacagtcacatactccccacaaatgtctctccctagtcaacactccccagcacaccccttctggccagcccaagcccgctaaggcccacacctgtcccccacctccctcctgcctctctggtccttcttgtatgcagccatacatcacaactccttcaaattccagccccaaagaacttcccccagggactaccttactgactgtggtccctagagctctcaaaagtgttatccccacttcttttcccctctgccttccttgtgatcctgtctcggccaatagttatgctcagagcagccgccatggaccctccatagggcccccctgcaatacccatatatgctctgtggttccctccaccccccatccctgcccactgtctggctccctcaatcattcgacaggcccccctcccattgtgcccctgtgtgacacctatagcactcccaggggcccaccccaacctcgttgtcagcctgtgatgcctccttgttctacccacatctattcttttatccctttgagaacaccctttgatcctcaaagtttacccattgtccccygagtccgggcctaccctgatactgtcccctgtggcctccatatctaccctgtggcctctcaaggcccttgcaaagagcctctgcagatcccctacagctgccctttgccttcatccaaggattccagctgtagcaccaatcccagctgtagttcgactattattagcaaatgccagagtagtgacagcgagagcaggagttcccaccaaagccaaagccggagccaaagcaagagtccccatgatggcagaagtcagagctggagcaagaggcatcatctgagcagaagtccaagtcagaaaagcagtccctatcctagcagaagctggggccggagcagtaatcctcaacaaaacacaagtcagggccagagtgagagtccccaacttagcataaatgagcaccagggtgagagtccccaaattagcagaggtcagggcaagagcaagagtctatgatggcaaaagtcggaaccggagcaagagtccccaacatggcaaaggtcaaggccagagcaagagtccccaacatagcaggagccagagcaagagtcccagcgaggcaaaagtcacagagcaagagtcctcaccataacaagaaatgagggccagagcaaaagttctgaccagaccaaaaatctaggccagagcaaggcatagatagtaacaagattgccagctatagcaagcatcccagctgcagcaaccaggaccgacttgtgcactcctcatctgaagtcttcatttctcttttactctgcctccttgttcttgtcctcttgtcccctgctacccccatagcagtcatcctagaagtccctgttttggttcacacctcaagattctgtgggccctccttatccaacctttctggggtctgggaactctcccagcatgaccctcaamcctctgattctaagcatggtggtgctagtcactgtgtgacgctaggtaagttacccayatctcttcatcaaattgaaatgttgttaatttttttttgtatcttactgagctatcagttgtagtgctcacataagctagtagacatgaaagtgctttgaaaatagaactgttcagaagaaaagggccttttgcttttaagttcaaagcttcccagagcctccatagtttctcctaatcttctgcaggctctcctcaagagtcctctcctgagctcccatattcctaagttcctctttctccaaggtcccccttcttgatgacccccgcacagtaccgtgagagttacatctttatctgacaaccctgggatgggaaggcccactctccactacttttccctctcacacttctctggcaggcaggcaggatgcaaaagcaggagtgggcactagctggatccaagtttgcccctaggctcygaggtgggggtcaggtagtagggggtagagtcaagactgggaaaaccaataagcctgtcctctctcttttaggctgccacagagcccaaattccctgctgttcgactggctttgcagaattttgacatgrcttacagtgtgcagtttggagatctttggccatcaatccgtgtcagtctcctctcagagcagaagtatggtgcactggtcaataactttgctgcctgggatcatgtaagtgctaagctggagcagctgagtgccaaggaytttgtgaatgaagccatctcccactgggaactgcagtctgagggtggccaatctgcagccccatcccctgcctcctgggcctgcagtccgaamcttcgatgcttcacttttgacagaggggatatcagtcgcttccctcctgccaggtaggatctggagccatgactggagyggtcctgagtgtctgctggaagtagacatgttgagacccagcttctaccctctgtaataaggaccataatattgctaatatttatggcatgtttatacaractaggcatttttttgaggtgctgtacatatgttatctctttttgttctgtcagcagccttatgaagtaggtaatattattgctgttttacatttggagaaactgaggtacagagaagttaagattcttacttgctttaggtccctcagatggtaagtggtgtgactaatatttagacccagaacctgcactttgaacccactctgctctgtgcctctggtagaaaacagccaccttttacatgagcactcactgggccctctcaagttgaaatgtgttattcacagcagtcttctcattttgccctcacagccacccatcaaagtgaataggaaaagtaacttcatggtagcaaagaggtagtgggactttcctaggaaatagggctggtctaggggcacaaacttggtattagactgggaaaaagaaaggagaagttcagtttcttgattcaatcctcatgtatatgaagttgaatgagaaaagactgcagaatcaaatgctgaattatgctttaacaattaaggagagctcaatgttagttgtagggtatgggaattgatttttgaaagactgatttatttattaaaaaatattggccgggtgtggtggctcacgcctttaatcctagcactttgtgaggctgaggcgggcggattgcctgagctcaggagtttgagaccagcctgggcaacatgatgaaaccctgtctctactaaaatacaaaaaaattagctgggtgtggtggcgtgcgcctgtagtcccagctacttgggaggctgaggcaggagaattgcttgaacccaggaggtggaggttgcagtgagctgagatcgtgccaccgtactccagtctgggcgacagagcgagactctgtctcaaaaaaaaaaaaaaaaaaaattatctaccaaatgctaggcatttaagtgccttgatgaacaagccctcatagagcttccagtttagtgaggaagacagctatttaaaaacaataattggccaggcacagtggttcacacctgtaatcccagcactttgggaggccgaggcgggcagatcatctgaggttaggagttcaagaccagcctggccaaaatggtgaaaccccatctctactaaaaaatacaaaaaattagctgggcatggtggcacaagcctgtaatcccagctacttgggaggctgaggcaggagaatcacttgaatctgggaggcagaggttgcagtgagccaagattgcgccaccgcactccagcctgggcaacagagcgagactgtgtctcaaaaaaaaaaaaaaaaaaaaaaattagccaggcatggtggcgggcacctgtaatcccagatattcaggaggctgagacgggagaatcacttgaacctgggaggtggaggttgcagcgagacgagatcgtgccactgcgcttcagcctgggtaacaaaagtgaaactccgtcagtcaatcaatcagtaaataaataatcattctggctcccgtatagatgaatgaataagtgaataagtaagtgtgggtctgaaaaatgagtttttggtgattggagctcaagccccagagggcatagacttggtggcctagactcccagtgggtgtcctgacctggaatttaacaataaagtggtctcctcttttccagacctggcagcctgggtgtcatggagtactacctgatggatgctgcctccttgctgcctgttctggccctcggcctgcagcctggggacatcgtgcttgacctatgtgcagctcctgggggaaagacactagcgttgcttcagactggctgttgccgtaagtcagggtgctggtgtgttgggcagagagagctccccacctcacctagtcccaggtacatttaatatggtaggttcggccaggcgcagtggctcccgcctrtaatcccagcactttgggaagccgagggaggcggaycacctgatgtcaggagttccagaccagcctggtcaacatggtgaaacaccatctctactaaaaatacataaattagctgggtgtggtggtgcactcctgtaataccagctactcaggaggctgaggcaggagaattgcttgaacccgggaagtggaggttacaatgagctgagatcctgccactgcactccagccttggcgacagagtgaaaccctgtctcacacacacacaaaaaaagaatatggtaggttctctagtcccaaagtcagagtggagggtagtacttactttctaagcttgtgtattttttcattagttcctctctttctctgtcaattggtcaagaaagattgctgagcaagttctctgaagtcagattgaagtagggctctgatcagttgatcacatgatacacactcctcttcatctgtttacttttcctctaagattaagcccatttctttagcctaccaactaaaatgataagatctgcctgcagccaccatttatatgctttatatgtcactcttctaggctttatgtgctttaaccttactctgctactctctgttgcctttgctcttgttaaattttctccctggaattccctcacccttggctgtccaaatccttttgactttctttttttttttctttctttttttttctctttttttcgagatggagtctcactctgtcacccaggttggagtgcagtggcacgacctcggctcactgcaagctccgcctcctgggttcacgccattctcctgcctcagcctccctactagctaggactacaggcgcccaccaccacgcccagctaatttgtttttgtacttttagtagagacagggtttcaccctgttagccaggatggtctcaatctcctgaccttgtgatctgcccgcctaggcctcccaaattgctgggattacaggcatgagccaccgcgcccggccccttgtgtcaagtactcacttcagccatccactggctgatatcctgcctgcccagtcatccttttgactttcaagcctcagctcaagtgtgccacctcctggacgtctgtccttacgacctctgctggccggttcagaaatgatgcctgtctcctacgctcccacagcatgggtatcgcccttgcaacattagccttgccttagggctttactagttatatatcttctccctcttaaagatgatggattctggccgggcacggtggctcacgcctataattccagcactttggaaggctgaggcgggtggatcacctgaggtcaggagttcaagacaagcctggctaacatggtaaaaccccgtttctattaaaaatacaaaaaattagccgggcctggtggtgggctaatcccaactacttgggaggctgaggcaggaaaatcgcttgaacctgggagatggaggttgcagtgagctgagatcacgccattgcacttccgcttgggcaacaagagcaaaactctgtctcaaaaaaaaaaaaaaaaaaaaaaaaaaagtggattccttggggataggcccacatcttatttgtctcagtaaagtagcccagcgaaggccttgtgcactgtttttttttttttttttttttttgagaagaagtttcgcttttctacccaagctggagtgcagtggcacgatcttagctcaatacaaccttcgccttctggttccaagcaattctcttgcctcagcctcctgagtagctgggattacaggcacccaccaccacacccggataatttttgtatttttagtagagatggggtttcaccatgttggccaggctggtctcgaattcctgacctcgcaatccacccacctcggcctcccaaagtgctgagattacaggtgtgaaccaccgcgcccagtcttgtgcactgttttttttggtttgtttttttgtttttttttttttgagacggagtcttgttctgtcacccaggctggagtgcagtggcgtgatctcggctcactgcaaactccgcctcccgggttcatgccattctcctgcctcagcctcccagatagctgggaccacgggcacccgccaccatgcccggctaatttttttgtatttttagtagagatagggtttcaccgtgttagccaggatggtcttgatctcctgacctcgtgatccgcccaccttggcctcccaaagtgctgggattacaggcgtgagccaccgcgcctggcgccttgtgcactgttaagtactcacttcagccatccactggccgatatcctgccttaaaatagatagtttttttcctttggcccctgacaaagggccgtaatttacacacctaacctggagctcagccaggcttctcttgccgtgtgcccaagcccttctgttggacctagacccttcttttccaggtcttgtcagccagcttgcacagtttgagtcagcatccagccttatgataggcattggttgattcagagagatatcacattcggtcatagccttctggaagtccagagggagagaagaaaaggtggggtcatgggcttaatgaatccaatgcaagagagcccagcctgtgtgctggacmattcttatctgactgaatgctgtgggaatccattagaagggagatgagtaagggtagggttacttggaggaggaggaacttgaactaggaggaggaagaagggcaaagaagaagtaattgagagttgttcttctaaggcatgcttaactatcagcacctcaccttcatcccagctcctcatcaagcgacaactcttgatccgaggaaaacgggatcacagaatttgtataagaagggaaattagtgtttacttagtctagccctcatattttatggagggagaaattgagttctgtggagattaaataaataatacaagaatkggaggtagagccagaactggaacccatctttctttttytcagttcatatccttctgcaaattcctctagagcagagaatacmatttttacttctttgagygccctcaaaaatggagacattggccggggggyggtgactcacgcctgtaatcccagcacaagctaggaggcygaggcaggtggaatacttgagtccaggagttcgagactagcctgggcaacatagacctcatcttcattaaaataaaaaaaaaggagacatttatttatgggattactaagctggttcatagtagtgaccactattagataaggtggacacttgcatctcgcattctttaccattcccaccctaccttgttgttctttgactcagaggccaggtatcaagtgtcatttatcatcaagcttgcaatatttttctcatagtagcactaagagcaaagtgagatatttcttgaactcatgtctaccaataaagagaaaatgaaaggtagatggtaaatcagaattaggtttggttgcatttgatagaaaacctractaattggcttaaagaggaaacattaatttatctcttacataagagaagctgagatataggcactccaggtatggaggctccacaatyatcagggacttaagctccctttttccttttgcaacrtattttgttgctagtgtcagccttagcctccctccctttaagagggagaagatatgtaactagtaaagctctaaggcaaggcctcatggtccagaatgactgctggaagtccagccatcacatccatatttgagtcaagaggaaaggattgggcaaaagagactcatttcatctcccaattatgtcagccttttaaaaatatcttcccagaattcctatccaatacttatgcctacaactatgaccaaaagttagtcatatagtcatacttagttgtaaaagaaaggcttagccgggtgtggtggctcacacctgtaatcccagcactttgggaggccgasgcaggcagatcacctgaggtcgggagttcaagaccagcctgaccaacatggagaaaccccgtctctactaaaaatacaaaatttgccggcgtggtggcgcatgcctgtaatcccagctactygggaggctgaggcaggagaatcgcttgaacccgggaggcggaggttatggtaagccgagatcgcgccattgcactctagcctgggcaacaagagcgaaactaaagaaaggttgagaaatgtagtcttttggggcaattttccccttccaaaaaattggggttctattaataaggaggaagaggagaatgattttggstaaataaactgtagtatctaccaaagatgaagagagccataggtttccagaatagtgggagagcatatttttttagaaataaatattcttggctgggcatggtggcccacacccatcatcccagcactttgggaggctgaggtgggagaattgcttgaggccaggaattcaagacctacctgggcaacatagtgagacccagtctctttttttttttttttttttttttgagatggagccttgctctgtcgcccaggctggaatgcagtggcgccatctcggctcactgcaagctctgcctcccgggttcacgcctttcccctgcctcagcctcccgagtagctgggactacaggtacccacccccatgcccggctaattttttgtatttttagtagagacggggtttcaccatgttagccaggatggtctcgatctcctgaccttgtgatccgcctgccttgtcctcccaaagtgctgggattacaggtgtgagccaccgtgcctggccttccagtctctttttaaaaaattatttaaatatatttttatttttgtagaaatgaggtatcgctatgttgcccaggctggtcttgaactcctgggctgaagcaatccacctactttggcgtcctcccaaagtgctgggatgagaggcgtgagccactatgcccagactcagagaccctgtctttaaaaaaaaaaaaaaagaatgtggctgggtgcagtggctcacacctgtaatcctagcactttgggaggccaaggcaggcgggatcacctgaggtcaggagttcaagaccagcctggccaacatggtgaaatgctgtctctactaaaaatgcaaaaattagccgggtatagtggtgcacacccatagtcccagctactcaggaggctaaggcatgataatcacttgaacccaggaggtggaggttgcagtgagctgagagtgtgccactgaactccagcctgggcgacagaatgagactctgtcttaaaaaaaaaacaaaaggaaagagagggagagaaagaaaaggagagaaaggaaagggaggaaaggggagagggaaaggagagaagaaaggcraaagtaatggggaaaggaaaaggggaaaggggaaagaaaggggagaaaggggagagaggacaggaaaggagaaaggaaaggagtcttacttggtctgctttattcattgacttaaataactttgatactttctggcccatttaggtgtttgccattgtacccccactcagaatgactgatgctgtgccatgcacataataaatgttcctgatgctggggtttgcattggctgggactrcctgagaattggtctgactccatcagygccattgctggtggaatgtttcrttgggycatggcctctgaagtatctttatttccataggcaatcttgctgccaatgatctctccccgtcccgaatagccagactacagaagatccttcacagctatgtgcctgaagagatcagggatggaaatcaagttcgagttacctcatgggatggcaggaaatggggagaactggagggggacacctatgaccgggtgagtgattcttgatttargacatgcatccagcttaatgcggcctccccatcctggttctagggcctgaggggttaggatccagcccctatgtttgagcatgtagagctgtttctggactggccagttctacattggtgatttgaccaaaagaaaaatcagcttagatgactggttattatctctattaaagatagttggcagcaaaaaagaatttgaaactatttgagtaggggaaaaatttactaggcttactttatttctcaagtcacttggttgctcagaaagcctcatgaaggtaagtaagaataagctcatttatttatttttgaatgttagtacagcacatggtacaaaattcagaaggcacaaaagagtatccaatgaaaagtgagtttttctcatctggcctgtagccccctacttccccaccctatagataacgattgtttcttttttttttttgagacggagtttcgcttttgttgcccaggctggagtgcaatggcgcgatctctgctcactgcagcctccgcctcctgggttcaagcaattctctgcctcagcctcccgagtagctgggattacaagcgcccaccaccacgcccggctaatttttgtattttttttagtagagacggggcttcaccatcttggccaggctggtcttgacctcctgacctcgtgatccacccgcctcggcctcccaaagtgctaggattacaggcgtgagccactgcgcccagccggtagtatattatattatactcactattctgaactttgtatttttttatttaataatgtgtcctggggttaaatccttttttaattttgttgacattgtggaagtatagttgttgaataacagtttacatccatttaagattttgatagcgattgctaaatttctctgtggaggttaaaccagtttcactcctactggtaatgaatgagtactgatttcccacatgctgccaatattggtgctatcaaacttaatttttttgccaaatggatagtatctaatttacaatctcttattaatcatgttgaaaatctccatattaatttttttaaagttttttttttttgagtggcaggttttcactttgtcacccaggctggagtacagtggtgtgaacacggctcactgcagcctcaacctcctgggctcaaggggtcctcctgcctcagtttcccgagtagctgggactagagtgtgccaccatgcccagcaaatgattttttgtagagacggggtctcactatgttgcccaggctggcctcgaactcctgggcttgagcagtcctcccaccttgtcctcccaaagtgctgggattataggtgtgagccactgtgctgggccagtctcttcatgtttttaagttatttattttattttaaatggcatactctaaaaatatttgtttagaacacatatttctaaaaatatataaaatatatagctgttgtctctgtgttgtcacctgatttacctaatctgtctagttctcaccattctgcctcaaccactctaagaaactgaaagaaagaccaaggcttatggaatcttagataggcttgagacttgctttctgcctgtgtaggaatcccctactcatttttttcttttttttttttgagacagttttgctcttgttgcccaggctggagtgcagtggcgcaatcttggctcactgcagcctccgcctcctgggttcaagcctgggttcaaagttcgattctcttgcctcagcctcccaggcagctgggattacaggtgtgtgccaccacgcctgactaattttgtatttttttagtagagacggggtttcaccatgttggtcagactggtctcgaacacctgacctcaagtgatccattagcctcagcctcccaaagtgctgggattataggcgtgagccactgcgcccggcctattcatttttcttgatatgagagcagtggaacatgatggagagagcatgacctctcctgtcagcctaaccagtttctacattacaggggtgctacttactaaccttaggcaaactgttgatcttgctgaacttcaacctcttcgtttgtgaaacagggtaatcctaccacttaggattattgtgaggattcagtgagagtatccagggaaagcacttagtatagtacctggcggtgaagattaggcaagcaggacccattatcattattcagcctatgcttaaacacatccgttgatgggtgcacactgagattctgttgttgaacacttacaatgttaggaagttctgcctcttactgcaatctgtagatagcatggtatatgggttagggcaaggattctggagtcagactgcttggattagtcctggttccattacttatcagccagagaagtttcggtgagttacttaactttcagttaagcttcagcttcttcatctgtaaaatgaggataatagtatagtgcctatcccgtaggtgaaaattaaataagaatgcatttggcacaatgtctggaatatagaaaacattcagtagtagtataatcatcacaatccttaccattattattattatttccattcattgatcctagctacttattttagaacaatatagaatgagtgacctgctatttcacttgacagctttaatgtttgaagatgtctttgttaacttgtttgttgaaaaactagttgtggccgggcacggtggctaacgactgtaatcccagcactttgggaggccaaggtgggtggatcacctgaggtcaggagtttgagaccagcctggccaacgtggtgaaaccccgtctctactaaaaatacaaaattagccgggtgtggtggcaggcacctgtaatcccagctacttgggaggctgaggcaggagaattgcttgaacccgggaggcagaggttgcagtgagctgagatcgcgccattgcattccagcctggggaacaagagtgagactttgtctcaaaaaaaaaaaaaaactagttgtgtacaatatactctgtggtaggcaagtgttaagcacttttatttatttatttgagacaaggtcttgctctgttgcccaggctggaatgcagtggcgcaatcatggctcactgcagtcttgactttctgggcttaagtgatcctcctacctcagcctcccaagtagttgagactacaggcatgtgcaccatgcctggctaattttttaactttttgtagagatgaggtctcactatgttgtccaagctggtctcgaattcctgagctcaagtgatcctcctgcctcagccccccaaagcattaggattacaggtgtgagccaccgtgcccagccgtgttaagcactttagatgcaaagaagaatgctacttcaaggctgggcgcggtggctcacgcctgtattcccagcactttgggaggccaaggcgggcggatcacgaggtcaggagatggagaccatcctggctaacacggtgaaaccccgtctctactaaaaatacaaaaaattagccgggtgagatggcgggcgcctggaatcccagctactcgggaggctgaggcaggagaatggcgtaaaccctgtggggcagagcctgcagtgagccgagatcgcgccactgcactccagcctgggagacagcgagattccgtctcaaaaaaaaaaaagaagaagaagaagaagaatactacttcagggctctacatactcttggtaactccatccttctcccgctccacttgtccatcagctggagaagggacaggacctcagagctctgcatgttcatggaagacactaacccccccatgtcacaactttcttttttatgtgagctcaagtttatttcaaataatacaatgtttatttgaacatgtttctatcttcccttataatacaatattatacaaattgatattaatacaaataatatttgttagacacttgcccagggctgagattcagtgggagcactatcctggcacgactggttatttatgactgacatccatgccagtgcctgatgtgaagatgcatgtgccatatctgatgttgagtggtttgactaccctccctaaatgtttcctaagtgtagtgcaacagtacaacttccttttctttcttctgtgactgagtgagatcaacatatttttttatttttgagacagggtttcactcccatcgcccaggctggagtgcaatggcacaatctcggctcactgcaacctctgcttcctgggctcaagcaattctcccgcctcatcctcccaagtagctgggagtacaggcaygtgccagcatgtccagctaatttttttggtattttttgtggagacggggttttgtcatattgcccaggctggtctcgaaatcctgggctaaagccatccgcccgccttggcctctcaacatgaacattttccacagttaacactactgaaacaatattagaaatatattagaaccaagatattcagatatattgccatcgatttatagtccccttgaaattacatagctctgctgtttctctgcattaggggctcaggagtccagcggtcctaagtataccttgcagccatcttcctaaaagttctgaccatgactgaggacactgagaaggagtaaggaaagagtctgtagacatttcctcctttttgggttggggaaactcctacagcttttttttttaaaggattgcagttatacctttgctcatccctttatatttaggtcatttccttttaggtgtatctcttatatgctgcatagacaggttttgctttgtgagccaatctataaattttattcttttcattgctgacttaagcaattgatgccattgatgattttggtctcagctctgtcaaattattatcattttatttatttattttttgagacagtctcgctctgttgtccaagttggagtacagtggtgccatcttggctcactgcaacctccaccttccgggttcaagcaattcttgtgcctcagcctcccaaatagctgggattacaggcgcccgccaccatgcctggctaatttttgtatttatttatttatttatttwttttgagacggagtctcgctctgtcacccaggctggagtgcagtggcgcaatcttggttcactgcaacctccgcctcctgggttcaagcgattctcctgcctcagcctcctgagtagctgggattacaggtgcccaccactgtgcccggctaatttttgtatttttagtagagacagggtttcgccatgttggccaggctggtctcgaactccttacctcaggtgatctgcccgcctcggcctcccaaagtgctgggattataggcatgagctactgctcctggcctaattttttttttttttttttttttgagatggagtctcactctgttgccaggctggagtgcagtggtacgatctcggctcactgcaacctgtgcctcctggatttaagcgattctyctgcctcagcctcccgagtagctgggactacaggtgcgtgccaccacacccagctaatttttgtctttttagtagagatggggtttcaccatgttggccaggatggtctcgatctcttgaccttgtgatctgcctgcctcggcctcccaaagtgctggaattacaggtatgagccrctgtgcctgacacctgtcaaattattttactgtgtttatttaccatgtttctttcactgtggggtctctgtccttgctgttttgtttttcttttaacttcttttgttatttaggaaggtttatattaatattttaattctacattggataattcctatatcaaaactattgttgacaatcagttacagatggaacttcgtctactctttctccccttctcactcctgctctttctccctttctcactccagcagttgactagtctcattgaaaaaacaaattggggccggccaggcatgatggctcatgcctgtaatcccagcactttaggaggctgaggcgggtaaatcacctgaggtcaagatttcgagaccaacctggccaatatggcaaaaccccgtctgtactaaaaaaatacaaaaattagctgagcgtggtattgtgcgcctgtagtcccagctacttaggaggctgaggtgggagaatcgcttgaacccgggaggtggaggttgcagtgagccgagatcgtgccattgtgctccagcctgggtgacagagccagactccatcccaaaaacaaacaaacaaataaactgggaatttagttttactggttgctgtttctgctgacttgctcaaggagtcgtgtttccttttaagttttgtggttatttttgtgtcctgtagtaagcttttttttttctttttcgaggcgaagtctcactttgttgccaaaggctggagtgcagtggcgcggtcttggcttactgctacctccgcctcccaggttcaagcaattctcccacctcagcctcctgagtagtagctgggactacaagagcgctgccaccacgcccggctaaatttttttttttttttttgagatggcgtcttgctctggcgcccaggctggagtgcaatggcgcgatcttggctcactgcaacctctgcctcccaagttcaagcgattctcctgccttagcctcccgagtagctgggattacaggtgtgtgccaccatgcctggctagtttttaaattttttgtagctgggactacaggtgcatgccaccacgcccggctaattaaaaaattttttttgtgcaggtggggtctcactatgttttccagactgtaataactttcctattggagtataatacagaagtgaccaaatcataagtgtactgtttaaagaattatcttatagttagtctgggcaacatagcaaaatgctgtccctacaaaaatacaaaaattaggccgggcatggtggctcatgcctgtaatcctagcatttcaggaggccaaggcgggcagatcatgaggtcaggagatcgagaccatcctggctagcayggtgaaaccccggctctactaaaaatacaaaaaattagccgggcatggtggcaggcgcctgtagtcccagctactcgggaggctgaggcaggagaatggcgtaaacccgggaggcggagcttgcagtgagccgagattgcgccactgcactccagcctgggcgacagagcaagactccatctcaaaaaaaaaaaaaaaaaaaaaaaaaawatatatatatatatatatatatgtaaattagtctggagtggtggtttgcatctatggccccagctactcaggaggctgaggtgggaggattgcttgatcccagggagtttgaggctgcaatgacctatgatcacatcactgtactccagtctgggcaacagagcaagatttgtctctaaaaattaaaaaaaaaaaaaattatagttacttgtgtgttagttttgggtttttgaccagccatgaatattcccaaatatactattttccactcattatttcacaattgtctaccaagttaaaatgaagaactttgtcaggtactctgcaaaggagggatgggcagagggaatatttcacaaacttaggccaggggcctaaaacatctctggcctaaggaagagaagcctataaggatctttaatactttaccctttaacactctgggtaggtgctggtggatgtgccctgtaccacagaccgccactcccttcatgaggaggagaacaacatctttaagcggtcaaggaagaaggagcgacagatattgcctgtgctgcaagtgcagcttcttgcgtgagtgacagatttttaaactcaggactttgtgccagagtgctctgggagactgggggactggaagctcttaccaagaccataacmcacacaagaatcttatggctggagatctgcctagaggagacagaaatgggatcatctctggaacataaaaaccctatttgaattagctgggtgtggagatgcacacctgtagtcccagctactcagggggctgagggaggagaatcacttgaacctaggaggtggaggctgcagtgagctgagatcgtgccactgcactccagcctgggtaacagagcaagactctgtctcaaaaaacaaaaacaaaaacaaaaaagcaaccctatctagtaggatatatatactagagtgggctgcacagattgactcatgctatttcatcctcagtaccagtgagtagcacatgtttgaaaaatagctgctagagtaaggactcattctatagccagcatagcaatttggtccataaacaagagctcagggggtcattgtaaggagacttcctagtgaagagctcatggagtaaggttgggttgctatctgccttgagagtgacttttcagacagtgtcattgtggaagggacttgagaggcagtctaaccagctacccwtcctgtagtagccttcccttatccatgtttccagctccttatgttgctcttctactgctgggaagctcactagtmactgcttctgtctctttctggtttcagggctggactccttgccaccaaaccaggaggccatgttgtctattctacctgctcactctcacacttacagaacgagtatgtggtgcaaggtgccattgagctcctggccaatcaatacagcatccaggtacaggtggaagatctgactcacttccgaagggttttcatggacacattttgtttcttctcatcctgtcaggttggggagctggtartaccaaacctcatggccaattttggcccyatgtacttctgcaaaatgcgtaggctgacatagtatcacccaatccctgaagcaagaatacaaagggtatactctgttggatgcaccagaaactggaaactgggaccagtggcagagatgcactctcggtcctgtctccatcctgttcgtgtctttctgcagttttcggcaataagaagtagaagatttgctgtcctgctgtccaattgtggagcatcagcaggtttccaactcactcattamcccctaccccatctccaggcctgtactaaagtttgctgccygcttaggggcttagaaggagaagccagtgagcaggctcacactaagttgtaaacataggagaagcatttggccaataaagttgttgaaactctatagacctggggctgcagttggggacttcatgtcagtgcaaatgccattagttccatttgtaccagccagttactgagcccctgtcacccttgaagtgagttccacctgaccagtcttgagcagccaacaggctcaattaagcccgcctggtttttccatatggctcatgatctaatttaaggaacaagtaactaaaaatgttaagccagtgcaaaataatctgcttacctactcacattggaaaaaccctctgagctgaataattctggccattcctgctgtcaacaatactgctgcccaaatgtggcttaggaggctgcttctgccacaaaaccgtcatactcttgtgcgtgccttgttctttgttcattcatctagcaggtattcccagacctcgtgtatgacaggtagctagggagctcttggagatgtagcagttgggattgtgggagattactgggcttcctcatcctttagaatggtaactctccttttgctttctgaacacctaggaatttcctgatgttttgttttgttggattccagactttttgttgtttctagtctgcagctgagctctggtgcctgttctttggcccaccccctaatccctaactcttccctcagcatcacagggcttcactgcacacactgtgttcagggcaagatttcatcatttactgactgcatactcgatatgttgtttttgtaactttagccaaaagaaagtaacctttagtggcagggatataaaaaattgctcagggtcacttgcagatattttatttttaaactttttttttttttcctggaaaacatcctgtgcagaaaagggtatataattttagaatacctgaaggcttcttggcttttccactttccttattcctcctcttcctgccactctttttgtcccttctgtctttcctgctcatccttatttgggtattagaggtgtcagttgaggagggactttagctgaggttaagccttcttttgggatttgcattgtaattgagggccctggaagatctctgagactcaaaatcaggtgaagctaggaagatggagctttaaggagcatggctagtgctctgagtaggaccgtaaccgcctccgtgcgtggcatatggtccctgcatgctgttcactctgtatagtacttagtattcgctgaggctaagaggcctcaggtgcctgggcttctgcccttggactcctggatatccagcctagtgctaattgaatgctaagcagtggtaattcaaaatgagagggtcccctgcctctagagtcatcatctaattggggacaggcagacctagataagaaaagcagagaactactttggaaaacagtttatctgctgtaattgaacattcagctaccctataacccagttaatccaatactggggataaatcctagagaaactcatacatgtacaccaggagatgtgtacaagaatattcatagcaaccctattcacaaaagcaaaagcctagaaataacccagatgcccatgagcaagagagtggacaagtaaactggaatattcacataatagaacattatacaattgtcaaatgaactataatgatacctaaccatatggatgaatctgagcaataaaataattaagtgaaaaaagtttaatcccagaagagtaaatgtagcatgatgccctttctaaatgaaaggttttttcttttctatggagttattctttacatacaatatagttcataaattttaaatatattgtttaataaattttgataattgtatataatagtatagtcaccatcaagatgtagaaaatagaaaataggctaggcacagtggctcacgcctgtaatctcaacactttgggaggccaaggtgggaagatcacttgatcccaggaattctagatcagcttggacaatgtagtgagacctggtctttaccaaaaaaaaaaaaaaaaaaattagctgggtgcgctggcatgtgcctgtggtcccagctactcaggaggctgaggcaggaggatcacttgagcacaggagtttgaggctgcagtgagcagcctgggcaagagagtgagactccgttttgtgccactgcactccagccagggtgacagagtgagactctgtctcaaaaaaaaaaaaaaaaaaaaaggcattgggatttataatgtgctgtttaaagtctgaagctcggccaggtgcggtggctcacgcctgtaatcccaaaactttggaaggctgaggcaggtggatcacctgaggtcaggaggagttcaagaccagcctggccaacgtggtgaaaccccatctctataaaagtacaaaagggcatgatggcaggtgcctgtaatctcagctactcagtaggctggagcgggagaactgcttgaacctgggaggtggaggtttcagtgagccaagatagcgccattgcactccagcgtgggcgacagcaagagacttcatttcgataaataagtaaataaataaataaagtctgaagctccactggtcactccttttattgattatttgcagctggtctaaccagttacrtatgtctggcttgattmcatggccagagcaacataaaagccctgctgggaacttctgatttgagctcttccaaaaccaggatggatgcctcacatagatcatgatgattcaatccaaaggcactttgcagtgcagtccacatgtgcataaggaccatggggagcttgtatttgggaattctgagattcctgatgtttacctacctagtctttctcttgctgccctgtatcctttgcctttaaataaaaatcttaagtgattatgctctgtgaagcctggataatcctttcaaatatttggtcttggaaaatttttgcatatatacatggaatcatacaatatgtagtctttggtgtttgacttctttgacttagtgtaatgtttttgagattcagtttgttgtgagtattaatgttttgttcctttttattgctgaattgtattccatggtgcagacataccaccatgttgtttatctgttcaccagttgatggacatttgagttgcttccagtttggggctattattagtaatgctgccaataccttttgggcatataattttgtgagtacgtgttttcttttctttttttattttttgagatggagtctcactcttttgcccaggctggagtgcaatggtgcaatctcagctcactgcaacccccgcctcccaggttcaagcgattcttctgctgcagcttcctgagtagctgggattacaggcacccaccaccatgcctggttaatttctttgtatttttagtagaaacggggtttcgccatgttggccaggctggtctcgaactcctgacctcagatgatccacctacctcggcctcccaaagtgctaggattacaggtgtgaaccactgtgcccagcccatgttttcttctgagtaaatacttaggggtagaattgctaggtcatatggtaaatgtatgtttaactttataaggtaccaccatactgttttccaaagtggatctaccattttgcacggccatcagcaatgtatgagaggtccatttgctccacatcttagtactaacacttaggattatcaacgttaaactttattgtagtgggccgggcagtgtggcttatgtctgtaatcccagtactttgggaggccgaggcgggcggatcacttaaggtcaggagttcaagaccagcctggctaacatgggaaaaccccgtctgtactaaaaatgcaaaaattagccgggtgtggtggcacatacctgtgattccagctacttgggagactaaggcatgagaatcacttgcacccaggaggtagaggttgcagtgagctgggattgcaccactgtactccagcctgggcaacagagggagactctgtctcaaaaataaataataaataaaaacttcattctagtggatgtatcttgatacctcgttgtggtcctaatttgcatttctctaatgagtagtgatgctataaaattaaatacaattaagaatttaaaaacatgtaaaaagaacatgtatgcagtaaaaccatgtaagaaggaaagaatggttctcactatggaattcagtataatggttcttagaggtagggggataggatggggctggagggaacataaagttagattattgttaaggctctagcttttatgtttggtgcttattgaattattaaaagcagctaagttaataaaaagttatacataaaaatttgttattcatgacaaaagtgataaaagtatgttataaacaaagattatgattaattcaattttgtacatctgaggtctccctaaaaaaagagaagggggttggctgggcatggtggcatggtggctcatgcctgtaatcccagtactttgggaggccaaggcaggtggatcacctgaggtcaggagttcgagaccaggctggccaacatggtgaaaccccatctctactaaaaatmcaaaaaaaaaaaaaaaaaaaaaaaaagtgggtagagaaccaagcccacagagaataataatgcaaaatatggcttaatgtaggagggatcatattgagagacctggaagcttagcagtattgcctcagtcttgttcatgagctcctctttccttgtgatttgcaacagttgaaccacagcagagggtcaggtattggggcagttatgggtcaatatacattgatagcttggatctatggttttcaccttttaggagtcacaaatctgtttgagagactggtaaaagctttggccgttctcagaaaaataaagacaaaaaacaccatagcattttacatataatttcaggggctttggtacttcctaaggcctatctcccccaagttaagaacctttggattagaagatctcagatttgagggtctttagtggaaggcaagggggtcaagcagagaccccagtaacaactcaaatcaccactctcacccctgccaatctgcccttcttcccatctgcattcttcatctccaaacttaacaccaccctttaccctgctgcccatgccagaaactgcagctatccttgatgcagtgacagtaatcactactgtatatcgaacgtacctgagccaggcccatgtgaaaaaagcattgttttacttacatcattgtttcttactttcacagaaaccctgggatatgctcttttttgttgttgcctatttattataaaactttgaaagagttattcgttaatttgaacattttcatccattttgtggcttttctttgcactatttttatggtgtgtttttattgcagggcaggcaagcctcaaaactggggcttagcctgggagaaagccaggaaagaattcaagggcaagctagtggtgttagacagcaatcttttattgaacagtactgctccttgcagagtaaggctaactcataggcagcaaatccagagtcagctgatatactctttttagtcccattttatagagaaggaaacaagcttagattgcttaagtaactcaaaaagttacaatctgaaatttcttttttttttttttttttttttaagacagggtctggctctcaccagggtggagtgccgtggtgtgatctcggctcactgcaacctccgcctcccaggctcaagtgatcctcctgcctcagcctactgagtagctgggactacaggcacatgccaccgcgcctggctaatttctgtatttttagtagagatggggtttcgccatgttgcccaggctggtcttgaactcttgagctcaagtgatcagcctgccttggcctcccaaagtgctaggattacaggcatgagccactgcgcccagccacaatctgaaattcctttcttgaaatgtcgcttatatttctctccttcctagcattcctaccttaggtagggccttatcatttctcactgatcaaaggcagtagcctcaaaactcatttctattactccaatcagccctaaattcttccattctcccccatcctctcatgccaccccttatctgttgtgtgatcgccgatcacaataattcctcccatcctgtcccagtacaatgtgactttgctgcttctgtcattaagagatggagtctgtttccccacctcttgaatctgggctgatcttatgatttgttttgaccagtaaagtctggtggaagggatgctgygcaacttctgcatgtaggcctcaagaagcctcgcaacttccacgctcattttggagctcttctgcggctctgtgaagaagcctggaccaayctgctggagacatgtgctggaagctgtcttagacctcctaagctcagttaaacggttaggtgacccaaacagcatgagtgaccccagccaagaccaacctaaatcgctgacctccagaatcatgaacaaataaagtagtggttgttttaagccagtaagttttggaaatggttaagtaaatttaaataaaattttaacatatgtcatttgtgttagtaagtaacacaaatctgagtgtcattcatctgcttataattctttgttctttaggctgggcatggtggttcatgcctgtaatcccggcacttttggaggccaaggcaggagggtcgcttgaagccagaagtttgagaccagcctgagcaacatagggagaacccatttttacagaaagatcctttgttctctctccattgccagcaggatcaagtccagacttttgccctgatccctggttgttgatgctgttttatctgtgtctgtcatgccttgctgctccccttttgcacaaattctttgtctatccatgcatagcataccccaatgcttctgggtcaggacaaattgtctcctctgtctaaatgccttttcccttgtgctttcttgctagctcaaatgtccacccctctggaagctttctctaatccttctaaagctgggttgatcctcttctgtgctccccaaccttctctataatacaatgaatatagcactttccatggccactttttcttctttacccatctccaaactaggaattgttagggacagtaagctggtatttatttttgcatccctaacccccaagtaccaacatgcttagtacctatttggtagttagtatatatttgagtacctcctatgtgctaggcttaactgtagacgctagagtggtgaacagagcagaaaaaagtccttgttctcatgggatgtacaatctagtgggcaagatagacaagtaattacaagtaaattacaagcaattacaattagttataagtaaattatgagtgagccaagtactgagagaaatgtaaagtgcatatacctgagggacctaacctcgcctggaggaagagatgtttaaacagagctgaagataaagaggagttaaattagtgaggcagaggaggatgttgggagtgccctagcagagggaacagttcgtgtgaatgtgaagtcaggaaagaggacattctagattctgaaagaggtccagtatcctgcagtgtaaggagaaaggaatggttgtgaaacacaaggctggagaagcaggcagaagccaacctacaacagggctttctgggccacttgaaggaataggtattccatcctgagtaactggaagccattgtcggagttttaaggtggaaaatgatctgatcagatttcatgggccccccagtgggaatatgattatcagaatttactgaatgaggaagttaaataactggctctacagaaattgcttctgaaagtcagtcctgtccttaagtttactcagccttatctctctgagtaaatgggaacttttgagctccaagctgttcagaccatattttgaggtgacactttaggaggtgtactggctgaagagggtgactgggatggagaggaaactgaaagtctcattctggggagaactgggggaattgggagtatttcgccaggagaaagacagacttagggaagagagatgttgtctccaactaggactgttctgaggcaggggaagcagatgtgttttgagtatccccaggggcagagctgggaccagtagaaggaagttgtagtgagccagactgtaggttagcatacgaaacctttcaatgagtgttttctgaattatcgctcacaaccatgaatcattagtggtcatgaagtcaatttgtgggtatgataagccttaggacttctcacaaaggagtacttagttactccttctcttggacatgtagtaggcttgccttccccactccctctgcaggtaggcatagccacgtgacttgctttagccaatgaaatgtgcacagaggtgctgtctttttttttttttttttttccagattcatttcacttttgttatgaacaaacacaatctcagatcagtataactaacttcagagttgatattaatagaaattattccaaaattattcttaggtcacaaattactagtatgccacataaaaagggaaaaatcccacctcatcaaagaaaaggtgtcctgtgtatgtttccatgggaatgagtttaagcattctcaaattttctccggctagttatccaccacttctccaatggattcattcagtctcttagagaaccatatagactaatgatagcttccgggacacacagacagatcaagttcatggtggacattgttattataaaaaatactcaggtcttgagaattcctttgctgaaggatcccaaaatgctttataaaaagcattagtcatgcctcaaaactgccctttgaggtagctcagtattattatccccattttaacagaagaaaactgaggcatattagagttaagtgacttgcccagggtcacatagcaagtcagtggcactgtggtaggagaggctctgtccttaaccaccagcataacattgccaccttgatttttttttttttttttttgagacagrgtcttgctttgttgcccaggctggagtgcagtggtctgatcgtggctcactgactcccaggttcaagcaattatcctgcctcagcctttcgagtagctgggattacaggtgcctgtcaccacgcctggctaatttttcttttttactttttttttttttttgagatggagtcttgctctgtcrcccaagctggagtgcagtggtgcgatcttagctcactgcaagctccacctcctgggttcacgccattctcctgcctcagcctcccgagtagctgggactacaggtgcctgcctccacgcctggctaatttttttgtatttttagtagagacggggttttaccatgttagccaggatggtcttgatctcctgacctcgtgatccgcccacctcggcctcccaaagttctgtgattatgggcgtgagccaccgtgctcagcctaatttttgtatttttagtagagacggggtttcaccatgttggtcaggcttgtctcaaactcctgacttcgtgatccccccgcctcggcctcccaacaatctgggattacaggtgtgagccaccgcgcctgaccagggagctttcaatcatgatgaaggtgaagggggaacaggcttgtcacatggcaaaagcaggagcaagcaagtgggggtggaggtgggcggggggtgccacacactttgaaatgaccagatctcatgtgaactcagagagcaagggtatgcttatcattgaggagatggcccaaaccattcatgagggatccgcccctatgattcaaacacctcccaccaggtcccacctccagtagcggggtttacatctcaacatgagatttgggtggggacaaatatccaaactctatcagagtccttctttccttgtcttgataatcccttctctctgtactartctctttagcaaactggttgctgggccatacccttggtttcctctcccaaacatgcctttttactgtttttttttttttttgagatggagtctcgctctgtcacccaggctggagtgcagtggcgcgatctcggctcactgtaagttccgcctcccaggttcatgccattctcctgcctcagcctcccaagttgctgggactacaggtgcccaccaccrcgcccggctggtttttttttgtatttttagtagagatggggtttcattgtgttagccaggatggtctcgctctcctgacctcgtgatccacacgtcttggcctcccaaaatgctggggttacaggcgtgagccactgcacctggccgcctttttactatttacatggccaggctgagtcttccaaatctttccactttacttcccttttgattataaattccatctttaagtcattttccccttctcacaacttaatataggtagttaaaagtagtcatgcagcaacctgaatgctttgctgcttagatattcctaatttctcccaccagatggcctaactcactgctcttcaattctgcattccatagagccctgaggcatggacacaatctatcaagttctttgacagttttttgttttgttttgttttgttgttgttgttttgagacagaatctcaatctgttgccaggctggagtgcaatgacatgatctcagttcartgcaacctctgcctcccaggttcaagcaattctcccacctcagcctccgaagtagctgggacttcaggcacgtgccaccacgcccagttaatttttgtatttttagtagagacggtttcgccatgttggccaggttggtctcgaactcctgacctcaagtgatccgcctgcctcggcctcccaaagtgctgggattacaggtgtgagccactgcattcagcctctttgcccatttctaacaaggatggcctttagcttccattaccttgttcttcaggtccatctgagacctcattagaatggcctttactgtccatatttctatcagcattctggtcacaaccacttaaataatctctgagaaattccagactttccctaatctttttgtcttctgatccttcaccagcactgcccttaatgctccagtcatgtcaatacagaccatgctcctagccaacctgctcctccaaattcttccagcctctgcccattatccagtttcaaagctgcttccgcattttcaggtgttcatttttagcaacaaccccactcctcaacaccaatcttgtgtcttagtctgttttctgttgctatgagtgactacctgaagctggttaatttataaggaaaagaaatttatttctttcagttctggtggctgggaagtccaaggttaaggggtcccacctagtgagggccttcttgctggtggggattgtctgcagagtcccaaggtggtacaggacatcaaatggcaagggggctagagcatgagccaatctggcttttataacacccactcttgtgataacttgataaaagctggaggctgccctcagatcaggcccaggaggccatcaccaataatccattaccatgataacccatgaatccattaaccaattaatccatgaatgaattaatccactcacgaaggcagactccttatgacctaatctcctcttcaaggccccaccccttaatactgttacattggggataaagtttcaacatgagtttcagagggaacaaacacacaggacacagcaaagaggaatctgaaaaagtggaagtggaagtagagaatagaatggtggttaccagaggtgtggggtaaggcgttgggggatggggatggatgggggtggggagatgttggtcaaaggatacaaaattaccgttagaaataattttaagagatctagccgggcgcagtggctcacacctgtaatcccagcactttggaaggccgaggcgggtggattacctgaggtcaggagtttgagatcagcttgcgcaacacggtgaaaccccatctctactaaaaatacaaaaatagctgggcgtggtgacacatgcctgtaatcccagctactcgggaggctgaggcaggagaatcgcttgaacctgggaggcggaggatgtggtgagccgagatcgcrccattgcactccaacctgggcaacaagagtaaatctctgtctcaccaaaaaaaaaaaaaaaaaaaaaaaatagagatctrttgtggccaggcacggtggctcatgcctgtaatcccagcattttgggagtctgaggcaggcaggtcatgaggtcaggagttcgagatcagcctggccaacatgatgaaaccccatctctaccaaaaacataaaaaattagctgggcatggtggtgagctcctgtaatcccagctacttaggaggctgaggcaggagaattgcttgaatccaggaggcagaggttgtagtgagctgagagggcrccactgcactccagcctggacaacagagggagactctgtctcaaaaaaaattaaaaataataaaataaaataaaaggggatctattgtataacatggtgactagttaatgacaatattgtattcttgaaaattactaacagaatagattttaagagccgatgggcttggggcacttagtcccagctacttgggaggatgaggtggaaggattgcttgagcccaggagtatatgagtatatgagtataagctatagtgagtatatgagtatatgatcatgccactatactccagcctgggtgacagcatgagaccccgtctctggaaaaaaaaaaaagaatagatttgaagtgttcccaccatacacaaaaaataagtatatgagtaatgcatatgttattacctcaatttattcgtatttcaaaacaatatttgcacaccataaagatatacaatttttatttgtcagttaaaaattaaatttttaaaaagggtaataatagtttatttgaacaatcaacataattgataaacccctgactaaactgaccaagaaaagagaaaacaaattaccaatatcaagaatggggccaggcgtggtggctcatgcccgtaatcccaacactttgggtagcagaggtgggtggatcacctgaggttgggagtttgagaccagcctgaccaacatggagaaactcattctctactaaaaatacaaaactagccaggcatggtggtgcatgcttgtaatcccagctactcgggaagctgaggcaggagaattgcttgaactcaggaggcggaggttgcaatgaaccaagatcacgccattgcactccagcctgggcaataagagcaaaactcgttctcaaaaaaaaaaaaaaagggccgagtgcaatggctcacgtctgtaatcccagcatttggggaggtggaggcgagagtcttttttgagcctaggagttcaagaccagcctgggcaacatagtgagtccttgtctttacaaaaaataaaaacaaaattagccaggcgtgatggtatgcacctgtagtcccagctactctgaaggctgaggtgggaggatggcttgagctcrgcaggcagaggttctagtgagctgaaatcatgccactgcactccagcttgggcaacagaatgagactctgtctcaaaaaaaaaaaaaaaaaaaaaggaagaatgatattcacaataggtctgatttatattaaaagaatagtagtaaataggccagtgcgtggctgggcgcggtggctcacgcctgtaatcccagcactttgagaggccaaagcgggtggatcacctgaggtcgggagttcaagaccaacctaacgaacatggagaaaccctgtctctactaaaaatacaaaattagccgggggtggtggcacatgcctgtaatcccagctactcgggaggctgaggcagaattgcttgaacccaggaggtggaggttgcagtgagccgagatcgcgccattgcactccagcctgggcaacaagagcgaaactaaaaaaaaaaaaaaaaaaaaaaaaaaagaggccaggtgcggtggctcatgcctgtaatcctagcactttgggaggccgaggtgggtggaccacctgaggtcaggagtttgagatcagcctggtgaacatggtgaaactccgtctctactaaaaatacaaaaaaatagacgggtgtagtggtggggcacctgtaattccagctactcgggaggctgaggcaggggaattgcttgaacctgggagttggaggttgcataagacaagatcacaccactgcactctagtctgggtgacagagaaggaccctgcataaaaaaaaaaaaagcatagtagtaaagatgtattatgaataagtttttgccagtgaatttataatttagatgaaatggacaaattacttgaaaattttcactgactcaagatgtaagataaaatttaatagcacatccttagataatagattagtctgtctctctaaaaaaaaattaaaggaaccacaacaagcaagttaataaattagatggccacctttaaatgaaaggatagaatagaaaacacgtgcatcacacatagtaaaggtaagtattatattatgaagcatttgctttagagagcatgtgtgtgtgtgtgtgtgtgtgtgtgtgtgtgtatagaaacacacttactaggttttttttttgagatggagtcttactctgtcacccaggctggagtgcagtggcacgatcttggcttgctgcaacctccacctcacagattccagcaattcttctgcctcagcctcccgagtagctgggattacaggtgcacaccaccatgcctggctaatttttgtatttttagtagagaaggggtttcaccatgttggctatactgatctcaaactcctgatctcaggtgatccacccacctcagcctcccaaagtgttcgggttacaggtgcgagccactgcaccggccttttttttttcaagacaaagttttgctctgttgcccaggctggagtgtagtggygtgatctcagctcactgcaacttctgcctcccaggttcaagcaattctcatgcctcagcctccagagtagctgggattacaggtgtgtgccaccacacccgagtaatttttgtatttttagtagagacggggtttcaccatgttggccaggctggtctcaaactcctgactttaagtgatccacccgccttggcctcctgaagtgttgagattacaggcgtgagccaccatgcccaaccagagttctttaaataataatagacttaccttaggatttgatttgcctacaacctaccaagaatatattctctgtgaaatatgacataaatgtgggataatgacccaagagtgcttctcaagacgagagacgtgcttttctgcatgtctgattttcaaaaactggtttgccacccaggagatgttttctcccacaycaacttggatagaagagcttatggcagacaagctgactcaacactcagactgatgtcaccagatcaaagtgaaaaatatgtagctctcatgatccaaataaaaatgttttcgtaataaaattgccattgctgtggatcagttttagtcacacttttattttatctaatgatatagtccttgctatatgtcaggcactgttctaagcatttcccgaacattaagtcatttaattcccacggcaaccaatggggtagtacaacatccccattttatagatgaggaaattcaggtaccgagtaaagaaactaaccccatagtttcaaacaaattataggtgggagacagcatgtatttcatgtgtatccaaagaaggcatgggtgaaaacaggttgaggaaaacagatttaaggtgaggtatggctgatgggtttccaagttaatgattgggaacctttaataacaattctacagtctagttgtaggtgtccatgttacagaggtagcagggctttttaaaaatttttatttttttaaatagagacagggtctccctatgttgcccaggctggtctcgaactcctgagctcagtagatcctcggcctcccaaagtgctaggattacaggtgtgagctaccatgcctggccatagcagagattttttttttttttttgagatggagtttctctctgttcaggctggagttcagtggtgcaatcttggctcaccacaacctctgcctccctggttcaagggatcctcctgcctcagcctcctgagtagctgggactacaggtgtgtgtcaccacaccccttaatttttgcatttttagtagagacgaggtttcatcatgctgaacaggctggtcttgaactccagacctcaagtgatcctcccgccttggcctcccaaaatgttgggattacaggcatgagccactgtgcctggccaagggattttgagtcttgaagatccaggtgtgattcacagttgggccctccactgactgtgtagcactgagcaagtgactggttgtctgtaaggcctcggttacttatctgggcaatgaagatcaggagatgtatcagttagctattgctttgtaatgaaccaaccttcaaagtggtggtttaaacaaccatttattattgtctgagtctatggtttggtgggtggttccgctgaccttagttggcttggcaagactcactcatgtatctgcagtcaggtggctctgctcatcttggctgtctcgcctgtgtaagggcctgaccaagggcaaatgggctgagcaggcttttctccacatggcttctagtcctccagcaggctagcttgggctttttcttatggcagtggcagggttccaggagagagagacaaaacagttctcttacagcctgggctaagaagtagcacaaaattccttccactactttccattggttaaagcaagtcacaaagatttacatgggtagggaaatagactcttctcctggggagaggagttgcaaaatcactttgcagagagcacagatacaaggggtcctggattattggggtcatttatgtaatcaacttagcagaggagacaaactctccccaaactcagaggagggtgtagaggttggtagggggcccagatatctgcattcaaagtcctgacagtgctttgtaaattgtcagcaccctaggcagtgcttctgagtgtggaatcctccctcctatgtggggctgtgagttcctgtcttagtccagtcatgcagctataccaaaatacttgagaagggccaggtggggcggctcacacctgtaatcccagcacttttggaggcagaggtgggcagatcacaaggtcaagagatctagaccatcctggccaacatggtgaaaccccgtctctactaaaaatatgaaaattagctgggcgtggtggtgcgtgcccatagtcccagctacttgggtggctgagacaggagaatcgcttgaacttgggaggcagaagttgcagtgagctgagatcgcaccactgcactccagcctgggcaaccaagtgagactctgtctcaaaaccaaccaaccaaccaaccaaacaacaaacaaaaacaacttgagaatgggtaatttataaaagagtggaacatttatttcttacagttctagaggctgggaggtctaaggtcaaggcactggcagatttggtgtctggggaaggcttgctcattgctttatagatggtgtcttatggctgagtcctcccacagcagaagaacagaagggaaaaggggctgtgaacagctaccccatacctcttttataaggtctttaatcctatttatgaggccagggaccttttgacttaatcacctcccccaaaagctccaccttctaataccattaccttggtgatcaggtttcagcatgaattttgagggacacatacactcaaatcatagcagttccttagagctggactgcatcctcccctttagtaggcccctgggaaaggctcacagaagagaaaggaaatgaagaagcagagcatttactgctcccatccctggaacaaagacagacttcacaccctctggaatctgagaagctcccttcccttcttctctcccttggacagccctgcccccacctcagagggtgccagggaaggtattacctgtcttcccactcaacagctgaagacacataagaataacttaccatcaccagctgactgcggatgctgacagggaaacttaccagggtctgctagaggggctgtgggcaggagtaactcttgcatgaatgacctgacagcagattatggctcacagaatggtgtggtgttaccttctggataacacaggtggagccctggaaacccacccccattggatctttgcatccacctgctcttctagtccatgaccttagcttccagcttgcctctcccaaccctcctccatactgccttctcaaaatactggttggattgcatacatctctgcttaaaataaagtgagctaatatttattgaacacttacagtggatgaggtgctgttccaagctctttgcttggattaacttgcttaatgttcacatcaattgtgtgagatagtcaccagtgttatccccattttacagataaggaaactgaggcacaagaggttaaagaggcttactccaggttacacagtaagtggcagagttaggatttgaactcaggcagtctggttcctgagcttgggattctcagcccataaaacccctctctgtgggcctctatttttctaataataagtaataacaacagcaataataataatgattaacatgcatggattttttactatacatatgctaggccctgttctggttgtgttacatgcattaactcatttgattcatataatagtaccagagtatttgctgtggggggatactattattaccattatttgacaggtaaggaaatggggacacagagagtcacacaacaaggatgggttactagctagttctactctacagccaagctctaaaacacttgctctgaatcatgtgccatcttgcttcccccaaagactctccccaacacagtccaagggcccagaatccaaggccctctgggttatgcagcacgatctctgcatttccaccaaagcctgtcttggtctatgcaatcttttttcttcccattcaggccagatttttggtctactattcgtttaagtttccctagagcacagcatatagtagcaggtgtcagtggatgtctgttgaattgaatcactggatgtcagaagggtttctggatcctctctcacaggaacaaagtggccactcactgtgacttgaacattagagtcagtccaggacttgctgcactggcctccaaacccactcctaacccctagaccctttttgtaaattaagttatatttaatatgcgcccagggagctttctgtttagagaagccatcatttcagcaaacacaagtgaatgctttgcaactggagtccctaaagtagcaaatcttggccctactcacaacaggttacaaacttggtgattaagcctcaggaatgaccagtgtttccctaggactatatattattttccctttgagaaggagagagggtctggaaaaatgcttctcattttgcaaaaggaagaattgagttacccaaggtcatccaacaaatgaatggtgagttgagggctagaatcctattcttttactcaggaaatggggtgaggtgacctcataagaatcacttcagattgctgtttctgtcatcagcacctgtcagctccctttttctagggaaactgaggtctaggacttgaaacttgtaaagggttatcagtgctgagtaggaacagaggcactcaatcctcactgaagacagaaacgcgaggatttgggaccttgcttaacatactcaagagcctgactcaaggccctcaggctgggattcttccattaccaaccaagtctttccataggtgggcctttcactccattcataatcatttatggagggcctactaagtgccaggcagtgttgctaaccatcttgcaaagtaggcatcataaccagcccccttagaaaagtaaaggcacagattcagagacgtaaaaacaaccaggatccgggactgcacctccacccgggagcccctccccatgtttcaggagacagtgtttccccgcacaaagcacttacctgtgccccatcatactttaagtaaaaaagtcgttgggacaaatagggccactatgcaatgaaaaaagctacacgtcaacccaaagatacacacattctaaacttttacgacccattcccaggggcagtaatggtggtgctgacggatagggaagagctctggcttccggcttcccagtggaatccccatccactcagccacctgtgtgacccacaaaagttacttttattttttaaatacttaatttataaacatcagttctatgggacacaagttatttaatgccatttgtcttcagttacttcatcagtaatatgagcataaaaatgcttctttttttttttttttgagacagtctcactctgttgcccaggctggagtgcagtggcatgatctcagctcactgcaacctccacctcccaggtttaagtgattctcctgccttagcctcccaagtagctgggattacaggcacaagccaaaaygcccagctaatttttgcattttttgtagagacagggtttcaccatgttggtcaggctggtctcgaactcctaacctcaggtgatccacctacctcggcctccaaaagtaatggaattacaggtgtgagccactgcactgggccaaaaatgcttttctcataaagttgttgggagaacaactgagataaagcacgtaaagttctgtgagagaggccaggacagcagtagggaacctgtgtgtgtgtgtctgtatccgtgtaattcatccccctctgaagcggaccaggtccccagactccccctggtctggcattccttctgcttcttggatgtaaaatccagaagtacccaggactgggacagggtgaccctggggaggccagtctgcaggaagtggctgagccaaaggacaaataatgggtggattgggccatgaagaagagcccagggtgagagacccggtgtcccgggtttgggaaagaggaggggcagggggtggacgccccagagactcttccagtgtttgtcctgggctggcgcaccggaagccccatgctggggagaggtgggcaccctgtggtgcatgaccagcctcctggttctccaggaaagatactgctacagggtttgtggaggttaaagaggtctgtgaacccaatctgtcactgctcctgatcttgttggctggtgtttttttttttttttttttttttccgagatggagtctcgctctgtcgcccaggctggagtgcagtggtgcaatctcggctcactgcaagctccgcctcccgggttcacgccattctcctgcctcagcctcccgagtagctgggactacaggcgcctgccaccacgcctggctaattttttgtatttttagtagaggcggggtttcactgtgttagccaggatggtctcgatctcctgacctcatgatccgcccgcctctgcctcccaaagtgctgggattacaggcgtgagccaccgtgcccggccaggctggtgttataaataaagttttggtgccacaaaagaaatagcactcaaatataaaattttctttttttttcttctcagcaaggcaatttacctctatagaagggtgtgccctcacagatggagcaatggtgagtgcacggctggacaagggaggggaaggggttcttattcctgatgcatgtggcctctgctgctgtgtcgttcacctattggctagggttagactgcacaggctaaactaattccgattggctaatttaacgagagtgatggggtgagtggtttggcgggaaaaatggttatggcagagcaggagatcggaatgggtcagggtggagaatgagtcagggcagagcaggtaattggaatgagtcagggtggagtaggtaatcaaaaaaggttgctttacaaggaagttaagtttaaaagtagaaggcaaagaattgaacatactgacatagtgattctttgaagagaaatttagaactcacatctagtaatccctcctcttgaatttccttgcagctctttctcttcaaacttctttaacatgtcttggcttagttgttctgcttgattttccaaaagaagaagcttctctggataaggtggaggatagttaagggaggttttagtaagtgctgtttttatgagcctctgcaccaacccatggatggatgtatgacacagcacctgataagaataagtacacccattacggctgtgagggaagttagaattgaggctattattcctttccatttaccaaaccactttttagccatgctgtaaagggatcatttacccctgagttgttggctaactattggacagagcagtcagaccttgcaatgtctttgttacagatagacagactaaacttttcttagctttaatttggtagggcttgatccaggaacaatggcccatgattctgatgataatggcacttgcttgactcaggtgtgatgtgtccatccctttccgctgtatcaaaagcagtcttggtggttagcagcacaaagtagagtccttcccaggctggcttgagtttcccttctttccaccctttgacgagaacatgatccccaggctgatgctgatgtcctggcaactccaaaggtggcccctgtgctaaaagacctcttgttttaagggaagagaaggtggaggataaaccaagtgtataattcctaagaaattgatcttttggttaaaatgtggggacatcagcagtggacttcatagtccttggtgccttcttgctgagaaattttctttagcacctatttttattagtttttagaccaaagaaagccaaataccattttatatttaacaatgcttcctgtatcatttttataccagataaactaaatttcacctttatattagtgtgttattaatgttaaattgaattttaataaaatcttgtagacatatttatctaattttaatgtctgaccataaggtaagatttttatagattgttttcaatcttttataatttttgttaaagagcaggttagtgctttaagaaaaacctgttgtgttttatttcaatgtcaagttcacagaaaaactggatgatacccatttaactttagccaatgtttacacacagaatttcctttataattgttttcaaaacttgcttaaacctttaaaacaattttttaaccttttaatgtagataaaaatccacattcttatgcttccttataaccttttaccaaggtataatttactttccttacacaccttgcacataaactgtttcttcaatagttttacattcaggaggcctcattacttttaaattatacaacatttcttgcataaattcccttttataactttttttccatgacttttacagacaattcttcgacatgcctcaactttctgacttgttgcaaacatccctttatttaaacagccagttaatttattttaggacatgaatttaccatataacattctttttacataaattctacccgccccccccacattttttttttcagttgcaagatttaatagagtgaaaacagagctcccatacaaagggaggggacccaaagagggtagacattgctgactcgaatgcctgggtttatatcccaatcattgtccctcccgcgtgctctcaggcgatagattttttgctatttctttacctcctgtttttgcctaattagcattttagtgagctctctttactacctgattggtcgggtgtgagctaagttgcaaaccccgtgtttaaaagtggatgtgatcaccttcccagctaggcttagggattcttagttggcctaggaaatccagctagttctgtctctcagtaaccccctcaacaggaaaacccaagtgctgttggggaggttggccgacgactgctctaactgcttcctgctgaattggggtgagtaggggtcgtgcagatgagatttacttgggaggggtgcctttgatgtcatcaacattggagcgtgggctagcaggctggtccaggggtccacagtagatcttagtcatgggctgcatctggggctccatttgaagaacaatttgtagttttacagctttgattctggaagagacaaacttaacgaggaggttaaagatrcrgggattgaaatatatggcctgcagtataggggattatttctttggcacactttacaggccctgaatatctgcttgatagttttaaaaaggcctggtccagtaaataataatttggccacctgatgggtgctatcaatgcctaagtgaaaggtttggcgaagggttttaagtagttttcattggttagctgcaggcaaaagtatttttcctttgttggctagccatcctgagggggggaaactatgtccttgtaaggttccctattctatttctcctgttgagtactggggcttggtttcccagaggggattaccccatactaggggtccttctataagcatttttaatggagggtcctgccttgtggctcttttggcttcaatattcgcttggcggttcccttctatttccctttcctttcctttctgatgaccccagcagtgtaagactgccacctctttaggtttctgtacagccgataataatctcctgatggcttcctgatgtttgatagatgttccctcagaagttaggtattccctttctctccatattgctgcatgggcatggaggactaggtaagcatacttagagtctgtatatatgtttacccttttttctttttctaattttagtgcccragtaagggctattagttttgccagctgagcgctagttcctggagtgaggggattattttcaagtattccattatcactgaccactgcataccctgcttttcgaagtcttttttctacaaaggaacttccatcaatatacaagttgaggtcaggatcagtcaaaggaacctctagaaggtttcctcgagcggcataggtttgagcaatcacctgttgacagttacgttctatctttttttcaatgtctggaagaaatgtggctgggttaagagttgcccaagtgcacagttgcagcactggcccttcaagtaatagaccctggtatttaagtaaatggctgtctgacagccacaggtctcctttagcagtgagtatgctgttcacatcatgagatgtccacacagtaagatctctttcctgtattattttaactgcttcagatactaagattgctactgccaccattacccataaacaatgaggccaaccctttgccactacatcaatttccttactcaggtctgccacgggttgcaagctcgttccttggacctgtgtaaggactcctagagttattcctgtttttttctgtgacatataaagaaaagtcttgccccgttggcaagcttaatactggggcttgggttagggccttcgttagggcctggaaagccacttctgctttaggtgtccatcttactaaatgggtattggctttctgagtttccttaattagcgtatataatggcctggctatttcgccatacctgggaatccatatttggcagaagcctgttatgccaaggaaccctcttagttgctttagggttttgggatgaggataagccagtatgggctggatacattccttactgagggccctggtgcctttggataattttagccctaagcatttaacctgttgtgagcagagctgagccttttgtttggaaaccttgtagccacaggtggcgaggaaattcaagagcgcttgggtagcttgatggcacaaggtttctgaatgggtggctaaaagcaaatcatmcacatactgaaggacaagagtgtcaaggtatgagaactggctcaagtcttgggttaacgcctggccaaatagatgggagctatcccggaacccttggggtaaaacagtccaggtgagttgagacgttgggttcgaaggatcttcaaaggcaaacaagaattgagagttaggttgtacagagatgcagaaaaaggcatccttaaggtccaggactgtaaaccactctgcttcctctggtatttgggaaagcagagtataagggttaggtacagctgagtatagagggacaatacctcatttataatcctgagatcttgcactagcctccactgcccgttgggtttctgtactcctaaaattggagtactacaggggctattgcatggttttactaggccttgggcttttaggtccttaacaatcttttggagtccttgttgggcctcaggtctaaggggatactgcctttggtagggaaaggaggcggaatcctttaatttaacttgaatgggacgggcattcttygctcatccatatcgtccttctgttgcccagacttcaggattaatttcttccttaagcaggggacaacaaacgggtgttccttttcctatgttcaggtgtataatggcccctgcttttgctagaatatctcttcctaacaaggatatggggctttcaggcataattagaaaagcatgtgaaaagagtaaagttccccagtcacaacttagtggctgggagaagtatctagtgactggctgtcctaggaccccttggatagtgatagatctggaggayagttgtccgggacaggagagtaagactgagaaggccacgccagtgtccaggagacagttaacctcctggcccttaatggtcaagcatacctggggctctgtgagggtgatggcatgggttggtacttgcccygggcaccctcagtcctgctgctggatcatctggttagtggcttctgactcagagggccttcgtcccctggggcagtgggccttccagtgattcccttgacataaggggcatggacgaaggggtggcttatttctacttggacaatcttttttttttttttttttgagatggagtcttgctctgtcgcccaggctggatggagtgcagtggcacaatctcagctcactgcaagccctgcctcccaggttcacgccattctcctgcctcagcctcccaagtagctgggactacaggtgcctgccaccatgcccrgctaatttttatatttttagtagagatggggtttcactgtgttagctaggatggtctcgatctcctgaccttgtgatccatctgccttggcctcccaaagtgctgggattacaggtgtgagccacctcacccggcctactttgacaatctttttaaaagtgtccttgtagactgcactggaagcaagccctattaggcattcgatttgcccagtttttcccttttccagagcctccaaagtccacttgcctgagggccatgactaaagtggtggcctcttttttatcctgtttgtcccattccacctgctcctcctgatctttattataaaaaaccaaggtttccaagttcaatagggtttctaagttttgctccaggcctaaggcggacttttgaagtttttttctaatgtctgcagctgactgagtgataaacttattcttcaagattagttggccttcaatagagttaggtgacagagaggtatgctttctcaatgcctcccttagtctctccagaaaggcagtaggattttcttcctttccctgtattatagtggacatcattgaataattcataggtttcttcctagttttccttagtccttctagcacgcaagttagcaaatgtctgctgcaccaatctccatgttctgattctgtgtcccagtgagggtctacactgggaactgcctgctggcctgtggggaatcgttctttcctctgttgtcatcttgtcattgacctgactgagataccagagatcaccaaactctcgggctgcagttatggcagcacttctctcatttgggtttagtgtctgatttagcaataacattatatctttccatgtcagatcaaaggattgtcctaacccttggaaaacatcaatatagccatcagggttatctgagaatttacctaggcctattttaatttgctttaagtctgagagagaaaaaggtacatgcactctggctgggccgaattctcctcctcccattgcttggagaggggcataattggggaatattagcactctttggttcattgtttacccctttgtctatctccttttggacgtttgggttgaaggggggtcctcattagttggggaaggagtcggggggacaccagggtagggaggtagactctagggcttcctgtaggacataaatcacactttttacataattgcgagttgtctcttaatgaaaagaaagtttgtacatatggcacttcattccatttgccttcttctctacaaaagaggtctcactgtaagatggtgttataatttatatttccctcaggaggccaggtttctcccccttgaagaggatatcatggccaggtggtactgcagaaraatataagtcatttctttcttagcgtctgagggtcaaattggtcccaaatctccagaatacatcttaggggcgtttttgccttgtggggaacrtttcccattgctttggaggtcccttcgtggtcgccaaatgttactggggggtccttgctcccagagctcccaagatggtggcgggccgcttccaagatggtggcaagcctggtgttctctgacctggggttcttggcctcacgaattccaaggaatggaatcttgggccatgcggtgagttttatagctctattagaagccgtgggtcatggaagagaactgtggaacccagtgactagtgttcagcttgattaggatgaacctgggcacttagccgtgcaggaacaatggcaaacctttagcctgattgggagcggcaatgggcgcctcgctggatcaggagcacagtagacaccctgccggatccagagggatggaagtcggcggcgggtctgcgatggcagcaaacagcagtggatgtcgagcgaaagctcagctccagccatagcaaacacggaccagaagagagtgcagttgcaagatttaatagagtgaaaacagagctcccatacaaagggaggggacccaaagagggtagccattttttcactttttttttttaacttttgttgaaaacattttaagtttggaatttcaactattctttgctattaataagacctcattcagtccatattaacttagaattggtatagatgggtccttcctgattctgtaagtgctttaaggcttggctgagtgcaaacagctctcacatttgaacaggccaattattaggcaattttcctaactctgcttctacaagagtttccttatcacttactgaatacccattgtgtctttttccctcaattacccaggaggaaccatctatcatcctgtcctgaagggagttcttcctaggtctggtcggacctttgtatggtaattaattaagatttagatcccatgttaggaaacctgctgggttaagggaattttcagtggttaatattaaatcatttttttctaacagaacagcctcatactttaaggttcttgagtcagtaagctacctttttttttttttgacttaggatagttctgacctgatgaggtgtgctcacaatgaggtttcctctaaaagttgtttttctactttcttctgttagcaaagcagttgctgctacagattgaatgcatttgggccatctgccggttactgggttaaggagttttgattagggaggttacgggttgtcagtggcctcagtgcttttgggctacatccttgtttacactgacaacaaggtggtattggagtgttatagggtcatggagaagaccttcaattatcaattacaggttttgaattttatcctggcttttaaaggaatagggtacactgttttctctttactacttctatctctctttctctctctctctctttgactctctctctctttccctgtctctgactccctctctctctctctttttcttttgagacagagtctagctctatcacccaggctggagtgcagtggcgcgatctcggctcactgcaagctccgcctcccaggttcacgccattctcctgcctcagcctcctgagtagctgggactacaggcgcccgccaccacgcctggctaatttttttgtatttttagtagagatggggtttcacggtgttagccaggatggtcttgatctcctgacctcgtgatccrccggccttggcctcccaaagtgctgggattacaggcatgagccaccacgcctggcttctgtctttctgtctctttctctctctgcctctctttctctctctttgcctctctctttctctccaacttcctctcccagtttctctttcctctctgctggtctttccctgcctctgccagctgcttatgctgctgttctcccctctccttccccttcccctagggaagggaccgtcaggagtgcagctactttttcttccccgagaagaaaggaaaggggaattctgaatatttttcttactaccggaggtttgtgtgaggtttttgatcccctgaaatttgtggaaggctcaacacctcaaaccagggggtatcttgccttgcctgacctggaaggctcaacccctcaaaccagggggtgttttgccttgctgccctggaaggctcaayccctcaaactaggaggtgtcttgccttgctkccctggaaggttgacctgtttcctccctttccccctctgaaggtcctttgcacacttcccactcgtgttgtcctctctggctgctcccccaagggagaattaggcccccctcagcattggcattccrgtagaaatcccacygcaggatcctccctaagccatatgaggtagctacggaaacgtggagaggacccactcactccgtccagcagtaggacttgtcatcatccacacgaacaacaccacaggtagggttgtttgtgatcattcacgcacacacacatttagccctccagaatttgaccaccaaggaagtaccttaccggctccctcggcttcttcctttgtctgtgcacagagttgtctctgcagtgtgtgaggatgctttaccctaggttgcctgctggtttcttttcacattgctgagagctcaggttatttcttgcactgggtgagtcctgatttctcacccctgaggccatcacaagagggtggggcatacctcctcaggagagagaaccagagactgcccctgaaggggaatgtaatcacgagcaagcccccaaattgttataaataaagtttccccccagtgccgcaaaagaaatagcactcgaatataaaattttcttttttttcttctcagcaaggcaatttacttctatagaagggtgcgccctcacagacggagcaaaggtgagcgcacacctggacaagggaggggaaggtggttcttatgcctgacccacgtgattcctgatgctgtgtccttcccctgttggctagggttagacctataggctaaactaattccgattggctaatttaaagacagtgagggggtgagtggtttggcgggaaaaatggttaccgcagagcaggaaatcggaatgaaccacggtgaagaatgagtgagggaggagcaggtaatcgaaaaatgttgctttatgaggaagttaagtttaaaagtagaaggcaaagaattgaagatactgacatattgattcttttaagataaatttagaactcatatctaacagctggcatgtctggcatggggctccggctggggcgcagtcttcagcatttggggctctggggtgcagggggcagaggacggccggggctgtggtgcccaaccrgtgctaaactcaagcttgggaggtcgcccacgagaaacagtcgcccttccccacccgcctgctcggcttggcggggagcgggatgtcgctgggggcgatgccaggcgggccgcctctgatagcctctaggctctggcgcgcttccccgcccctcccgcgcaggcgggcgtgggatcccggctgatccagtccgggttttgcggcggagcgggcgggctgcgcgtgcggcggcttcaactgtcgcggtaggcagcagcaggctgaagggatcatggtgcagtacgagctgtgggccgcgctgcctggcgcctccggggtcgccctggcctgctgcttcgtggcggcggccgtggccctgcgctggtccgggcgccggacggcgcggggcgcggtggtccgggcgcgacagaggcagcgagcgggcctggagaacatggacagggcggcgcagcgcttccggctccaggtgactgccggagcgtagtgggatgggcgcggcctgagggtactcgcagcggcactttcagccgccggacccgccgagggacaggggatggggcgggcagagcagatgtgtaactctccagaatctctccttgccctaagatattccgcactttctgagccaggtagagcacgggggaagaaaggaaacggtagtgtcaaggcaggtggtggaaggcctttccctcactgggtcaaagaggagttttgctttgtgccaaagaatctcacgattgctgcctattggaatgcgaaaacgcaagcgtgacaaccagtgggatgccaggggttgaggactttggaatcgcagagtgtaatggccaaggggatctggagagcttagagttttgttttttgtttttttttgttttgttttgagacggagtctcgctctgactcccaggcaagagtgcagtggtgcgatctcggctcactgcaacctccgcctcccgggtgcaagcgattcttgctgcctcagcatccccagtagctgggattacaggggcccgccactacgcctggctaatttttgcatttttagtagagactgggtttcaccatgttggccaggctgatctcaaacgcctgacctcagttgatacacctgcctcggcctcccaaagtgctgggcgtgagccaccgcgcctggctgagttcaagcttcttgatttgtgcatttggatcctaagagggagccagaaagaaacctgccaagtgcacagggagatcttggcaaagccaggctagaagggaagtctctctggctcctgctgtggtgtccaacccctggcaagccctttccatgagcaggtttagttccagccctccgtgggtggtctgtcaacaagcttttctccctgcgctgcctttggatcacctcagtatgtgggtttggaggcgtggaagggcctggctgagggtttggaagatgtggcttgaagaggggcttttcctctgggtgtgtgaaacactgaccccagttaaagccttcttatgtgctgagagagggagggcttgctgtatctgtgggacctgacaggtgggaaggctttacaggttgggaaccgcaggactcaggagggtgtgcctgggtgggagacagaaagagtcacagaaaattgtgttcagcagatgttccgcaagtgatttttgagttggggcagagctggaactagaacctaggtgcccgctgcactctgcagccacactttcgtggagaggaacaggagagagatatgaggaaggcaccttgcatgccagcccagggtgtagccctgcatgttgaagggggccagcccctccacacctgtgggtatttctcctcaggtgggacaagagactgagaaaagaaataagacacagagacaaagtatagagaaagaacagtgggcccaggggaccaccgctcagtatagggaggacccgcgccagcactggtctctgagttccgtcagtatttattgatcactatctctaccatctcggtgagggggatgtggcaggactatagggtaatggtggggaaagggtcaacaggaaaacatgtgagcaaaggactctgtgtcataagtttaaggaaaggtgctgtgccttgatgtgtatgtaggccagatttatgtttgactttatacaagcatctcagtgcagtaaacarcagtattgtcaccagcatgtctcacctccagccataaggtggttttctcctatctcagtaaatagaacgtaggatcgggttttacactgacacattccattcccagggacgagcaggagatagatgccttcctcttatctcaactgcaaagaggccttcctctttcactgatcctcctcagcacagaccctttacgggtatcgggctgaggtatggtcaggtctttcccttcccacaaggccgtatctcaggctgtctcagtggggagaaaccttggagaatacccaggctttcttgggcagaggtgcctgcagccttccgcagtgcattgtgcccctgggtactcaagacgggagaatggcgatgactttttgccaagcatactgcctgcaaacacatttttaacaaagcacatcctgcacagccctaattaaaccttgagtcaacacagcacatgtttctgcgagcatagggttggggctaggtttacagattaccagcatctcaaggcagaagaatttctcttagtacagaacaaaatggaatttcttatgtctacttctttttacatagacacagtaacagtctgatctctcttttccccacacatgtgttgcggttttggctggctgtaatgtatgaatttactccaaaccatccctggggccaagatatctcatatttatttagtaagataaaaaatatatctggttccagcctccactcaccaagctggctgaaaagtccaccatcagtcagtttttagggtttcttccttccagagtgagagggccctggtggtcaacccaaattggccatctcccctacacaagcacaggttcttcactgtctagttgccctctctggctgggcgctggaggtcctccttagagatcctcctgtttatccctggctctgtgcagccagctgagttctgccagctccaagagcagcgtgggcagcactagcagggatctgctcacagctcttgcctgcagaactcccctcctggttgcaaggaatccacctggctggcaggggtgtgggatggtagcaggatgggtcttcctgcacttcggctccaaacagcagcatctatatggttttcctctggagcaactgctcttcattatttttacgaacagattattccaggacagaagttttggctctgaaagcttggctctttcaggaggagaagcgggaaattacctttcaggtttccagtgattgtggttttgagtaatcagcaaaggggtggggtcctgattgacaatagctttgtaggctttgsgggggagtaggatttttttttggtttttgttatttttgttttttgtttttgagacggagtcttgctctgtcgcccaggctggagtgcaatggtgcgatctcggcttactgcaacctctgcctcccaggttcaagcgattctcctgcctcagcctcccgagtagctgggattacaggcgcctgccaccatgcctggctaatttttgcatttttagtagagacggggcttcaccatgttggccatggctggcctcgacctcccgacctcaggtgatccgcccgcctcggcctcccaaagtgctgggattataggcatgagccaccgcgcctggccaatgcctggctaatttctgtagttttagtataaacggtttcgtcatgttggccaggctagtcttgaactctttttttttttttttttttgagatgaagtctcactttgttgccccagctggagtgcactggtgcaatctcggctcactgcaacctccacctcccgggttcaagcaattctcctgcctcagcctccctagtagctggggttacaggtgcctgccaccatgcccggctaatttttgtattttttagtagagatgggatttcaccatcttggccaggctggtcttgaactcctgacctcaggtgatccccctgccttggcttcccaaagtgttgggataacaggtgtgagccacctcacccggccaggacgtgggagttttagctgaacccagcccaggcttgggaacagctctttcccccgcctctcctcccttctgcctacaactcctaaggcacccttctgtttggctctggagtccttgaatgatgggcaggtaggatctgtgactgtctgggcaacctttcttctggggctcttagcccagccctgaatcacaagggggcacctgagataagcagggctccagcaggccctgggagaacacagcgatttgtagtaaagctcctgtctgatagattctggacaaagcgatttggcaaccaagattcttttttttttttgagtcagagtcttgctctgttgcccaggctggagtgtagtggctcaatcttggctcactgcaacctccgcctcccgggttcaagtgattctcctgcctcagcctcctggagtagctaggactacaggtgcctgccaccacatccagctaatttttgcatttttggtagagacagggtttcgccatgttggccaggctggtctcgaactcctgacctcaggtgatccgcctgcctcggcctcccaaagtgctgggattacaggtgtgagccaccactcccggattcttrgctgtgtccaaggaggacacagctggatgaaggggtacctaaacaccttctgaattttcacaaaatagttcacctctctctaaactcttgagcaaatctagagaaaaatgtgtttctggtaattctgttgacgcttcacccattttttcccaccctgccccctgaataagttttgatatcttttctagaccgaagagaaggaccaccatcaatagaatagtatagctgggagagacatcacagaacacctatttatgcccttatgcctttgtacatgcagttttgttttaccctgaatggtttttcctacatctcttacaacccgcttatcaatcccactggcattgtggttcagaaggagaaaacaaaacagatggaggaggggcaatgcctcctaagtgattggtagagtatccctctcttgaaaaattgtgcatgcaggtggccacaggtttagatgttacctgtatactatacttccctgcattctccgcaaaatcaggtttccgcatgttcactgattggtctyctggaggtgcagacttactttggtgtctaggagaaaatgtctcagctgcctgacactagttgaagatttaaaaatagctgttagcagctgtgtcattaactgtcaacaggcaagaacataggaaagaatgaaaatgtgtgctgagcgtggaggggagcacattgctagctgctagctgccgtgcacaggcactctgtgggcgccttgtagcgaggtcgggggagttggtgaccggactgtcaggtggcagttattccagggtggtgaatgctctgctgatttcgatgtccttctccatactcttaggcattttttaaaatacaatgaacctgtatttatataatgaraacaaaaataaagcaaaatttgattttcattgtgagatgggaaaggcaagatgcagtactgtgtgtatagtatgattcctttgtgcaaaaaagaatatatatagacaactgttgacatggtgggtttttcataaatattttcttttcctgtaagagtacaccagaaactgttaattatagttttcctttatagaggagggactgtgcaaggagaaccaggggtggagggaatgctcacttttcattttgtatacctttaaagaatatatcaagaggattatctrgtgtgtttggggagaagtcttgaacccattttttcttctttgtagctccttgtgttagaaaaaaaatccaaagtaagtactctatcagttcaatgaattcagggaagtgctcctgacactgaggacatcagggggcagaggctgtggcatgtgctcggagagggcaggcgccaggctctggggtgtggggggtgggagggggcagtggtgcctgggtggggagaggtgcacatgagtctgagaggaccacagcttggaagcacctcctggaatatgctctggagcctgtggtgtgatgagatggggattttaaggggagaggcaaggccaggttgggttttgcactgtctggccctagtggaaagtgtgggttggaggtgcaggacctgggcagggcagcagttgggtggccgcgtgtgacctaggagacaaggatgagtctgaggcccggtgagggccttggtagaggggatggagaggtgaccatttttcagagctacttagcttggtgactggatgcaggtggtggtgggaaggaggagccagaaagacacctgtttcatttcctgaacacctggatggatggcggggcctcccctgagtacagggtacaggatacataaggaggagctggtcaaaagtcgggcaggtgatgagcttagaggaaggacagggaaggtggacaggtgacaggaatagcccagtgagctggtttgggctccattgcctcgggctgggtaggggatctgggggatgtgggatgagtggagagcctggagtcagaggtgcttaggggaggagtggaagccagggtaggggaggagggtaagaggggaggggaggaggggaagggtagaggggagaaggggaagcaaggggaggtgaggaagggaaggggagaagggraaggaaggggaggggaggaagggaagggaagggtagagggggaggaggggaagcaaggggaggggaggaagggaagggtagagggggaggaggggaagccaggggaggggaggagggaaagggtagaggggaggagggaaaccaggggaggggaggaggggaaattggggagggaagagggggaagtggggaggggaggagggggaagcaggccaggggaggagggggagtagggggaggggagtagggggattagggggaggggaggagtagaagcagggttggaggggtgggaggaatggaagcaggaggaggggaagccttctcccagaatcagagagggaagagaaggtacccagagctctgtctctccccacatctggcatcttcttatccttcaaatcacagctgaaatgtggtttcttcagataggcagcctttaagaactggaacactcactgtgagggtctgcggcttcattcttgaagtcagtgagaccaagaacccaccaattccggacacagaatgaatgtgtaaacccttccttttgggtgtggccttcagtcacagacccagcctcccaagatggggtcttcttgtttttgcccttccctgctagaggttggcaaccccctgagtagtgttcagagctgctctgtgggtgtggggatggcatggggtcaggtgcaggcagatggctggtgggcaagaaggcacctctctctcagcctcagtttatctgtgcaatgggaatggcagtaagacttaatcaaaacatggatgacatcagcgtggtgttggcacacagaaggcagccactgctggtgtatatttgtagtggtttaatcatcagtctggagctaggcacagtagcatgtgcctgtagttccagctactcgggaggctgaagtgggaggatcacttgagcccaggagttcaagtctagcctgggcaacacggccagacactgtctctaaggaaaaaaaaaacctacttgggcaggtcggctcgctgggcaccccttcaacaagcttctggaggagacagagctgcattctctagggatggcaagggcctgcccaggctgggccatgtcagagctgctggggcatgggccactggtgtctgctgcaggcccatgagacttcggcgagtaggggactgatccgagtttgttccccacagaacccagacctggactcagaggcgctgctagccctgcccctgcctcagctggtgcagaagttacacagtagagagctggcccctgaggccgtgctcttcacctatgtgggaaaggtaaggccagccaaggccagcccctccctgggaaaggtaaggccagccaaggccagcccctccctttcccctccctctgtccgcacaggctgtggggaaaacctggcctggagttagtcctgctgggggccatggtgggacctacagtgccagggactgccagggagggaaggagccagagcgtgtgcgtgtgtgtatgtatgtgtgtatgagacactgagcatgctgtcttagctagtaacctggcttttagcccagacttccctctccctcctgcctccaccccattgggcaacaagtctggtctgttcccttctttttttttgagatggagtttcgctcttgttgttcaggctggagtgcaatggcacaatcttggcgcactgcaacctccacctcctgggttcaagcaattctcctgcctcagcctcccaagtagctgggattacaggcatgcaccactacacccggctaatgaaaagaaaaaaaattttttttttttttttgagatggagtctcgctctgttgcccaggctggaatgcagtggcatgatcttggctcactgcagcctccacctcctgggttcaagtgattcttctgcctcagcctcctgagtagctgggagtacaggcacctgctaacacacccagctaatttttgtatttttagtagagatgggattttaccatgttggtcaggctggtctggaactcctgacctcaagtgatccacccgcctcggtctcccaaagtgctggggttacagctgtgagccactgcagctggcccccaactaattttttgtatttagtagagacggggtttcaccatgttgatcaggctggtctcaaactcctgacctcaggtgatccacccgcctcggccttccaaagtgctaggattacaggcgtgagccaccatgcccgaccccgtctttttttttgagatgggagtcttgctctgtcgcccaggctggagtgcagtggcatgatcttggctcactacaacctccacctcccgggttcaagtgattctcatacctcagcctcccgagtagctgggattatagacatgcacccccatgcttggctaatttttgtatttttatttggccgggctggtctggaactcccaacctcaggtgatcctctgaaagtgctgggattacaggcgtgagccaccgcgcctggcctgttctcttcttttacccagccctctcctgtctccatcccctttggccaccctggcccgccaccaccatctcccgccatgcccaagcaccagcctcctggtcaggtgccctcttgtgtccccagctcttcaggccatctcttgtactcctcctctgtgtgtggcatcacctctggccaaggccttctggagcttgggtgtcagcagctctgcactggcttgggtggggctcctttacctggaaggctgtttccctcttctttgcccctgtccgtgccacgggctcccctggctgagccttcggggctcagagcaggaggcaccgtcttccattcgccacctgaggtagggtttcctcttccaggcctactctcattctaatagcacatttctcatcacagtgtcaggcttgtcttctctatctctttcccatggggggtctttgtggacagagcttgtctcatttgtctttgaaccttagtgctcaacatgttgcatttcacgtaataaatgctcaagaaatatgtttgaaaagaaagggagggagggaggaaagaaggagacaaattgtgctttgagtgtggcctgcatgatttcttgaaagggtgtgggacagtgagtgtgacccctaggcaggtgaacttgtctgggtgcagtgtatgtgacaatgctgtgggggctgcagctgaggaagcgagcgcatgctgggctggtgtcactgagagggggcacgtacatagtctcagcagatggtcttgcttcttccctgtcaatgtccctgaaaggctcctgcccttcctagttaatctagtctatctggttagattagccttctctgttcctgcctcgggtaccccggggacagattttgcacatgcctgaatatggcaacacagcccaccctgtttcccccagatactccccaggagcaggaatatttactgaaagctgcatctcactctgccstcacctttccttctgtaggaccctgtgtggtgaggtttgagcattctaggcagatttccactattagcatgttcttcccttttgtcaagctcctactccacatggcttgattatcaaattcaagatttcctgggtaaggggaggcttgactgggctacatgtggggaaggcgtggggttgaggagagactgctgggctccgggaggcaggagtctggtctagtcctgctctgtggttgcccttcagtgtgaccagtgatggggcgctgcccctgtctggtttctgtctgcctcactggcagagatgtggcttgggggaggtgagggagtggccagtggtcatcttcctcccagctcaccccctacctggggggcacctgaggccagtatcttgctcccttgagtgtcccggttgtgccctggtcctggttgaaggccagagacagccaggatgaggcctgggccaaatgtccctagtgaggcagatgctgagccctaggtcatcctctgtgccccaggctctgggccatgttgctggttacccctctccctgggtatactttaaaaggccagttctacatgatgtatatttcaccacaatttcttaaaaaggccagcctccttttatcttatgtctacttccccttcctcaggcctgggaagtgaacaaagggaccaactgtgtgacctcctatctggctgactgtgagactcagctgtctcaggccmcaaggcagggcctgctctatggcgtccctgtgagcctcaaggagtgcttcacctacaaggtatgctctgcctcagcgccaggcctccatcgtcccctccatccctgccagcctgctctgcatcttgggtcattttgggcccttagaggaggtatcaggtccagaggccttccgaggggacactggtatacctgttttggcctgtgtgacagttgttggagtggacccttggctgcccacgggccctgactcactcccttctggtgcccatccctcctcccagggccaggactccacgctgggcttgagcctgaatgaaggggtgccggcggagtgcgacagcgtagtggtgcatgtgctgaagctgcagggtgccgtgcccttcgtgcacaccaatgttccacagtccatgttcaggttgggtcttggggtggggcggggcggggcaggggcaccggtcccagcatggcacgggctgacccattcttggctcctccagctatgactgcagtaaccccctctttggccagaccgtgaacccatgraagtcctccaaaagcccagggggctcctcagggggtgaaggggccctcatcgggtctggaggctcccccctgggcttaggcactgatatcggaggcagcatccgcttcccctcctccttctgcggcatctgcggcctcaagcccacagggaaccgcctcaggtaaggtgggtggagggcgcttctgggcccctcgctgtgtgaccttggcctagcttccaacctctctgggctccaggcggggattcggtctccggggttttgctgggaggaagcattacagtaccactggccgggcgtgggtcctagtttccaaagcggtgagtgttcagagctgctctgtgggtgtggggatggcggcgggtggccatttcctgtttccagcatcttatgtttcttatccagcaagagtggcctgaagggctgtgtctatggacaggaggcaggtgaggtccgtggtgctctcagtgccccgaggagggtgggggtcggcctgacccgcttccgcccgtgcttctcaggtggcagggcagtgtctggcccccaggctgctctaggtctgggttcctcrctccttgtctgcttacctccctcacctctctgccccacagtgcgtctctccgtgggccccatggcccgggacgtggagagcctggcactgtgcctgcgagccctgctgtgygaggacatgttccgcttggaccccactgtgcctcccttgcccttcagagaagaggtgagcagggctgggtgggcatgaatgtggaccgctgaacccagacagccaccccaggccttgtgggcaggccttggagcccctgtctcctgagaaccgtcccccaggcctctgaggccagggcgggttgctcctccacagacggccaccagatggagcccttgcctgcatttggaaatcctcaggctttttttttttttccttttctttctttctttttttttttttttttgagactgagtatcgctctgtccctcaggctggagtgcagtggcgcgatctcggctcactgcaagctccgcctcccgggttcacgccattctcctgggttcacgccattctcctgcctcagcctccygagtagctgggactacaggcgcccggcaccacgcccggctaattttttttgtatttttagtagtagagacggggtttcaccgtgttatccaggatggtctggatctcctgacctcgtgatccgcccgcctcggcctcccaaagtgctgggattacaggcttgagttaccgcgccggccggaaatccacaggctttcaaaggtgcccagcctcagctgctggcaccagggatgcaggaatcatttcccagcctgctgaccttcagcaaacagcagcctttctaacagtattcctgtccacrttttgggagcagcacgccacgctgcctgcagaccccagctcatgtagcctgttcctgccagacttgctgctacgtgagccagggtctgcaagcagcgtggtgtgctgctccccaaaataccaccacagcagcctgttgctgagacaggctgggcttgttgctttctgtggcgaggcagcactgtcttgcaaagccttaggatcatctcagagggcaggaagggtggggagatctgctgagattttgaagtctggtttaaggtggatctttcaacatgggggttggttaagattggtttaagttggttaagattggttaagatccttaatccccatgttaaggattggtgggcacagcagggtgtggattttgaggcgagaggtgtcaaccgatgcttcctgttgaagagttggaatgaatcggaaggttatttgtgttatgtgtgttatttggaggaggtgggggagtggccagtggtcatcttcctcccagctcatcccctactgcggggcatctgagaccagtattttgctctcttgagtgttctggttgtgctctggtcctggtactctctctctctctstctctgtgtgcgttggggttgaaggccagaaacagccaggttgaggctggggccagatgtccccagtgaggcaggtgctgggccctaggtcatcctctgtgcccactccaacagagtgcaggagctgtaaagttagattggtgcagacagaggaagagtgaagtcacgttaatgtagacagtaagctgtgtgacgtaagccccgtttctcagcagtccagcgattgtctatcttgtacagacctcttgccctcgccccagccaaggttgccttggaaaggctgagggtttgtggacgggaaggagagtgggccttggtgtttcttgggagtggggcagcagggcagatctgggctgggtagggtgaactccccctccccaggcagagggagatattctaaccgaacccacggggataggcagccgtgaagtccttcctcggaggagaggaggagatgaggtccctgtctggaagtctggaacagtttatcatgagagccaggacaggtggtggagagcctcagctcagaagacaggatgcctgcattccagacctgtcttgtcactctgcattgggtagctttgggcaagtcccagtcccacctaatctccctattgagacytcaagcctcagtttcctcatatgaccagtaggaatccttatccttgctctgcccacctgagtcactgtgaaggtgttttatgaaagggtcagatgcagaaggggctggcctcgctgactgcagcctcgcagctgtgtctggggctgagtagtttctctgatctctaggggtcctgcctagkgttgtcttctcctgacctgcccctgtcccctgtgttttccctccaggtctacaccagctctcagcccctgcgtgtggggtactatgagactgacaactataccatgccctccccggccatgaggcgggccgtgctggagaccaaacagagccttgaggctgcggggcacacggtatgactgcagggtcctggaartactggcatctcctcccctcacgggaagccttcctggtacccatggctactccatccctggcatcctggcactctgacgatgttgtcgtcggggtgaactgtgrccctgtgggacaagtatatagagggctgatcaagagtattggagtgagtgattgatggagaactttagccctgtgctgtgtgatgtgtgagcactgcatgtggggaggctcttcagctctaaacagtggtgcacagctgtccagaggctcccagggccagtgggttttggtctggtcattacacaactttatgtgtggctccagacttctctcatgctgtgcattccacagtgagttttcatgggtcagtaaggctgcctttgtagctctagtgagagctatcttgtgggcagggttggtccaatccatcctcagggccgcccagacagcatggggatcatgaagccagttgttaggtcaggaggccttacacccctcaatccctgcagctggttcccttcttgccaagcaacataccccatgctctggagaccctgtcaacaggtgggctcttcagtgatggtggccacaccttcctacagaacttgtgagtgatagtgggctttggggtcttggtgggatcagacaagtaggcagacctgggggagcagcagggtgtggtgatgcctggatgggccttagctgaatccaacaaaggcctgagcactctgggcagggacctcgctgtccctccagctgggcacattgagcctggagatcccttgccagggtgccagcccgagkggaggctgggttgagtatctgtggcctacccctgatctgagcttgttgtgaggtaggaggtgggcaggaggttgcctctctgtttgggaaggatttgggccaagggcaggatccaggcaggagggtgggggtttggacttgatgctgtgactccaggctctgtctgacttgagccaagtcttctttttgagcaggacctcagctttctctcctgtaaagtgggtgggttggaccagactccctttaagggactttgcagagctcatttttagagaagttcgttcctctgggatgcttctagtcattaaaggtgtcaggggcagagaacaggcctgcaaaggtgcctcctggtgacatacctctgctggatggactggaacccttcagaacacagtcccccttcctccacttcactgatggagaacttggccctgcagcctggagcttggccctgcagcttcactcagtcaagggcccagcctgtcatgttcctttccttcccctagcagccaagtgtggtccaggcttcagtggaaggggtcactcctcactctggccctgggaatgagtccccaggatcagctgcctgagacctttccctgagatcttgagccagagatagcctcagagccctgcttcatgggcagcccaccctcgatttccccacctgtgcctccaggctgtacctccctaaggggaggtaccctcagggaggcctcatcagggagatgttgccctcagttcttagagctctgagctgggtttgctggagagggataccctgagtcctgccttggggagctcccgtggatgtgggttgcagcccaggcatcccaaaggatcagcagaaacaaacggcatgtttggaaggagggagctgagtctggtgaggaggaggtggacaggatccctgcatagagaatgggattgctgtgggccgggcgagcaagctgggaaggatgtggggatgggagtgcctggaccgagcattttgyttcccagcaaaggtgatttcgtggacccctgcctgggggacctggtctcaattctgaagcttccccaatggcttaaaggactgctggccttcctggtgaagcctctggtgagggcacaaggagtggaggggctaggatggctgggggggaacctagggcctcctatcgcatgatcccccatggcctccctcagcctctcttggtttgggcaggcatggcctcctcttctctccagtccccacccagactgctctcctcctctgtcccctgcgatcttcagccaacccgcatgctgaaaggggtgccgacctgggccctggggggaggcatggagggaggggtccccagtggcttggcctgaagaaggttgacgtctgccgtggcccagagctgagtcaccgaccctgcgtctgtcctgtgcagctgccaaggctgtcagctttcctcagcaacatgaagtctcggtaagggttcttctgtgtctagctgccggcccctgcctgtcctgatccgagtctgggtctgggtagtttctgacaggaaaggacttgagggaagtagcctctgaggctggaagtggcccaggcaggggggcaacctttgtggccttcagatgggactttgaagttgtcttggcaaggtccagttctggctggagagcaaaggcctgagggggacaagaggatgggggagttggaggggaggaggttgacctggctggggcatgagtggaaaggaccaggaagtgggggttggcctgggccaagggtggggcacccgggagagatgccactgttagagatctgagctgacctgagctgcgccaggccctacttgccccttagtggctggggctggaaaagcagggcgtaaacctccctgtttcatgccctgacgtcccatggactcactccttcccttaccaccaggcttcaggactggcagcagctatggcctctcccgtgtcctgagggtagcgaggaatcgggcctgggctagtcctggctctgctgtggagtcaccaagtgccagcctgtgcccctctggggcctgattttctcatccagacagtaggggtttgaacttccctctcagagctcccatggggttgtgaaggrtccacggargggtgagatctagagggttggcagtaggggtctgatgttgctgatctccgtggctgtgaccatcatggctggtgaccacactccttctgcccagttcggctggaaaactctgggaactgcagcacgagatcgaggtgaggccagagcctctggattggagcagggtggtggggggagggtggagttggacagggtacccgctagcagtgtctcgtggccactgcccccatggggctcctagactggcctgtcatcccccttccactccctggaccaccacttgggcccagctctctgacccttacttgcctagatgcccatcctttgaggctgggtcagccccaggctcctgtcctggccgcctttttgcccctctggagctgcctttgtgtggctccgcctcagcgggaagaggtgtatccacaattcattctggaggcagaacgactgatgccctctgagaggcagcactgcctgcccggaggacctgtgtcccactgtggctctgttcagatccaggggcaggtgmtggggccagagccaccccagccacagtccctgagttaaagagcctggggtgggctaggtctgagtgctttcacctggtgtgttgtgtcctcygcaggtgtaccgcaaaaccgtgattgcccagtggagggcgctggacctggatgtggtgctgacccccatgctggcccctgctctggacttgaatgccccaggcagggccacaggtgaggcccgacaccctgcctgtcccttctgtgaatctggccatgtgccctgcagggctgcgaggaaatggaagaagagccctctgggaggaccctgccctctcggggcccacagtctggctgactggagacatggcagtcatgtgggttgccctggcagggattgattttcctgtcatcagcactattcaagttggggatcttgagttacagaatctagtttggggaggtgatggtttgaagtccaggtgggatttagataaatcaagaaaataggggccagggcggtggctcacacctataatccgagcactttgggaggctgaggctggaggatcacttgagcccaggagctcaagagcagtccaggcaacatagtgaggctcctgttgctacaaaaaatagaaaaattagctgggtgtggttgcatgttcctgtagtcctggctactcggggggctgaggcaggaggattgcttgagcccaggaggtcaaggctgcagtgagttatgatcacaccactgcactccagcctgggtgacagagtgagactgtctcaaaaaaaggaaaaggaaaagaaaacaggaacagcattcccagtggagaaagtacatgggcaaaggcatggggcaaacatcagtgggttgtccagcccggccctgaaatctgaattcctgggctttgtcactcagacctcagtcctgggagagagcctttctctggctgtagacacagggtgccatttcatatgaggtttgactcaggcccggagttggcactgaagattctcagggcctgctgcagctgcctgtaatgtgttccaggggccgtcagctacactatgctgtacaactgcctggacttccctgcaggggtggtgcctgtcaccacggtgactgctgaggacgaggcccagatggaacattacaggggctactttggggatatctgggacaagatgctgcagaaggtgaggactgacctgcccctcaactggactcactccccaccctgactctggccgctgtggaggaaacagtaccagcactgcgggtttgccagcctttcttaagcaagacctgaaggactatggcctggccctacrttgtggcctctctctagctgggtgcttcctgggcctgggggtggggagtcctgccttgctaaccctatcctgatgcctgtatcccctatagggcatgaagaagagtgtggggctgccggtggccgtgcagtgtgtggctctgccctggcaagaagagttgtgtctgcggttcatgcgggaggtggagcgactgatgacccctgaaaagcagtcatcctgatggctctggctccagaggacctgagactcacactctctgcagcccagcctagtcagggcacagctgccctgctgccacagcaaggaaatgtcctgcatggggcagaggcttccgtgtcctctcccccaaccccctgcaagaagcgccgactccctgagtctggacctccatccctgctctggtcccctctcttcgtcctgatccctccacccccatgtggcagcccatgggtatgacataggccaaggcccaactaacagtcaagaaacagctcctcgtctgtgtggtttctgggcgtcatcgtgagggtggggkttggagcctgttgagagcagggctggcttgactgtgcatacccaggctccagccatgccagtctcctgctccacaacctcccctggtgcccatcacccacaggaggggtgcaggcttgtatcccccagcacttcggccgtgcccctcctctctcacctacactaagccctgctctgctggacactgcccttggtctccttccttcttctgcttctttccctgcctagaaagctctttctgttcctctgctttctatcctttgagacctgactcagatccttctctctccaggacacctttcctcctccctctgggccctggagtatatgggctatttcttcccagtctgccctgtgtggtgggcattggtgggtgtgtctgcctgccttagcacactggctttccttgacggcagggaacccattgccacatctctgtcttctgtggccagcacggcagcaggggaagcactgagttgggttgcagagagtccgaagtgctggccctgagctgctgctgtttgggagaggagcccatgggcctggggaggccggcatgagacaaggtgacctggtagagtgtgctctcagggctggccaaggcctggattgccctgggaaggtttcctgaaggaggtggacgtgtgttgagtctagaagttttccagagactgagctaggggttgaggacatctcagagagaagggacagtatgcccaaagatcagggtgggtttgctaaatggcaggcatgttgaatgggcacaggggaagcagagatataggtgaggacagatcaaggtggacttgggcagccaggtcaggaacttgagttctgtctcaaggacagtgggactctggaaagatcatagctcggcctgaggactagactcgtggggcaaaacctgtagaagggtaaagaagctgctccatgatccctaatttggggagaggggcctaaagcctgaaccttggcccaggggtaaagaggggccctttgggaattgacaggatggaggtgagctgtctcagctcgtctgctatccacctcttactggactatgtcacctggctggtagaaaggtggcatctgtagccgaccctaggagtttccttctttttttttttttttttagcagagtttcgctcttgttgctcaggctggtgtgcaatggtgtgatctcggctcactgcaactccgcctcctgggttcaagcaattttccacctcttgggttcaagtgattctcctgcctcagcctcctgagcagctgggattacaggcatgcgccaccatgcccggctaattttgtatttttagtagagacggggtttctccatgttggtcagactggtcttgaactcccgacctcaggtgatccgcccacctcggcctcccaaagtgctgggattacaggtgaaagccaccatgcccggctgaccctaggagtttcttaaccccattagcccagttgctttgctcttccctggccccagccctaattctcctgctggctggagatgtttcagagcctgagccctctaggtagggcaggtccacggctcctacctgtctgtctcagattctttctagaagagttgccttcccaagacttccttctccaccctggttttcatactcctccagaagtgctttgccctccaggttgccacacccattggcgcctgcaccatctcccagtgccatccctgcctctgtggggccattttcagggcagaggtgaggtcccaacctacatggggacacccagattgggacatctaggtagatgcygcactttgccctgatttcttgtaaccactgctgtaattttgcctttttcataaaaccactaccatctgccccagcttcctcctcctgccccatttctctctttcagttaccgatatctttgtgccttcagacacgaggctgcagagtggaggtgccttcactcgttcattgattcagcccttggagcctcagcatggccatgtccagacctcagctgacctgagtcaagcctgggcttctggggacgtggacattgacacaaacacatctgttcctcctgtgattagggctgggggacaggatagacaaggggtcaaatgctgccaaggggagggggaagtggtcactgaggctagtacatggccactgtgtttcatctccaccaccatgctctagtccaagccacctccctcatctggacgctgcagtgacttcccttctgggctccctgctttcaaccctggctgccctctaatccattctccacacagagctggaatgatcttttaaaagtataaatcaggctaggcgcagtggctcatgcctgtaatcctcgcactttgggaggctgaggcgggtggatcaccgaggtcaggagctccagactagcctggccaacatggcgaaaccctgtctctactaaaagtacaaaaagtcttgacaggcatggtggcgtgcatctgtagtcccagctactgaggaggcttggaacgtggctccaatgtcaccttccctgctcacccatttataaaacggcctcctttatttctttttctttttttgagacggagtctagttctgttgccaggctggagtgcagtggcgcgatctcagctcactgcaacctccacctcctgggttcaagcaattctcttgcctcagcctcctgaatagctgggattataggcaagcgacaccacgcccaggtagttttttttttttttttgagatagagtcttgctctgttgcccaggctggagtgcagtggcgcgatcttggctcgctgcaacctccctctgcctcccgggttcaagcgattctattgcctcagcctcctgagtagattgaattacaggcacgcgccaccatgcccaagctaatttttgtatttttagtagagacagggtttcaccatgtcaaccaggatggtcttgatctccttacctcgtgatctgcccgcctcggcctctcaaagtgctgggattacaggtatgagccaccacgcccggccttggtttcttgattatctcaagctgggccctgcttcagagctttcatgttagctcttctctctgcttggaacacgcagctccaatgtcaccttccctgctcacccatttataaaatggcctcccttgttactctcttttcttttttctttttttctttttttctgagacggagtcttgctctgttacccaggctggagtgcagtggcatgattttggcttactgcaacctctgcctcccggattcaaccaattctcctgccccagcctcccaagtagctgggattacaggtgtctgccaccatactcagcgaatttttgtatttttagttgggacggggtttcaacatgttggtctggctggtcttgagcttgtgatctgcctgcctgggcctcccaaagtgctgggattacaggggtaagccactgcacccgagcccttgtttctttctttcttttttttttttttgttttttttgacagagtctcactctgtcgcccasgctggagtgcagtggcacaatttcagctcactgcaacctccgcctcctgggttcaagcggttctcctgcctcagcctcctgagtagctggtattacaggcgtgcgccaccacgcccagctaatttttgtattttagtagagatggggtttcaccatgttggtcaggctggcctcgaactcctgacctcatgatctgcctgcctgggccttacaggcatgagccaccacgccctgccccttgttactttctaataggttaccctttgttctttttttttttttttttttattaagacggagttttgctcttgttgcccaggttggagtgtaatggcaggatcttggctcactgcaaactctgcctcctgggttcaagcaattctcctgcctcagcctcccaagtagctgggattacaggcatgcgccaccatgcccagctaattttgtatttttagtagagacggggtttctccatgttggtcaggctggtcttgaactcccgacctcaggtgatccaccctcctgggcctcccaaagtgctgggattacaggtgtgagccacctcgcctggccaccctttgttctttgtagcattatcactctctgagctctttgatgtttttttgtctcctccactaaaccataagcttcctgagagctgtgctttgtcttgttcatcacttgttcttggcttagaggatggtgctccacaaattctgggatgataaagtgtggctgtgtgaggggccaaggcactgtgctgggtgctggcagtgacaaatgaggcagccctggcccctgtcctcgtggagctcacattctggagggatttgttgaatgaacagaagggggacagagagttgtgctaatgaagacctctaaatatttaatgtctggagtgataacatgacttttgatccggaaaaaaggggaaagggaattctagaccacatttactgagtacctactatgagccatctactttctgggcacttcacagtcatgccatttaatcctctgtgaaccctatgatgggcatttttgccccccttttacagaaagtttacgtatcttgcccagggtcccacagctagaagttgggggcttggaaccgaaagctaggccagtctgtcagcaactgcatgaggtctttctgttgatgccaagccccagtgagtacgatggccagaagagtgagagcacaaatcagcctcctcctcatacctctctgaccaccagtgtgctggtggctactgcctgttttcatggcctttccccttctcaccgggtccactgccacagcttctttttttttttcgagacggagtttcgctcttgttgtgcaggctggagtgcaatggcgagatctcagctcactgcaacctctgcctaccggattcaagtgattctcctgcctcagcctcccgagtatctgggattacaggcgtgtgccaccatgcccagctaattttgtatttttagtagagatgggatttctccatgttagtcaggctggtcttgaactcctgacctcaggtgatctgcctgccttggcctcccaaagtgctgggattacaggcgtgagccactgtgcccggcctgccacagctttttgcctcgcttccctgggctccagactggacatctccaacaatctttcacatggcagttaggcaatctcatgcttaaaatctttggactcacttgtgccaagtccagaagccttgttatgacctgcaaggccatgattaacctgaccctgcagctggcccctgcggcctcatctcctgcccttcctcagtgctcacagcccggccacgtggcctgcaggtaatgttcagaacaccgagtgatctcccgcctccacgccctttgctcttggtgcttgctgtgcctggagtgttgttcctggggtctccacctaaagaccacctactcgtccaaggtgagggcaattgctcttccaactctgtcaggctgtgttgaaagagcttctttgtgcttctgcacgtggtcgaaagcaaggtctgtgtattaatagaacccaacatctgttaggctgtggagttgaatacccattatctcatttggaaagtgggcattactatttccatttaaaaaatttatttatttatttattttttgagacagagtctctctctgtcgcccaggctggagttcaatggcacgatcttggctcactgcaacctctgtctctgggttcaagtgattctcctgcctcagcctcccaagtagctgggattacaggcgcctgccactgtgcccggctatgttttgtatttgtagtagagatggggtttcaccacgttggccaggctggtttcgaactcccgacctcaggtggtccacctgccttggccaaagtgctgggattacaggcgtgagccactgcgcctggccttttttcttt

SEQ ID NO: 94766 - DNA, 96671 bp, Homo sapiens
ccttcatccagctggagcaggaagaaagctgtacttcctctggcagttaactttgcacagaggaaagacacgcccaaacacatctgatctccaggcatgcctacaaatcccaaggcagcttctagaaggaattctcctattgattgtggttgggaacgtggagtgaagaatgtgaatgacacagtcctgtccatccccactaccagacgtacaaattggagcaaagttttgagcaagacatcatcattatatcattatgtttgagggaagaacataagagattgttaaactgctttctagtgtttcaaggtgaaaagaccaagggtgggagttccacatcttcctgagagcctgcctctatcatatgctgttattctaggaatgatctgtagtctgttgctcatggagaatagtgggccataccaggtaaacttagaagaatgttgatttctttccttctagttttcttttgttaacagcttgggagcttttttcttttctttttatctgagagggcagggctgtaaaataagtgctgctgccttttcaaaccctgttaagatgttacaggttaataaccatgtgggctggtaaaattggggctaagatgattctttcacttgtaagaatgtatgaggtcacacataataccatgttagtcctttatacaccatttattcttctttcagcaaaatcttttggctttttgagtatttattgagtgcctacagagagaaaggaacagcacatgctgggacaggtatcttattactccttcccattattttcttttctgaatctttgcacatataagccactagcctttctgttgtctttccagagatgcttcacagaagacaaagagagacataactctatccactcattcatgcagcagtccgtcttttaacaatgtttgcttaatattctccatgtgctgcatttttactaagctgcgtggaaaccatggtaaaaaagatgaagccactatgttaaaggagcatacagtcttcatcaaatacaacagaaataaacatgaaattgtgatacatgacaatgatggagagatgtggtagctggaacaatgggggtttgaatttagaggtgaggtcagtgtcgtgcctgtgaactgtggttcgggtgatatttttaatcatagcattacaaaaatctggtgagtcatattaaattaagtttcaaaggtatacttcgaggtacattagattatgtgcaatgtattaccgatagtggaggagatagtttgatgtggtactagaaattattcaaagtggtacgtggtctgaggcccagcatggtggctcacacctctaatcacagccctttgggagtcccaggcgggtggagtagcttgcactcaggagttccaggccagcctgggcaacatggcaagacccccgtctctactaaaaatacaaaaaataaaaaataaaaaaaaattgctgggtgtggtggcacacgcctgtagtcccaggtactcgagaggctgaggtgggaggattgcctgagcctgggaggcagatgctgcagtgagccaaaatcaccccactgcactccagcctgagtgacagagcaagactccatatataaaaaaaattaaactgaatattagaaagtactccctgtcttattttcagccatgtgatttcagttaagcagagtctcatgtagatgctgtatgtcttaaacaccttttaacacttggtaaacaaactctccgaccctcatcccaccctgcttggctctgttttttttgttttttgttttttgtttttgttttttttttatttagacaaagattaagctcagaaaatcaacaggtggtagattccagctggtatttggtatcttatttgatttttcttgtatttatttcagtgtatccttttacttatggttagtgagttattattatataaaatttctttttcaaatttatttatttatttatttatttatttatttatttatttatttttgagacagagtctcactttgccacccaggctagagtgcagtggcgcgatcttggctcactgcaacctccgcctcttgggttcaagggattctcctgcctcagcctcctgagtagctgggattacaggcttgcgccacaacgcccagctaatttttgtatttttaatagagatggggtttcaccatgttggccaagctggttttaaactccggacctccatccgccttggcctctcaaagcgctgagattacaggaatgagccactgcactcagcctcagatcaattatttaaacaaactcagtcaatataaaaaaaattaaaaaaacatgataagcaaataacagccaaggtggtacaatgttatggcaaaactgtaaaaatagtgtggaaataattgaagtttagaggaacaagagcactgtgctcagaatgaggaaatctgatttgaggtccggctccctttgtactatcgtcccaggcaggcaatgctgcatggtactgagtgtgttatgagggatagagacttgccaacattaacagattattacaaagggtatatgtttgagtacagaaacctcagactttatagtgttagaggggagacaaaaacataaatagttgtgtaataactcaaagactgtgataagtattacaaatgggttaaaaaccctagacaaaggaaataggaagaagttaattacctgagtgtatgtatatgataagaatggctatcattaggctgggcacggtggctcacacctgtaatcccagcactttgggaggccgaggcgggcggatcacaaggtcaggagatcgagaccatcctggctaacacggtgaaaccccgtctctactaaaaaaatacaaaagattagccaggcgtggtggcaggtgcctgtagtcccagctactcaagaggctgaggcaggagaatggcgtgaacccaggaggcggagcttgcagtgagctgagatcgtgccactgtattccagcctgggcgacagagcaagactccatctcaaaaaaaaaaaaaaaaaaaaagtgccagggaactgactaggtgctttgttgtattatctcatttatttctcaccattcaggaactgggtttagagaggctaaataattgacccatgattaatactggtgatgatgatgtttacgactgaatacttattgtatgcccagccctgtactgagtcctttatatacatgatctccatttaagcttcaccacaagactctgaggtattattttccttttacagataaactaaggctcacagagatcatgaaatttgcagttagtgaatggtgctgttgcaatttgatctcaggtgtgttggactccaaagtctgtttcttcatcttctgcttcacttccaagtcagcagcagctgagctgagggaccatgagatggccatgcactgggatggtccattgagggctcttttgtgaaatgcgaggttccaatcttggtttctctaatgtgtgtcacaactctttgtttaataatttatactcctaaaagcataaagtcctagaatcatgtgggtggctagcactgttccatgacactataaggtaatgttggtaaagacatttcaaaagtagacaaaagaactaggtggtagggtaaggtagggctataggatagctagtctgtgcgggctaaaagccatatttcctgtggaaagttacagtcaattcttaatagatatgaaggaatcttcaggatgtactaaatccaacctcctcattttacaaagtagaggttaagggccaaaggtcatacattggcagaggaatcaggacaccacacatcttgtgtctcaatgctctgttcactatggcagtggttttcaaggtgtggtctccagatcagcaacctcagcatcacctgggaacttgatggaaatgcccaccttcaatccactgaatcagattctgtgtgtcaggcctctagcccaagctaagccatcatatcccctgtgacctgcacgtatacatccagatggcctgaagcaactgaagatccacaaaagtgaaaatagccttaactgatgacattccaccactgtgatttgtttctgccccaccctaactgatcaatgtactttgtaattctccttacccttgagaatgtactttgtgagatccacccgctgcccgcaaaacactgctcctaactccaccgcctatccgaaaatctataagaactaatgataatcccaccaccctttcctgactctcttttcggactcagcccgcckgcacccaggtaaaataaacagccttattgctcacacaaagcctgtttggtggtctcttcacatggacgtgcgtggcactatgcagggggagctcagcaacacgtttcaacatgccttccaggtgattctgatgcatgctcacttctgagagccactccaaagaagtatctgctacatattatacacatatrcccccacccccagacccgcaagttcttcctctttgttcccagaaaaggtttgaaggggctcagtatcaggtctacagcacactgagatttatttatttatttatttatttatcatttatttgagacagagtctcgccctgtttccgaggctggagtgcagtggcgtgatctcagctcactgcaacctccacctcccaggttcaagtgattctcttgcctcagcctctggagtagttgggattacaggcgtgcaccaccacacctggctaatcattctatttttagtagagacggagtttcaccatgttagacaggctggtctcatactcctggcctcaagtgatccgtctgccttggcctcccaaagtgctgggattacgggtgtgagccacagcgcccggccacactgagacattttagagggagatcagtctatggaacaaatgctggcctggggctggtggcctgggtgtgctgtctggccaattttgtgcgtggagtaagcagtggggagaggcgctgggtgtcaggaaactatgccaggccctgccctccaccaaccccaatcaaagagctgagagggggttcttctccacaccatcccactacttgtgtccctcaccttctctgagtcctgggtattggtgctgggaactctgcaacagatttcctgaaggcaggtggcctgtggaaggaaggcagaggagggggcctgcagaatgcaaaggtgtacggaaggcatctctgcgcccctgctgaagatttttcactttatcctgaagggaagacaatatctgaggccgggaaataataaatattgattttcactttatcagtattcctggcagctgcacggaaaatggaatggcacagaaactggagtcttatgggcacttatcccactagttggggtgggaaattaaaggctgtgtgtaaggtgggcacagatctaacagaatgtggattgggatatgcaggggagggtggagtgggggaagacagactccatttggacttggtgagttataggtgcagcaccagcataatgcgcatggaagtcctggaatcatttaccaagaaggtcctgaacacaggtgagggacatccccttcttccctgttccctaaggcgcctagactttggagtcagtcagtcttgggttccagcctcccgctaggacgcaatttcttgagagcaggattcgatctgttgttcacggctagatcctaagcgcctagaatagtttctggcacacagtaggcactcaataaacatttgcagaatgaatcaatgaatgaatggtcacgctccattcctcggctgtaaacacaatgaaatcacctagccgcaaacttggcgcacagtaggcgctcaacaagttgtatttttcccttcccttgcagtagaccgcggtccccaggcgaccgcgaaagaaaaaaaggggtttctctacctcgcgtggtctgcacctcgcttcgcccccgcagccctcgctgggtcgcagggagcacgtgggccaggcaggctgggtgggagtggagtggagtggaggggagggggcggcggccagcggctcgcgcggagccggtctcccgggcttacgtaaggcgcgagtcccgcgcggccggccggggctccgcgactgggcgggcggaggcggcgccgccctgcaggatccgggctggaagcctctcggagtgctgcctccagccaaggtgtgtgtttatttkattgcttttggtggcgaggcgcggggctcgggctcgtcgcgcgccccatggccggggagcgcatccgccaaccccgggcggaggtgggcccctccgagcgcgcgcgggcggcgggcagcggcggcagctgagactccgggggatgtgacagccgccggggaggggacgagacgcagaccacacgttgcccacgtgcgaggaccgggcaggggctcagcccctaggccgcccggtgcgtggggcggcgggggctggctttgagtcacccccgcttgtgccagcttccccggctcggcggagactggcttggggatgcctggccgcccggcccccttctcggacgcggcgtggggagcgagctggagttaaggatgaaggtgggactggccgggccgacctctgacccctggaggccgagtcggcagggcggggcacggcgcgcttcagcagctttgcgtgggggcgaggaggtggaggagggcgaggaggtggagaagggcggggaggtgtagcgtggcgctcagtccgcctgctactcggtcccggcgctgggctgaggggaggggttgtcttaaaagtctctccttccccctgtaggggcggccggcgagtcccagtgagagcggagggtgccagaggtagggggccgagaaacaaagttcccggggcttcctccggggccgcggtcggggctgckcgtttgaccgcccccctcctcgcgaaggcaatggcttccaaactcctgcgcgcggtcatcctcgggccgcccggctcgggcaagggcaccgtgwgccagaggatcgcccagaactttggtctccagcatctctccagcggccacttcttgcgggagaacatcaaggccagcaccggtgagggsctgcggggacgagggcygggggcgagccgcgttgggctggggtgaggccctggagggactggggctcccggatcrcggcgcccttcccccgcccgcgtgtggtcgtgcaggctcgtacgtgccggggcgcatgcagctggcggccgcgcggcttaaccgcgcctggggaggaggccgaggctccaggggcggccggtgggaggtgcccacggctcctctccaccgctcctcctgtcgcgaggaatagcccgagccacccggccgagggaacgagaactaggcagggaaaacccggagcttccgtctcacgctgccctccttaaggcagagccgtccccgtaccccttagccctggccccctcccccgagtccctagagagccgcgcgccccctcccgcgggagcccagaggcggagcgccgcccacctgtggcagtcgggcggggccgcgcgccggggaacctgtggcgccggggggctcgcagcctcgcgcctctccagcccctccacgcagcctcgggcctcggggcagagccctgggtggctttgaaaggcctgtctgttcgttgtcgccttctaaggtaaactctccccagcaactcccccccctcccgaagccgccgggcctggccgtcaggagactcggaggagactcgttctgataaattacattttgtaatgcagctttcctggaaatggcttcttgagctgcctcccttggcatgagatgcctcctttggctggcgtggtgaacttggggatatatagatcgcctgatttcttagtctgacggggttgagtgcgtccctttccccctctcctcccactccacgttcacaccagttccgaaagaattggcgttaaaaggcgagaggtagcggttgtgctgctgcgaggctcttaacccttctgggatggagatgctggtaattagcaactcctttatgaaaagttgttcttcccagcaggggtcctttactgtcgatgtacttctcaaggatgtccgggctggttattgcccatcatggactaattatccggagatctgcatttcagaagcacagactggcttgaaaaggaaggtggaggacagtaccagaaaacaaaaggaaagcttaaaagcaaggaattaagaagtatctccagaattgtattccttatctcttaagcagattgaaaaagcggacttttacaggaaactcttcccccacccccatgtctcaaaaggaagaattatgtgtaccagattgcacttgagttttctgttgtgggtattgttacctcaagtgcgcctattttgattttaatacattcacatgcattttattcttgaaatgctgcggtttgaggggagagcggcctgagggggaaggctggctctcatcctaatggttttgtgtttaggttgggcttcttcatggtaggggcatggagtcagtgaaggaagacagtgagaagagatgagcccattccataattctctgtacctgactaggagacttgtttccttctatgagcccattccataattctctgtaccttacttggtgacttgtttccttctggaatgaagggcttcacactgtccatcctgggactggactcatagccctttccatgtttaaagagagtgtgatgggaagtagcttatttctgcactttcttaggggctttgaaaattttccatttgctcttttcccttgttctctctttctctctctctctcttttttttttttaactttcctgtgttctaaattttagttttcattctctttcaaatgccttcatttcctccccagtgatcctccctggagtgagaaatgactatgaaatgtttagattttcttttttctgttgggaatcaagcagctttttgcatgagccaattaaaaaaaaaactttatcaaagaaagaagaaaaataaaggacagcaatttgttttgaaagtggcttgtttctagtgaactttcgggttatcggattatttttccctctcagaaggtctgagaatcttataggcttactgcctggtaaataaaacattcctttccacggtatttatttttctgtctgttacctgctgtttgcttttagctgatttcctggtgggaaacacaaccacccttctgtatgtaccctttataatggaaggtttgaaggagacgatgaagcacaacaaaaacccaggaaatagaaccgtgtaggaatttgaattggaaagtagctccggccatctgctccagcctggatttgggcacactcttgtctacatggctttcctcctcctgcagcctggtgaaaagctgctctttcaggaaagggccattctgatgtcattgcttcttggaagtcttccctcacctgctctggcagaattcatctctttcctctgcacataactttttttttttgagacgagtctcgttctgtcacccacaccggagttcagtggcgctatctcggctcgctgcaacctctgcctcccgggttcaagcgattctcttgcttcagcctcccaagtagctgggattacaggcgtctgccaccacgcccggctaatttttgtatttttcgtagagatagggtttcaccatctctacgaaggttcgaggtcaggctggtcgcgaactcgggaccttagatgatccacccgtcttggcctcccaaagtgctgggattacaaatgtgagccaccgcacctgacctcctctcctctgcacatgtcttattgattctaatgttgcagtcatatatcatgcagtgtaaaaatgcctgtctcacacccagtaagatatctgctgagtggctgctgtgcgtcaatgttctaggtgctgggggcaatagcattaagataatcttgtgcctcttttattattatttatagataggggttttgctttagtgcccaggctggtctcaaactcttggctcagtctcccaaaatgttgggattacaggtgtgagccactgcacctggcccattcttgggccttttgttctttctgcctataccattgtacaatttccactstgaaacttggaggacagggatcaggcaaagtacctaatgtataaaaggagcttaccgagtctgtattaaaggcctgggtcacaaattctagacagtacatcttagtccagaagtcaagcaacctatagcatagagaccattttgtttaattagctctgatttatggtaaaagtwtgtgcttaatatggatctgagattagcttcatggtagctgtcacccattggcccttcctacactgcctagagtggtacaggctgaggcttatcagatacctcatttgaagagtcacmcccatatctttggctcagattttctttagcacactgcaagagtaaatagaagggagagttctcttagattgccaggagttgggtcttaccctctgttgtaagaaatattagcttttctctgtgtatgtatgggtatgcacatgtatgtatgagtatacacacacacacmgggactggcactctattgagtgagtcctactacaaactctgaacaaattctgatatttaatgatagattcttttattgggtcatatctaaaggatatgcaaatcctgttttaaaggttggagaaatagtggtattttttaaaaccacattatactggatctactatctcaagtgcaggaaaactggcacatctccatttggaagcatcttggagttaattgagataaaagatgttaaggaacaaacctgtttctgcacttgctatctctctctctctctctctctctctctctctctctctctcttatatatatatatatatatatatattttttttttttttttttttttttttttttttttgagccggagtctcactctgtcacccaggccggagtgcagtggcacagtctcggctcactgcagcctccgcctcccaggttcaagcgattcttctgcctcagcctcccgagtagctgggactacaggcacacaccaccacgtgtggctatttttgtatttttggtggagatggggtttcaccatttggccaggctggtcttgaactcctgacctcatgatctgcctgcctcggcctcccaaagtgctgggattacaggcgtgagccaccgcacctggcctctgcttctcaatattaactgcagctcttgctggagttttgctgatgggactagcatttcaagttagtctatgggcccagcctctttttgaaaagatggcctagttcagagggctcagggttctttttggtgctcattaagtataaatgtgtgtcttatgtaagagggaaaacttctgagaactggaagatagaaacattgtattagagagacttgggagccagagttcaacaatgtatctaaaacaggtttcaatagttatcctttttatagatcatacagagtcttggcttattacagggtttctagagtatgttctattccatttccccccctagctggrtgagactcaggatgtagcacaggtcaagcaagggtctgactggttttgagacctctccagtccaaaggtccactccatatccacttattgttgcttttttggtttctttgaggattttcacacatatttgaagaacactatttgtgacttgaataaggcattccatgacagtaagtctgccttagccacatgtacatctgaatctttgcacattcttccagtgggattttttttcttcttctttttgagacatagtttcactctgtgacctaggctggagtgcagtggcatgaacacggcttactgtggccttgatttcccgggctcaagtgattgtcttacctcagccccttaagtagctggggctacaggcatgcaccaccatgcccggataatttcgtatttttttggtagagttagggtttctacgtgttgcccaggctggtcttgaaccccttagttcaggcagtctgcccgcctcggcctcccaaaatgctgagattacaggtgtgagtcaccatgcctggccaggatcattttttagaagtagttttttctgatcaaagtcatgccttgtacaaaatttagaaaatataaaacggtagaagaaatgaaagcagcaagtaaaagttacccttaattccttaagggtaatttaagcaaataaattaaaggtgactgtcttaggttgtgtgattagggaaggcctctccaggaggtgaatgtcctcattcataccgtaaacaatgagcttgtgatgattaggaacaggttgttccaggaagaaggaacagcaagtgcaaaggccctaaggtgggaattagcatagcgtgtctgaggaacagaaagaagtggcagtatgtttggagcctagcaagtagaagggatgtggaagtaggtcaggtcagagagacgagcaggtgccagatcaggtagagcctgggggatcctggtaaggattggattttattccaagggcactggaaagccaaggaagggttttacataggacaatgacatgaaaagatttactttctaaaagttgatcttttgcctgctgtgtggagaggtgactcaggtgagcaagagggagaccagtatggatgaggagagtggcctgtggtttgaacttgttggtggcaaaggaggagagaartaaagggatttgggatatatatgaaggcagagctgactggatataatgaattggttgtgagaggtgatggagagaaagaagtctacaatgaatcctagggttttgccctgagcgcctgcctgggtgaatgtgctatagggttgaatgaactagaatgtgtctaaccaatcttttgtggaacatttgggttatttgcatactttgctgattaagaatgcccttggaagagcacatgcatgggctagctccttccttttatcttgttgcactcctgacagcaagatgggtcaccagcagctgtactggagccactgctgaaaattcagccagggttctcgctcttgtcgcgtctgttcaaaccggcactgtctgatccagaaatgtggcctcaatacgtgctgccagtgtttccgtcagtacgcgaacgatatcagttttattaagttggactaaatgatcctccttcaaaggattatccaaggcatctacccaatacaaaaccacgatagttctttgtacataaaataaacattcaaacaaagaacgctcttacaaatgtcattgtgtacaaatcactggacagatatactttctctgggataggtttctaggaatgaaactactggccaaaatagaacttaaatcatagggagaattttttttttttttttaagacgtagtcttgctcttgtcatccaggctggagtgcagtggcgctattttggctcactgcaacctctgcctcccaggttcaagcaattctcctgactcagcttcccaagtagctgggattacaggcgcccaccaccatgcccagctaatttttgtatttttaatagagacggggtttcaccatgttggccaggctggtctcgaactcctgacctaggtgatccacctgcctcggcctcccaaagtgctgggattacaggtgtgagccaccacacccggccgacatagggagcgttttaaacgtagcttacaaatattcactcaagttcttggtagtttataggtgctactttatttgtgtactttttggcttaataaatgtttcatttaggccaggagttcgagaccagcctggccaacatggcaaaattctggctctactaaaaatacaaaaattagctgggcttggtggcgtgtgcctatagtcccagctacttaagaggctgaggcaggacaatcgcttgaatccaggaggcagaggttgcagtgagctgagattgcgccactgtactccatcctggacggcagagcaagactctgtctcagaaagtaaataaaaaaatgaaaaatattttatttaggtatggatatatgtagcatacatataaactgattttctgattatagaaataatatgtataagttagcaaaagtttataaagatgaaaacaatcacttgtaatttaccaactggaaggaaaagtcactgctaatactttttttttttttttagatggagtcttgctttagatggagtctagccttgctctgtcgcctaggctagagtgcagtggcgtgttctcggctcttggctcgctgcaacctccacctcccgggttcaagtgattctcctgcctcagcctcccaagtagctgggattataggcacttgccaccatgcctggcttaattttttgtatttttagtagagacggtttcaccgtattggccaggctggtctcgaactcctgacctcaagtgatctgcccgccttggcttcccaaagtgctgggattacaggcatgagccaccttccacacacacacacatagattttgagttacattattattgcattgtattatagtattactgttttgaaaattgctttaacaatgtgtcatctagtattttccaattttgttaaatactgttttttaatgtgagttaagtactcatgtataattccaatattcaaatataatttgttattccatttttacttttgaaaaggtaaaaaggtacatgcagatagtaaaattttcaaataatacactaggaatagagtggaaagtttcatgcctatccctgactcttggttccccagtttctctccacaggggtatctgcttttaactttttttggatgtgtatccaaagattttgtcatatatctatagcatttatgtgtgtatagcagtgcctcttttttttaatgtacacatttgttctttgtattgcacttaagaaaaacttagcagtaaagcttagatagtggtttccatcagcatgtatcagtttactttattcttttaaaaagatatctgcattattttttattgtacagatatatcatagtttatttagcctttctcttacattttggcctcaggtcctttttaacacgtttgaaaattgagaaccaaagaagctttgtttatgtgggttacatatatagatgttaaatggatttgaaattaaaatttagaaaatttgccgggctcggtggctcatgcctgtaatcccagcactttgggaggctgaggcgggcagatcatgaggtcaggagtttgagaccagcctgacgaacatggtgaaaccccgtctctactaaaaatacaaaaattagccgggcgtggtggcacatgcctgtaatctcagctactctggaggctgagatttacttgagaattgcttgaacccgggaggcggaggttgcagtgagccaagattgccccactgcactccagcctggacgacagggcgagactgtgtctcaaaaaaaaaaaaaaagaaagaaaattgagaaaatttaaaaatattaattcatcaaaataacaataatccactgtatgttaacagatttctgtgaaaattaactattttccaaaatgaaatctaatgagaaaagtactgttatttttgcacatttgcaaatctttctggcctaatagaagaaaactttattgtcatatctggttcttcattcagtctttggtgctatgttgttttggttaaagtatttgaagaacatctggctttatacacatgtaattaaaggggaactcatggacccctgaaaaggtctcatggactcacaggagtcctgggaccacaatttaatcagtcccctgttgattggaattcaggttatttatagtcattcgatatacagagcatgctgcactgaatgtcctggtaaatgtgtctttcaacaaatgtttgagtgccaggcaatcttggcttgtgggatgcaaagaggtgaaacaaggtctgttcctgaaggagctgctgttttttggtggaggcaggcagtcagacaggcaagcaaacaagaagaaaataacacaattgggctgggtgtggtggttcatgtttgtaatcccagcactttgggaggctgaggctggaggattgctagagaccaagtgtccaagaccagcttggataacgtagcgagacctcatctttactaaaaataatgtaagaaaattagctgggtgtggttttacacacctgtagtctcagctactcgggaggttgaggtgggaggatcacttgagcccaagaggttgaggttgaagtgatctgtgatcatgccactgcactccagcctgggcaacagagcaagaccctgtctctgagaaaaaaaaaaattaactgaggctgcaagatgtgcatgcttacagaagaggcagctaacccagcatttaggaggaggtgagatttgggaaggctttttagaggaggcgattcctgagctgagttttgacaaatgagtacagctacaaaaagatggcatggtcattgtcacagcatacctgaaactcctcttgtagagtttgtttatggtccacaagaggtccttgcttttatggcttggccttaccttttctattatcattttagtccgcatccatctctaatgatattgtcaaaggaaagggttatcacgcctgccccatatcacctttccagccctcattgcttgtgcttgcctttaagatatacatacacatagtggcattgtagtatatgcatttaaacttcggcttttaacttctggaactgaaggatggcaaacaatcctaaaactagtaaattgggcttcaagctgttaactataaattcacccattctgaaaggcatgttgaattacctgttcccttcaaaatctaccaagtaaattgttaaatggtattatattatgctagtctgctctttaacaatctgtattggtgcatattgtgagaaggtttaaggagttggaaattttgtaagttttttagatgatgtactttcacaatggacaatgaatcagatatttcaaccatgtattttcctttagcaaactagattttttttttctttgaggcggagcctcagtctgttgcccaggcygaagtgcagtggtgtgatcttggctcactgcaacctctgcctcctgggttcaagcgattcttgtgcctcagcctcccgagtagctgggactacaggctcctgccaccatgacctgctaaattttttttttgcatttttagtggagacggggtttcaccatgttcgccaggctggtcttgaactcctgacctcaggtgatccacctgcctaggcctcccaaagtgctgggattacaggtgtgagccactgcacccggcccaaactagattttttttaaaaaagcatgagtagataatagaggcttttggattactctgtgtattttaccccctccacttgatgtttaagctctcaggttggcctttaagacatagtacaaaaggtcttgtttgtacagcttcatgtagttgaatttaaatggctgatgttatattttaacagtctcacctctaagttctgagagtttttgtactagttaaacaacagatccaggagcaagcatcccttacttagccagacagataatactgaaataatgcagagtcattcttgtttatcatctaacttccaagaagctagaaatcaactattttctgatcttcagcaccttctgtctgggcagcagtaacctgtaaccctggcattttataattcttgtgacttggtcataaccaacatttgcagggggcgaagcaactgccaggccctggactgactaatgaatgcaaattatctctaattcccacacagatctccagagcagtttttgttatatcatttgctttacaaataaataaatggcctcagaaaggttgagtaactaacttggtcaggtacagtggctcacgcctgtaacccagcactttgggaggccaaggcggatggatcacttgagcccaggagttagagaccagcctgggcaacatggcaagaccctgtctctacaaaaaataaacagagttagccagagtggtggcgcatgcctgtaatcccagctacttgggagactgaggtgggaggattgcctgagtccaggaggctacagtgagtctatagtgaggctacagtgagctgtgtttgagccactgcaccccagtctgggcaacagagcgaaaaccttctcaaaaagaaaaaaagttggccgggcgtggtggctcatgcctgtaatcccagcactttgggaggcccaggcaggtggatcacaaggtcaggaattcgagaccagcctggccaatatggtraaaccccgtctctactaaaaatacaaaaattagctgggcatggtggtgtgcgcctgtagtcccagctactcgagaggctgaggtacaagaatcgcttgaacccaggaggcggaggttgtagtgagccaagatcgtgccactgcattccagcctgggcaacagcgccgagactatgtctccaaaaaaaaaaaaaaaaaaaaagttgagtgacaaatatgtggcttcagaaaggttgagtaacttgtcctaagtcaaacagctagttaaagagaaactagcrttcaaacctggggctccatagctaggattaaacttcttcccattatgtcgtgctgacatctgagtactctagaaactagtgaaatactcatgtcttataaatgccatgtagggacagtgtgtcttagtctgtttgtgtggctataacaaaatacctgagatcaagtaatttataaacaacagaaatgtatttctcactgttctggaggctgggaattccaagatgaaggtgctggcaggtttggtgtctaataaggcctgttgactgcttccaaggttgcaccttgaactttgtattctcacatggcagaaaggatggaggaggaaaagggctaaaggccacattaagcttctttgattttattttttctaattttaaaaattttccactagagacagggtctcactttattggccaggctggttttaagctcctatactcaagcagttctcctgcctcagactcccaaggtgatgaagcctcttttataagacacaagacttaaaacaaaaacacaaaaacaataaattaagtttttttttggagatgaggtcttgctctgttgctcaggctagagtggagtggtgcaatattggctcactgcagcctggaactcctgggctcaagcagtactcctgtctcatcctccagagtagcagggactacaggcgcatgccaccacacctggctaatttttaaatttttggtagagacaaggtctcactatattgcccaggctggtcttgcatttctggcctcaagtgatctgcctgcatcggcttctcaaaatgctggaattacaggtgtgagccaccacactgcaggggaggagcccttatgaccacttaaaggccccacctcttaatactatcacattggttattaagtttcagcatatgaatctggggggcacgttcagaccctagcaccatggatagcagggaacaagtatgctgaggctcagaaggccctttaagggtaggatagagggatgtactttttgttgttgttgttctgtccctaaaacatttttttttaaaaaacctaaaaaaggaagcactgacttcctcctcccatgatcaaaaggaccaaagggggtcaaaaatagaagccatttggttgtgaggaggtagaaattgcttttcatcataatggtaagagttcaggaataatgcctgaacttggtgttattttattattcatttgtcccatttgtcacatgtcccagcattaggtatggggaggcgtgcaaaaaagtaaaacttgttctctgtctttgaggtaccgacagtctagggtttgagctctgagttctacattacgttcccaggaggcatggcggtgcgcatgcatgcaggtagagcatgggggtcatagacaaggcagcaaggagtgctttgttcacatgtaccttttgcctgtaatgcctttcacacttctttaatctctcgaagtccatttctactctcattgcttccatgaagcctttccacacctgttgcagctacaggtcattttcttctctaaaattctctcatacccattggtacctttaatttgttattcattatctcttgtaagatgttctatttcataatttcagttattgtctgttgccatttgaatagtaattttttttcatgacggttcagttcaactaatgttttaataggctataacgagaggagaggagacagaaaaaaataagacacctcatataccttatgccttgtacctgatatcttctggaagtactctaaagaaaatgagatagtacagtgaggaagagtgggaagactacttgagattgtggcgttagaggcctctttgaggaggtaatatttaagctgagctctgaataagggtaggagtcaggcgtgtgaagatttggtagcaggccgggcacggtggttcacacctgtaatcccagcactttgagaggccgaggcagaaggattgcttgaggctaggagtttgagaccagcctgggtaacagagtgagaccccgtctctatagaaaataaaaataaagttagctggacgtggtggtgcaggcctgtagtcccagctactgggaggctgaggtggatcacttgtgcccaggaggtggaggctgcagtgagctatggtcacaccaccgcactctagcctgggcgatacagtgagaagtgtcttaaacaagaagatttgaggcagaggaagcagtatgtggaaagagcctaatataggagtgaactctcagtaagtggagaggatgcgggaggaggcttgtatcttgagcactgtaagtggggaggagatggtagaagcggaggctggaaaggtaggtatagggccttgaggcatggccaggagtttgggcttcattgtaactggatgagaatccatggaaggttttcaggttgttacttttattttttatacgtaacagctatactgaatataaaatttgcatacagtaaaatttattctttaaaagtgtacaactcagggccgggcgcagtggcacacacctgtaatcccagcactttgggaggctgaggcgggcagatcacaaggtcaggatattgagaccatcccggctaacacggtgaaacaccaactctacaaaaaaaaaaagtgtaaaaatcagaggttttcctatattttacagagttgtaaaacgatcaccactatctaatttcagaacattttcatttctccagaaagaaaccctatacccattagcagtcactccccatttcccccttgccccagccctaggcagttactactctagttctgtttgtatggatttgcctattctggatagttgtatgttaatatatgtgactttttgtgtctggctgcttagcatgttttcaaggtttatctatattgtagtgtgtatcagtactttattcatttttattgccaaataatttattgaatgggtataccacattttgtttacccattcattccttaatggacacttgggctgtttcctgctatgggacatttgtatgtaagtttttgtatggatgtaaatgttcatttctcttgggtatatacctaaggatagcaatacaggttcatttggtaactcgacgtttaatagtttgtggaagtgcctgttatccaaagcagctgcatcattttaccttcccactagcaatgaatgaaggttcgtttcttctcatcgtcaacttttaccttctgataaaagaaaaacttcagccaagtttaattgagcaatgaatgattcacgaatcgggcagccctcagaatcacagcaaattcacagagactccagtacagccacatggtggaagaagatttatagacaaaaaaagagaaatgactacagaaatcggaagtgagatacagaatggctggattggttacagctcggcatttgccttatttgaacacagtttgaacactcagcagtgtatgagtggttgaagtatggccactggtattggccaagactcagctattgttatagtcacatactcctaaattaggtttttagtcttatctacctaagccaggttgcagtttgtccacaagtgtaacctcccgatgggctcaccttgcctgctgcctagacagagcggatttatcaagacaggaattgcaatggagaaagagtaatccacgtagagctggctgtacgggagactggcgttttattattactcaaatcaatctccttgagcattcaaggatcagagtttttaaagataatttggtgggtggggcttgggaagtggggagtgctgattagtcaggttggagatggaatcatagggggtggaagtgaggttttcttgctgtcttctgtccttgggtgggatggcagaacttgttgagccagattatgggtctgggtggtgtcagctgatccagtgagtgcaggatctgcaaaatatctcaagaactgatcttagattttacagagtgatgttatccccaggagcaatttggggaggtttggactcttggagccagaggctgcatgacccctaaactgtaatttctaatcttgtagctaatttgttagtcctgcaaaggcagactggtccccaggcaagaaggggtcttttcgggaaagggctgttaatcaattttgtttcagagtcaaacccatgtactgaattccctcccaaagttagtttggcctacacccaggaatgaacaagggcagcttcaaggttagaagcaagatggagtcggttaggtctgatttctttcactgtcataatttcctcagttataattttgcaaaggcggtttcacaaggactcaaatactgaagtatggagtccttctcaggtcatatttagtttgctttaaccacccctccctccctacctttctctctctttcaattttagctaccctattgagtataaagtggtgtttcattgtggctttgatttgtatttctctgaggactaataatgctgaacttcttttcatatgcttactgaccatttgcatatatcttctttggagaaattccattcaaatcctttgcccattttaaaattggctcatttgtcttcttgttgaattctttatatattctggatacaagtcacttatcagatatatgatttacaaatattttctcctatcctgtttcacttccttgatggctcccttggaagcacaagtttttgattttgatgaagtccagatgatctattttttcttttgttgcttatgcttttggtgtcatagctaaaacaccattgcctaatccacagtgtagccattgtttttaaacatgggactgacatctgactcacattttgaatagatcactcaggctatttggaaactggggttgaaggttctagagtgaaactagggagaacagttaagaggctgtcagtattgacagacaaatgggtagactttaaacttattaagcacttgtaaaatcagtctattccaaaagcattttgttaatcagagtaagaaatggtctctaccttcaacaatttacaagataaaaatatactcaattattttataaagcaaattatattgagtgctataaaaataggaatgaaaacacttttttaagaacagtagagagaagagttacttgtatgaacttttattaagttcatttaaaaaatctctagtgtctaacataccttgcttaatagttgtttgttatacctctggacaaaagagttagagggctttgggaaagatggcattagaaccgagccttgaaggatgagtagcaggtggaaacatgtgaaagcagggtatttttgatgtaggtatcatgtctatgagtagacaattaaaattaagggaactttgtgaggtgagatgacacacaccacaccttttgtcccagctacttgggaggctgaggcaggaggatcacttgagctcaggagttcaaggctgtagtgcatgatgatcctgcctgtgaatagccactgcgttccagtctaggcaacacagggagatcccatgtctggaaaaaaaaaaaaaaaggaaccttcattgaaatctagagttggaggaattatatgtagagttggagcttacatgtaattccagattgagttcctcaaactccttttggtggctgttactcgtagcagagtatgatgtggattgtagtgggggaaaactggagcacagccaagatggtgccacaacagtttagatgcggtctagggtaacagtaatggataaaaggggaagtgagaggagtgggkgtagtgatggcagtgtctgataggactgtaggagaatggtgggcggggcagagccaagtgctgccctttgaaggggtgaacttgaatgactgtgccaggaaagtagtcccatttaacacaaggagggcagtccaggcatgaagaggataatgagcttaacatacctgtgagaagtttcaggtggaggtatctggtggccttcggcacagcaagtggtaggcacagggagttggctatatgctgtagagaaaatataggtgggctttagaggcaggcataactctgcctccaccttttactggctttgtaaactttgggggaagttaattaaacttgattcctgagggtcagatggggtcgtctgtgtaaaatgcctggcaagtaggaggcttttctctattgtttgttcccttcttttctggagtcctaatgctttgatttcatttataatcttccttagtgaatgtggtgctttgaatggaagcacaatccagtgggatttaagctgtgtgtgtgtgtgtgtgtgtgtgtgtgtgtgtgtgtgtgtttaccacccagcagaggctacacttgctcactgtttgtaaaccccctattagttgtgctgtccttctattttcccttggacttctcttgtgttcagtcttgtccaaacaaaaatatttgcattaaagttatgtgtgttcctcatttggaagactccttgaatccataattgctttttaaattttttttgaaatagtcttgctttatctcccaggctggaggagtacagtggtgtgatcaaggctcaccgcagcttcaacctcccagactctagcaatcctcccacctccgtttcccatgtagccaggactacaggtgctcaacaccacaccaccaattttaaagttcttttgaagacgggggtctcactatgttgcccaggctggtcttgaactcctggactcaagcagttctcccactttggcctcccacagtgttgggattacagatgtgagccactggggctggccatacttgctttttaagaattgtgtcatcttggccagtgcagtggctcactcctgtaatcccagcactttggaaggccaaggcgggcggatcacttgaggtcaggagtttgagaccagcctggccaacatggtgaaaccctgtctctactaaaaatacaaagattagctaggtgtggtggcttgtgcctgtagtctcagctactcagagggctgaggcaggaaaatcacttgaacctgaaaggcggaagttgtagtgagccaagatcacaccactgcacctccagcctgggtgacagagaaagactctctcaaaaaacaaaaatagaaacaaattatgtcattgttaagaggggcagttttctaagttttcctgtaggtctaatcggatggattttttttcaggatcttttaatatgctgggctgctgatatatctgattcaacttctggtctgctttgttttttgaactcagctgcttctatattttttcttctgcataactggtagaacagccaatgtagtctacaagagagctataaaatattgattgcatatatgagtacagtttcccagttttcttaaatggtaactataaatactgtctcaggacataatttagtttttccaaaagggagatagatttttttttttttacacttgtattactttagtggcttagtttaaaaaaaaaaaaagatcaaggatctagcttggagcacaaaaaaaatgcaagatctcctttccgtggagctcagttctgttttggttttctagggttcttagagactaaacactatgcataacaatgaatgtgttaattttaatgatttgttccatttcttaatgtcttagaattggaagggatttttagtcattctatccaagtggccattctgtgctggatccattctatagcagctgacagctaactcgccttctctggaaacaggctctttcattgctggacaggtctaattgttggaagatttttttyccccttatactgagatgaaagccagccccttgaaactgtcatccataaactgtcatccatttgtccaacttcagtcttttgttgtcacataaattaaatccgctagctcttcagataattgaaaatagttgctaggcagcacttctctgacttaagttgtctttttttccccaagaaaaatagccccagttctctctaccattcttcccatatcatttctaattctttttcagcctttcaccatgacccttttaaactgcaatgaccaccactaacaactggttaagtgtggtagaaccactgtagctttagtaggttactctgcatattctttttttttttttttttttgagacagagttttgctcttgttgcccaggctggagtgcaatggtgcgacctcagcttattgcaactccgcctcccgggttcaagctattctcctgcctcagcctcccaagtagctgggcttgcaagcatgtgtcaccatgcccagctaattttgtatttttagtagagacgaggtttcaccatgttggtaagtctggtcttgaactcctgacctcaggtgatttacccgccttggcctcccaaagtgctgggattacaggtgtgagccactgtgcctggccctgcatattctttttgtttgtttttgtaaagatgagggtctctgttatgttatctaggtgggtcttgaactcctggcctcaggtgatcctcccccgtcaggctcccaaagtactgggattataggcatgagccaccacatctggcctgctctccatattctattctctttctaaataaacacattatttggaaagtatttctgaacattgtcctgcagggcacactgtagctcagcctcataaaagcctacctaccatatttgagggtgcataccagggccgtttcagaacgtaccagctaytccaggttactcaaatctgtagtcctgtcctttgagttgggccagagattttctcccttggcttatgctgaagaataagatggctatctaaaattaatggcaggacaaaaatgctggtagcatggtggaaataacacttagcctaggccaggtgtagtggcccatggctgtaatcccagctctttggcaggctgaggtgggaggaccacttgaggccaggacttctgagaccagcctgggcaatgtagcaagaccatgtgtctacaaaaataaaaacaattagccagctgtggtggtgtaccccggtagtcccagctactagggcggatgagatgggaggattgcttgaacctaggagttcaaggatacagtgagctatgattgcaccactgcactccagcctggttggcagaatgagacgctgtctcaaaaaaaaaaaaaaaaagaaaaagaaaagaaaagaaaaaaacacacttagcctaaatattgcaggatatcattcagcggtgaacaactcatgactgaatttccccaaattatctttatttagagtttatttggattgtttccacatatctggattttttaaattccagaactgtattgatttatgccaaatgacttagtgatgcaaagctcagagaggtagtgtggttgtatttaagagtgtaggctctggatttcgatcctgatttgaccaccctagctctgtgactttgggcagagtagccaatgttttgtgtttactcatttgtaaatgagagtaatgatagagctaacacacagggttttctagtattacacagattcatatatattgacagcctggccagggtgaggggagtgaagctgaggcactgtcccccagtgaaaagtttaagggggcaccaaaaacactcagtaatcaagataaataatagtttaatgtgataaaatgaacaacataccaaaatttcaaataaattccagatctggcctggtcaggatgagggtgaagtaagactaagtcaggcatatgtagggtcaggtcctattgttatttgaactttctgcagtttttttatcatggattttttgggcatgtttaaaagtattgcattaaagtattattttttcttggtcattagttgttcggttttgtgtgtgtgtgtggcccctcactcactccctcactctaggtggtgtgaggccagtgtattggtatttgttattagtgattactctagggttagttttgtagaggaaatgaattttagtgcctcatggaaagtccctcccacctccaggatattttctgttaggttgcgtcagagtcccaatccaaatctcataactaagatcagttttggccaggcgtggtggctcacgcctgtaatcccagcactttgggaggcggaggcgggcggatcacgaggtcaggagattgagaccacggtgaaaccccgtctactaaaaatacaaaaaaagaaaattacccaggtgcggtggcgggcgcctgtagtcccagctactcgggaggctgaggcaggagaatggcgtgaacccgggagacggagcttgcagtgagccgagatcgcgccactgcaccccagtctgggtgacagagcgagactccgtctcacacacacacacacacacacaaaaaaaatcagttttaaggtattagaggatgtcgttctttcttgtcttctgttaaatggtgctttgaatgtcatgtttcaaacactgctggagctcagatcccagaaaatgaaaaatgtgtgcacttagcttatgcgtagaggagcctagccaaaccaaacagcacgtttgaaactttgcttttcctttatggctgagattgtgaaagacagccacagatggtggctgagctctagctggaactgctgttagtcggcgcgagatgttctaagtgacgggagccaggaactcactgtggtgtttctagaagttaaattatgatgataggatcttcctgtaatactggttctgttccttgcctttagttatatcttggaaatctgtcacatggttagtgactagtgaaaggccaaaaaaatttgcagaatcagctatttaaagctttgttcttgatagttcaagtgttacgcaaggcaaagcagccctctgttaagggtttcaggctaggtgtctccttgttagggtgtcattcctgttgtaattattggtttgtcttgtcttcttcctttttttttttttttttttttgagacaaggtcttgctttgccatccaggctggagtgcagtggcacgatcatggcttactgctgcctccacctgtcactcaagagatcttccaacctcagcctcccgagtagctcggactacaggcacatgccaccatgcttggctaatttttttttttttttttttgtgcagatagggtctcactatatttcccaggctggtctggaagttctgggctcgagcaatctgcttgcctcaacctcccaaagtgctgggattacaggcataattataggccttttttttttttttggatatagacttattctgtgtttcagaaatagttgctttttttttttttttttttttgagacagagtctccctctgttgcctagcctgcagtgagtgcagtggcacaatctccgcactgcaacctccacctccctggtcaagcgattctcctgcctcagcctccctagtagctgggactacaggcgcccgccatcatgcccggctaattttgttttttcagtagagacggggtttcactaaattggccgggctggtctcaaacccctgacctcctgatctgcccacctcggcctcccaaagtgatgggattacaggtgtgagccactgtgcccagccaatagttgctcttaaaaggtcaggtaaaacgaatgttgttgatcgtttgcctaaaatatatagggttgaatagactgataatcaccatagcagctatcattggattttattaggtttaaatttatctgaagattgtcatgtctttaagtcgcaaagaagtggaatctaattatatacttagggctaggcatggtggctcatgcctataatcccagcactttgggaggctgaagtgggtggatcacttgaggtcaggagttttagaccagcctggccagtatggtgaaaccctagctctagtaaaaataaaaaattagcatggtggcacatgcctataatccccgctactcgggaggctgaggcttgagaattgcttgaacccaggcgcagaggttaaagtaagccaagattgtgtcactgcactccaacctgagcaacagagagagactccatctcaagtatatatatatatatatatatatatatatatatwatatttaaactcattacacttcccaaatatatatatatttggaatgagtttaaaacgtaagctttacgttttttaaaacgtaacttttgtttgttgactgatgccagacgttgctgccttggtgaagtagctctactgcaccaagttaaaaaagttaatcgtctttaaagactgtaggtatcttctggtttagtgttaaataaaaagaaaaaagggaggggagattcttgtctcgaatatgtcaccttctttgtaccagtttttagagagcagctgtggcagctgctgaattatatatgcctgctttgttttcctccttttatttggcggtggagaaagtgtgacaattttaaagtgactctaaaattagtatatctggtggagcattcaatttcatgaatgtgctgtttggaatagcagtatggaatcaaataagatgcagagacttgggtatagaataagcttacgaatggaaatcaggggcctgatgcactacaggcggtttgatttatgacggaaacatcctcagatatccaggaactcatatattggaatagagacaactgtgggaatagattgtcctacccagaaagcaaaatctggcagagtttgaggtttcttattgggtaattttatcagctcgttcttagattaattagtagaataagacttccagagttgcaagatgaaatgcgatgctttcttctcttcttcttcgctatttctacttctgggccatcttggccagcaagagattwttttttttttttttttttttttgatacgaactctcgctctgttgcccaggctggagtgcaatgacatgatctgtgctcactgcaacctccactttccgagttcaagcgattctcctgtctcaacctctcaggtagctgggattgcaggcatgtgccaccaagcctggctaattttctgcatttttagtggagacagggtttcaccacgttggctaggctggtcttgaatgcctgacctcaagtgatccacctgacttggcctcccaaagtgctgggattgcaggcgtgagtcactgcgcccggcctagcaagagatttttgaaccacaagtcttggtcgtcagtattgaatcattatggtgtgtggcatggtagtggctgcaccatgtyggagtaaatgtgttctcatggtgggggatattagtgaccctgggtaacagtccatggcacttggcttgcaccacagagttaacatacagcagatcagctgtccctgtcctccagctttatataccgaattagaaagacttgggccctcatcctttactcagtggcttcccggcactccacaccacatctctaatactgggtattttctctggtcacctcttcctcagattgcatacttccctgtaatttttcacttctgcgtttcagtctttccttggaaaggctgccctttctgtatgacttcatcccatgttggacccgaccctccttctttccttctcccaaagcactactcatacctgtaatcccagcactgtgggaggccaaggtgggcagatcgcttgtgctcaggagttcgagcctgggcggcatggtggaacctcatctctacaaaatacaaaaataattagccaggcgtggtagcgcacgcctgtagccacagctgcttaggagactgaggtggcaggatcccctaaacccgggaagctgaggatgcagtgaggcataattgtgccactgtactccagtctgggtgacaaagggagaccctgtctcaaaaaaaaaaaaaatagactacttagctgaggtggttgtattaaggtttggggtgatggggattagagtctggcacaaggaagttgacatggcatgttagacaccggtgtcctaaaaacctatcagccattccccacacaccccttcagccactgcctgcccctcccctggcttaggttcagctcactgatttcttgctcttttcccttctggagagtctgctctttttctgttcctcagctttcaatcctccaataccagaaggatttggctttctaatccagaatagtttccctcttcaccctcaaccccccaaataaaccctagccttacctttattgatccaaaaactcattagtttttcctgaatgaagggcccagagcaaagcataggcagatgttttgacactctagttgttttttttttaacctgattaaatttttagatgaagtttattttcccccaagtctctctaagaatacaaggaactcgttttcttaattcagagactgagttttcttaattttctttcttaaattcagagaccgaatttccctttggcaaagacagatcctcgagtgtcaggacttattattatttttttcttggctacaatttgccttcttttttcttttaacatacctcatttactcacttaatttaaaaaatactgatgggatcctttgctccctgagcctttgtttaagtcactgagctcaacaagacctgcccttgaggtgttctcagttcacaaggggaaaggggaaagggacagatggttgaacaaagaattwcggtgtgagagaaattgcttgaggaagtgagcaaaggctttggacacagggtctagggagctacttgctgtagggcatgtgttaagagttcaggctttggaaccacattgactgggaagccagccaggcaagttactcaaacactttctatttcttcaaccacaaaccaagaataataatggtactacttcatacggttgttgtaagaattaattgagataatacgtacragggagtatagaaagacttgacccaatatttgcttatttattttttctttttaaaatttttatggatatctatttttaatgtgctccatggtaggaattagcttaatcctgcaattaagtgaaacacattttaagaatgtataatattttctctttttgtgtgccactttttattttaaacaaccaaaataktggtcatgaccttcatttgacaacccctggtccagtacttcctaagtgtttcattactgttgccactggtatcgttgttcttgctggctgttgaaggatgattgtgtgttggcccgctcagtggactgcttgtccttgctgattgctgaggaggtcctgtcagaagagtgtccgcatcagctctccctgttcccgtttcccttccggaggttgctgagcagcacacatttttggagcccttgctgtagttctccaacagggcattgccagagttactacagagagagagagggaagactctcatgggcagcagtagcaatccatcctgtgtgagcagatggcactggagaatagcagccttgcttctgctgagctgcagccaagatcctgttcagagaggcagccaacaaggtgcatggcacagccggatagattcacactctgggccttgtgcaatggcaaggaattactatttgtgttgctttaaaagtgacattcctccttatcctctgaatgcgtctagtacttgggctgtgctcaggttacagggaggctgttctatsgtttttacagagtaagaaaatccagagggcccctgagatttccaatgtaatcctactctgtagggctgaaagtgcctgctatggtggataccaaggcagatttccagaacatgagcttgaggagacggttaaacattctgggtttaaaactcttctgtgattttggcaaatctttcagattacttgccgttttcctatttgctcccttgcccaacttctgttgcattcatcccaatctgcttttctcctccgctgcttatataaagcmgcgtgtggtattacaccagatgttcatggtgtgtttatgaatgcatgtgttcctatcccgggccaagaaaatacacttgacataggacgtccaaaattttttggcttatgaagctccagtatcttttactttcactacttatttaattttaaaagaaggttactgtactgttttattctttgaataaatatgaagggtgaaataataattgatctgctggcggaatgagaaagcctaaggaggaagaattgtctggatatcctttgtgcttagagattggatcaccttctttttcagtaatgccagcccctcccctacccaaagtcatggctgttgtccatgcatctttttatcttggctattatagaagcatacccactgccaacacatttctggaccctgggtacaaaattagactaagtgaatataaatatccagtctggctagagagaaaagagtgaagaggcctcatgaagcattggcccttattctcaggaagcgttctagggaaagtatggtagaaagaacactaaatgatgattcaggcctgagttcccatcccgactccacctctcacgttyagaacgggcataatgatcagttgatttcgctgcccgtgaatgccgggagactctccttagtctgtaaagtcccctcctcaccacagagatggaacctctgtggtttaaggaaagctggtgtggggaggctagtcctctacccttcacacaaggctccaaatgcagggagttgaagtgccaccacagagatagcagaggtcgaacggtctacctctctcttgcagatgaggaaacttgaggccacgataagtgaaatacattgctgtgttgagagtcctgtgggcagtgagctgaaagcagaacaaagagctgggactcctgattcccagcctggcagtagtagttcctggtgtcatatttgccattgcctcagtatgaagccattccagtatttcagtgtttttaaaaaggtattgtcccttgataaaatgcagatgtcaggaaataaatcacattacaaattctttcatttttaatctcacaattagtgattaagagatgcatatttgtactttcgagctcaaatctaggttaaataatttttcattttactattaatctgcttttgacttaggtgataatcgattgtgcagatcacagatttgagtaatgttggctacaacttcctttggttgaagaccaacaataattgccgctatcatgagctaaatattgcagactaaatgacaaaggaaaggtattgaagacgggtgtattccatatgaggtctctttttccctcagagaccagtgatcggtgacttgatgccacgagcatattagtctaatatccaaaggaacaaaaatgagtaggattatagtctttacagtttcaaagttttaaaaattatattaaataagttataaacctgtctttgttgtcttctttaggaatagcttacaaatccctgctggcttgggatttattaggacacttttagggtaaaatttatctgtgtcacacagacacccagaggagatggcacaaagagaagcagttgagttttgttggtgaagccttgtacaaccttccttgaggtgacttccgcgtacctatatgttaaaaacggtaaattgtttccttaatgctaaacttcctgctgcttctgtcagagaatactttggaatcctaatctcagaaatctttcagagttgactcatgcattttgtgggtgtttaagaatgtcagatagcttcaggaggagcaagcatccacttgttgggaacagacccttccttgttaagagatcaggcttgggatccaaacacaacctgtggtaatgatctttctgcaccaatttgtgtagactgaagcaacggttgtgagaaccaagggcaacatgcaccaaatgtccacttatgtagtctaatcaggtaagagaatgctttgcttaattcagtaattttcctcagttattcaaggcttgccaaagaatcagactataagatagcatttaaaaaaaaaaaacattgctgcacatgatgtttcatttgttgagaagggttttctgagtcttaattgcctgaaagtcatgaccgtggctgtcaggggtgaacgatacaaaaagtaaggtatggtaaagggtgtaatgagaagttcatctaataatttgtagggtcctgtggatgggaaggtggaagagttcaaaggtatgataattcttcatctcaagtagagtggctcttgcttgactgttaagatagcctctggcctcaaggggattataatctgctctggaggatttgtaaacaatgtctgttccactggaggagtgaaatgtcaggtaaaggtacaaggccactgcatatgattgtacaaatcgtggcctgttgaggggaacctggctaaggggtgtgtgaggcctgtagtccaaccctggttctgcccaccgagctgtgttctccggcacacggctgagtctgcctggagaaatgagcatcttgaaatgtgtgcatagccacaatgtgtttactcagctgggggcccacagggctgcctcttcccaaagggaacacctcygtagtacagacaccgaatgaactaactttagcccatgtgctggtagattacagaaggggggattaactctcaaggtaagataggagaaaaatgatcagggaaagcttcttagaggaacacacaaactgaagggtgtttcttccagccaacatttgctagcccttcagaagcccaactccagtgtgggaagcttcttttggacctgaggtcagattggggtgtccacctctgtcttctgttccgtctttcctccacgagtctgtagattgcgggagggtaggaaccacagtcgcacttgactctgtgcctggcacagacaaggggtcaaaggatgaatgataaggaaatgagggtgggaggtgaggttgagaagtagtttccagctagatcagagagaccttgaatgctatcctaaggagtattcatccatgccatcctacaagccaaggaacacactgtggtgtcagcaagggagcgacttgtgccaccttgtgtttttggaaggtctatcttggagttgtgtctaggatggattggrggagggagagggtctgggagagaggaaaggaagctgactggtgaggagatatggaattaaaggatgcttataatttggtaggaaacagccacatagaaactgagtttttagttagttagatacagtacctaaaggaagcactggttatacagagcaggaccaggtatttccttacagtcagcagctcggttctttagtaagaacctgtcccttttatacaggtgctagtgtcatatttcagcagcatgtatgctaacatgcaaagttgtttctgttcaagaaaatgctcacaaacattgagaggcagtgtgtagtggttaagaaaatggactggggccaacttgcttgaagttgagtctgggctgtatgacttattaactcagttactttgggcaagttacttaatctctctgtgtttcaatttccttatctaagaaatagggaatattataccctagacttcatagatatttgtgagcatttgatgagttcatgtatataaactttctagaatcggccaggtgtggtggctcatgcctgtaatcccggcactttgggaggcccgggcaggaggatcccttgaactcaagagtttgagaccaacgtgggtaacatgatgagacccccatctctacaaagaaaaattagccaggcatggtggcatgtgcctgtagtctcagctactctggaggctgaggcgggagaatcgcttgagtctgggaggtcaagtgtgcagtgagctgtgatcacaccactgcacttcagcctcggtgacaaagtgagaccctgtctccaaaacaaaaagaaaaaagaaatggtctagaacaacccttggcacatagacacaaatacttagtatctccatgttcttgaatgaaatttgcaaagcagcatcattccaagacctttatacatatgttaatcacatgcaactttcaaaacaaccctaagtgatattattcccattttattggtgaggaaacggaggcacaaacttgactgaggcaaagacatacgtgacaaaagtcttatagcctttaagtggtgccaggatttgaactcaggcagtctggctctaaagcgtatgtacttgaccaattatactggattcagaattttctttgggccaggtgctggggctcatgtctgtaatcccaccactttgggaggctgaggaaggaggatcacttgaggtcagaagttcgagaccagcctgggcaacatggtaaaaccccgtgtctactaaaaatgcaacaattagctgggcatggtggcatgcacctgtgttcccagctacttaggaggctgaggtgttttcttcatagttacccatagcaagtgtcagagagtgatttaaaactgtatttttggtatgaaggaaaagaaagtcaagctttgaacaaataccaattgaaaggtggatactggatgtctgaaatgagtcacttaagtgccaaaatgccttaaatttaagagtttcttccatgatttctgcctctaaaggactttgacatctatttttttaaccaaggttttttattttttaaagcttattttcttactggaagagattcagcagagtgatattagggataacttatagaatgaagtctttcttcactgtattttttcccccaaagtagttatttctacttcagtgccaaaatattcttacaagtggggagataaagaacttgcagcttgaagaattataaagctctacagttcatctttgaccaggccccttgagatgcgtgtatgtgtgtgcgcaggtgcgcacacacgtgtgcactgccattattagtgatgttttggcgaagggatgataccagggtgagcaaggcttctcctagttctgtcccatacatgcagtctgatacttcagggtagagtggtcttacaagggaattgagctcatttacaggaatcttactctcagcattttctgtagaacaatgaaaagaacattgagtaattatctctttctggtgacttagccaggcatcttgggaatttgctgttttgtgaacattcgttcagctctgtcttgtatatctagtttgccttcactttatagacagtcacaacaaaaagaggatacagatgtgtgggtgtgtgggtgctasaaacrataacaattttgtatctcccacccagcctaagaaacagagtgttatcagtaccccatagctcctttttccatctctctcctccagcactatcctgcatcttgtaatgattctcttgctttaccatatacttttgtatatgcatgtagccatcaacattatattgtataattgtgtctgtgttagactttttcataaaccagcaggctcctaagctgtagaattaagccttttttttttttttgagacagagtctcgctctgttgcccagactggaatgcaatggcgctatctcagctcactgctacctccrcctcccaggttcaaggcctcagcctcccaagtagctgggactacaggcatgtgccaccatgccyggctaattttggtatttttagcagagacggggattcgccattgttggccaggctggtctcaaactcctgacctcaagtgatctgcctgtcttggcctcccaaagtgctgggattacaagtgtgagtcacagtgcccggccagaattaagcttttattatttttatttttgggttgtgccagtaaatgataggaagccattcttataacttgacgttgttttgataggccaagttgtcatctgtttgatgtcacctggccaagcaatctgaagaagatcacagatgacttctgatgccccctccctttgtggtttctctgacacttagggaaatgtgccacagcctggcacagagtagttgctcagtaaattttttattttttagaggcaggagtgcctctctctgttgcccaggctggagtgcagtggcgcagtcatagcttgctgcaccctggaactcctgggctcaagtgatcctcccacttcaatctccagagtcgctgggactacaggtgtgtgccaccacgcctgactaattttacattttttatagagatggggtcttgttattaatatgttgccccagttggtctcaaactcctggcctcaagggatcatcccatcttgacctctcaaagtgttgggattactggtgtgagctacmacactcagttcaagggtacgatgtttgtatctttagtgccttgtgtggtacctggtacatagacttgcagaaaattttggttggagaagtggtgtgttcagagaattttcagctgtggttctgagtgattggagtggctttggaatcgaggtgatgatctggggtgaaacaggagtagctctctcataggttactgcacagctgacttctggcatgtacttttcctttcctgtgtcacaaaacacacttttcattgtccttatgctggccccacctgcgttacttattgaaaaaagtatatgacagacagaaataagacattcagataaaaaaaaaaagacctcatttgcctttgcttaaagtattagtagttgagatttgatcctgagagactttcattccagttgatggattttacctaactaaagtcaattattttgaggtgttaatcaccacttttattaaaacaaatctttttgtctccagygtcaagaaactaaggtaacctggttggctttctgtaaccctggactagtattttagagataatctcttcaatagtgaaaggtggattggctggcagattcattgtttgactaaacgctttcatttagcttgtgacctatagcctattcctctttcatagtgtatttatgtagaactttattggcagtgtaagagcctctatatcttaattgtgataactactgactgtttaattttctgcctgacacagagtaaaattccatgaacttttgctattgaaagcttttggtggattagtacccaatcccagtgtttaagactctgagctctggaacaggcctcatgctagattgatatagggcctggcacatagatgcttaataaatattagctgaatgagtatttwgtggatttaaagagtattcaaaccacaaaactaaccataccctatattgtcagagggaacagtgtacctttttttttcttcccatttcaggaccaaaatcagccttttgtattttggatctttacatatttatttattttttctttcctttgttttattttgttttgagtcagagtcytkctctgtcgcccaagctggagtgaagtggcgttatcttggctcattgcaacctctgcctcctgggttcaagtgattctcatgcctcagcctccagggtagctgggactgcaggtgcacaccatcacgcccagctaattttttgtatttttgggggttttgccatgttggccagtctggtcttgaactcctgagctygggcaacccacccaaccttggcctcccaaagcgctgggattacaggcgtgagccactgttcccggccaatatttctttctttttgagagtcattcagtccctgcagtgtttatgctgactgtcctgcatatttagggttgctgtagaatggattttgtgctatataaatatccgtgtgtgtgtgtgtgtgtgtgtgtgtgtgtgtgtgtgtgtatgtatgtgtctgtgttctcatggtttttctaaagaaatgtcatctgcttattggctcttctacttacaggtcttttctttttaaccagccttaagatgatgcagaatgtgagtccaacatcctactccttcagcagttgacagtgttttggcatatgtgctgccctgaatacagtgatctatttcagtctgttgatataaatgtggacagctttaatgtgtaggaattgaggctaacaaaatatctttccatatcctggaagcatgaattttggagagatgaccaacttaatagatagtcttaagttttgtgttatcgtataattttaaatgcggtattatcttaatgcacagtttaatagtcttaaatcctgaaaatttgtatattatctgatctagttagaaattgaaaatatatatttctcaaggttaccaagattatatctatttgaatttagtagtgattgaatggaataggttgttaagatgaattgccacaaaatttatattgttgtaagatatgtagaacattgattttcttctaatatacttaacattgtggatgataccatccatctatctttctctctatatgaacacataattttgttatatataatgtttggaatctgacacttcatctttccttttctgaagaaagattttttatatgtcgccttaatcattggtgttttgtttaatcttataaacacatgatggatttatttgttggtttgttgtgaaacttaagaaaaaggcaaagatagtggcctctttggggcaccctatatttattacatttatttgaawccttcctagtgttttctgaattatttgtgtgtgtgatgtgtgtgtgtgaacacactcaggattcagaagctgtgtgggaccatgtatgtgtgtccacagcctttctttggaatactgcttcagaaattagagcaggtaagtccatgcatgctatcatcagcatttaatgatgctgctttctcttccaagcaaactgacaagggtagatgaaggtccagttttccgaaatgggcctcagtcttctgacagggtgttttattgtagtttgctgttgtcatgaggtcttcattcagatgcggatatattaaggtcattttgctttgtctgaggatctttctgggttttcatggtagagattgagatatgtgggacaagtttgatcttgtatcaggttagaggacatgttgcttgccctgcttcagagaagagccaaagctggcaggaatagctgcaaaagtatgctgcacttagatctttcaattagtaaattagagtaagatgcctctggaagtcttccacagagttattttaaacttggggtcgtactgcttgtgttgaattaactcaaggttctctctcaaggggcacatgaaggtcttcctccactgcttctgcttagttcaggccttcatcttgtgcttggattattatcgcagcctcctttgcttccaccatgccacatccaaatgtcacatttccawgggcctgcgacccatgtaggcacgtaaggccccgtgcgtagtttagtgctctgctgttgtcatcttgaaattcttcattttccaacaagaggaacaccttcaatttgtactagtccctacgatttcagtagctggtcttggctctaggaatagcatttctaaaactatctatttaaaattcctcaaagttcacgctccatatcctgcccatctagcaccatctcttagtggtgggcttttctttgactgtcagtgcttgaagaagttcttccaggtataccaaakggccccacatctctgcaacatttgctgttgctgtttccttcttctcatttcccctacccaacctggttcacttctattcatgttttgaaatgctgaagaaataaggttgggctgtgaaaccgaatatgaccatctttttttttttttttttgagatgragtcttgctctgtcacctaggctggcgtgatcttggctcactgtaacctccgcctcttgggctcaagctcttctgcctcagcctccccagtagctgggattacagataggcacatgccaccacacccggtaaatttttatatttttagtagagacggggtttctccatgttggtcaggctggtctcaaactcctgacctcaggtgatctgcccaccttggcctcccaaagtgctgggattacaggcgtgagctactgtgtctggcctaatatgaccatcttaactcatgatcacactttgcttgtatcatacctcttttcaaaaggttgctatctggtgaggttgggccatatttgattttgggataatggttctataataactctccaagatgatcatattgatttttgcaaggtaaaagaaaattctcctatcttcagggtgttcattcatgcaacatattttttaaatttttaaattttaatttaatttaacttaattttttgagacagagtctcgctctgtcrcccaggctgtagtgcagtggtgcaatctcggctcactgcaacctctgcctcttgggttcaaactattcttgtgccttagcctcccaagtagctgggattacaggcatgcatcaccataccaagctaatttttttgtatttttagtagggcaacgagttgcccaggctggtctcaaactcctggccataagtgatccacccaccttggcctcccaaagcactgggattacaggcacgaaccatcagcctggcccatgcaacacatttttatgggtcatctaatatatgccagactatattttaagcactgaggatgtggcattgaaccaactgttttaacttttccttctttgagctaataatttctagtagagggggcagaaagtgaatgaacaaatacctcaatatataattagatctggagttctagaaaacaatgcaaaatacacattttggtctttcaccttggaagatgtgtatttgttgtttatctaccttaaagtttggtggatgagactaagaatggggctctgggcctggcgtgactattgcagagtgggacagcacccaggttgtcagttgctccttgcatcttttctgatagtgattgtttagacctagaacatagataccacacaggtattacccaagagaactgaaaacatacactcacacaatgtatatgaacattcactacagcattattcataatagccaaaaagtagaaacaacccaaatatccattatatgtatgaataaaatgtggcataaccatacaatgaaatgttatttagccataaataggagtgaaatatggatacgtggtacattgaaaacattaagctaagtgaaagaaaacagtcacagaaaactatgattccatttataagaagtgtccagggaggccgggcgcggtggctcacgcttgtaatcccagcactttgggakgctgaggcgggcggatcatgaggtcaggagatcgagaccacggtgaaaccctgtttctactaaaaatactaaaaattagctgggcatggtggcgggcgcctgtagtcccagctactcggagaggctgaggcaggagaatggtgtgaacccaggaggcagagcttgcagtgagccgagatcgcgccactgcactccagcgtgggtgacagagcgagactccgtctcaaaaaaaaaaaaaaaaaaaaagaagtgtccagggtaggcaaatctacagacagaaagattggtagttgctgggggcgagagggagatgagaagaaggagtgactgctaatgggtcagggtttctttctgaagtagtgaaagtgttctgaaattagggagtggtgatggttgtacaacattgagaatatactgaaagctgctgagtcctacatttaaaaatggcagatgttatagtgtgtgaattatcacaataaagctgtcataaaaaaatgctgggattaccttctatctgaaggtgaggatcttatgaagattaaatgaaatgaaataacataaagcacttaaagcccagtgcctgggacatagtatgcacttaattaatggtggtggttgttgctcttgaagtaatacggtttaaatatctgtaagctggaacttttatttattcactgctacatctccagaatatgacctgttatggagtatgtagccaataaatataatactagtcaaatgaatgtggcttgttcacattcatgttcagtcacattcaccaatgtggctgtctttcttgttccgccttttgcagcatgttagtgaatctgcatcaactgggcctgtgttttgagctacttgtctagtggtagtactcaagagatatggagcccttcacagcccatctttcagtgcttaagttggggttgggggtacagactcagtctggggaggcaaggcttctacctaaattaaaggtgaaagtggggaggccaggcatggtgtctcatgcctgtaatcccagcactttgggaggcagatgtgggcggatcacttgaggtcaggaattggtgaccagcctggccaacatggtgaaaccctgtctctactaaaaatacagaaattagttgggcgtggtggcgcacatctataatcccagctacttgggaggctggggcaggagaatcgcttgaacccgggaggcagaggttgcgatgagcagagatcacactactgcatgccagcctgggtgacagtgagactccatagcaaaagaaataaaaataaaagaaagtggggtcaaatgattcttgagcctttttctagtaatataattccgctttgtgtttttatttttatttttattttttgtttgagatggagtcttgctctgtcgcccaggttggagtgcagtggcgtgatcttggctcactgcaagctccgcctcctgggttcacaccattctcctgcctcagtctcccgagtagctgggactacaggcgcctatcaccacacctggctaattttttgtatttttagtagagacggggtttcaccgtgttagccaggatggtcttgatctcctgacctcgtgatccacccacctcagcctcccaaagtgctgggattacaggcgtgagccaccgcgcccgacctacttatatatttttttgagatggagtctcgctgtcgcctgggctgaaatgcagtggcacgatcttggctcactgcaacctccgcctcccaggttcaagtgattctcctgcctcagcctcctgagtagctgggattataggtgcccgccacctaatttatttttttatttttattttttttgcgatagagtcttgctctgtcacccagtgcagtggcgcagtcttggctcactgcaacctctgcctrctggattcaagcgattctcctgtctcagcctcccaagtagctgggattagaggcacccaccaccacactcagctaatttttgtattttttagtagagatggtatttcaccatgttagccaggctggtctcgaactcttgacctcaggtgatccgcctgcctcgacctcccaaagtgctgggattacaggcgtgagccaccacacctggctctttgtgttttttaaaaaactgaattggtctgttgagaatgtgattctctctctttttttttttttttttgagatggagttgttgcccagactggagtgcaatggctcaatctcggctcactgcaacctgcgcctcctgggttcaagtgattctcatgcctcagcctcccgagtagctgggattacaggcatgcaccaccatgcctggctagttttgtatttttagtagagacagggtttctccatgttggtcaggctggtctcatactcccgatctcaggtgatctgcctgcctcggcttcccaaagtgttgggattacaggcatgagccactgcgcccagctgagaatgtgattcttagcattcattataagttccccagagagcagaggatttcatttgtggtaaaacacatacgcgtgcacacacacacacacacacacaccccacacatttagttcttagaaatgtacagatttaaactgatagtttgttctgctgaacctaactcacaatttctacatataggaaattaatgttttaaatgaagatagaagcagttttctcctgaaagtatttatgtggttttgttaaaacttcacatccttttatgaacttggcattccactaacaacactcagctgcttttacaaytgtgtcagcaaggttccatctgcttatattgaggttgatgaaaagaagtaaagctgttgttgtttgtattatgtggcattctttttagatcactggaactttttttcctttggtctctgtaagaaatggttgtgcttctcatcttcctttagtcttctgtacattgtgtggttgatcatgttccttgttaccataaactgttgagaggctcagtgcccaatttgtggcctacctctaggaattatccagggcttctctttatcagcttttttatgtaccatcctgcttcttgactttattttctactcttatttttttcttgaccaatttatctttctttctttctttcctgctttcttggtttctttctttcttttttttttttgagacagggtctcctcctgttgcccaggctggcattcagtagtgcagtcaatgagcttgagctcactgcaagtgcaaactcctgggcttaagtgatcctcccacctcatcctcccaaagtaccagaagtacaggcacgagccacacacgtggccactgtttctttcttcctttttttggggggggggcgggaggaggggtggtgctatgctatctcaaagagctgcttttataattttttgggagataaatgtgttaaataagcaacagtcccaccttattgacgtgaatattttaaaaacttaaaacatgtctacaacttcctaggaatttcttcccacatcaggaaggatggagagaaggcaaaactaagagttggtaagctttgtgtttgggaaattttcttgaatacctctttttttcttgtctttttaatagaagttggtgagatggcaaagcagtatatagagaaaagtcttttggttccagaccatgtgatcacacgcctaatgatgtccgagttggagaacaggcgtggccagcactggctccttgatggtgagttgaaactgtgggtaaaccgaatttctgggaatagtcagttaaggtcttgcacactcccttaacttcttaccgaatggaaaatgccttattttctaaactttctgtcatttatttaatattgcaatttggcaacatgataggaacccattgtggtgaagcctcttatttcttctgtctccagatcaccatcatgagaaccactgacttgaagcaaatattcactaaatttctgttattgcttcagcccttttgtttccgtaagccatcctgagtataactcctcttcaatcagaggttctttcattcaccacagggcacacaaaatacaattatgagttattatttttcacctgtcagattaacagagatagaagatcggaaaatcctttattgagtatgtaggaaacaaatactgttgaaagtataaaatgagcaacctttgtagagcagttagcattatatatactttctgatccagcagttccattctggatttctgcctaaagatgcaaggaggtttatttcagcattattggtaaataagaggacattattactgacactataaaagaatcattatatatgtggtattctgaggacacaaagaagaaaattattctgttggtaggaggaggggttggaacaactgtatggaaagtgatgaatagatagatggtcctcagatagatgagtggggatagggaaggtaggtttttttttttcagcagagggacaatgtgaacagggtgaaaggggaatgagttatcttagtattttttctgagcctgcaagcagaggttggcagaggaaatcctggggtggatagcctttgattttgccataaagatggtggaactggattttgttggctttagggagcactgaagagttgttaagtaggggtataatatgatcatatttctctcagaaagactattctgttagcagcacaggagagattaggtgctggggcatggaggagagttgtgactacaaaccagagatcattggaataactggactaagggatgtcgaaggcctgaatttaagcaataatagcagtgggatggaaaggaggcaccattcataagagagtggattgaggaaaaagaattgataggagttgtggctgatgttaggtactacagccccagggttttcttttattgcctttcaggctttttgagtttctcagctttcatcaccctctctgcmcttacctaggcatgttaatttctctagactctacttttaactcacagaagttagcccttttcttagtctgttttctgctgctacaacagagtactttggactgggcaatttataaagaaaagaaatttatttctcatggttctagaggctggaaagtccaggagcatggtgtcagcatctgatgagggccttcttgctgcatcatcccatggcagaagrcatcaaatggggaagaagtgcatgcctctgagagggaatgggagccgaacttatccttttatcaggagcctattgttttatctagaacccacttctgtgataagagcattaactcattcatgagggcagagcctttgtgacctaattacctcttaaaggctccatctcccataacatttcattgccaattaaatttcaacatgagttttggaggggacattcaaaccttagcattctgcccctacccacctccccctccaaaacaactcgtgtccttctcacatgcaaaatatattcattctatcctattagcccccaaagtcttaacttagcatcaactcaaaagtccaagctaaatcagacatgggtgagacttataaagtacaattcatcctgagacaaattcccttcagctgtgagcctgtgaaatcaaagcaagtcatctacttccaaaatgctrtggtaggaaggtgtatgatggacattcccattccaaaggaagaaataggcaagaagaaaggggcaggtggtcaccgataagtccaaaatccaacaggggagacattaagtcttaaagatggggaataatctctgtggactccatattctgcctcctgggcacactgggatgggagttgggcttccagggcctcagaagccccaccctctgtggctttgctgggttcaatccactcagcagctctcatgggttggagttgtatactggtggatttacagttctggggtgttgacagtggcccactcccatggctccattaggcattgccctagtggggactctggggcagccttgaccctacagttccactgggcattgtcctaatgggggctgtctgcagtggctctgttctgcaatagatttctgcctgggcctaccaggggcattcattgaaatctaggtggaggaagccatgctctgtaggtcttgcattctgtgagatgccaccaaggcttatccctttctgagcaggtggagccacgcctgaagctgtttgagttatggttgaggaggccaaggaatgctatccatcttctgaaaccattctaccctcctagatctctgggtctgtgatgggaggggcagtctggaagatctccgaaatgccttttaggtctgttgtccattgtcttgattgatagcacctggcttccttctagccatgctaatctctttagcaataggttgtttgaccacacacttaatattccctctggaacatgcttttccactctttacatggccatgccgagaattttccaaattcttctgttttgcttctcttttaactatatggttatccctcagtatctgctgacagtaaggggtgtgggaagggattggttccaggaccactccctcataccaaaatccatgcttactcaagccccacggtcggccctgtggaacccatgggtatgaaaagtcagtcctccatgtgcaagggttttgcatcctgcaaatactgtatgcatttgsttgcgaatgtggaacccagtgatatggaggcccgactgtatttattgaaaaaatccttggcccatgttgtggctcacacctgtaatcccaacactttgggaagctgaggtgggcagatcacttgaggccaggagaccagcrtgggcaacattgcaaaacctcatctcgacaaaaattagccgggtgtggtggcatgtgcctataatcccagctacttgggagctgaggtgagaggatcactttagcctgagaggttgaggcagcagtgaggcatgatcacaccattgcactccagcctggatgacagagtgagaccctgtttcaaaagaaaagaaaaaaatgtttgtataaagtgtgccctcagagttcaaacccgtatcttcaatggtcaactgtatttgattgtctctttgctctcacattgcattttatgcaattaaaagtaaccacacagcagcttgaaagctttactgcttaagatacttcttccaccacatatcctagttcattgctcttaagttttgcagtccataaagccctagggcacagacaaaatttgtcaaggtctttgtaaccgtataacaagaataacctttactccagtttctaatatgttcttttccatttctgtctgagatctcatcagaatggactttactgtccaattgctgctaatatgccagtcatgaccacttgagtaatttctttttttttttgagatgaagtctctgtcgcccaggccagagtgccatggcctgatctcagctcactgcaacctccacctcccaggttcaagcaattctcttgcctcagcctcccaagtagctgggactataggcatgtgccaccaagcccagctaatttttgtatttttagaagagacagggtttcaccatggtggccaggctggtcttgaactcatgacctcagatgatccgcccacctcggcctcccaaagtgttgggattacaggcgtgagccacaccatgcctggcccactgagtaatttctaagaagattcagaccttccctacagctcccctcttcttytgagtcctcatcagaattgcccttgatgcatcattcatggcaatctagggtgttactagccgcttcctccaaattcttcagcctctacccattacttggttccaaagctatgaccgcatttttaggtatttgttatggaaacagccccactccttggtatccattttttgtcttagtctgttttgtgctgctataacagaacacctcaggttgggtaatttataaagaaaataaatttatttctcacagttctggaggcagggaagagtaagacgatggttctcacatttgttgggagccttcttgctgtgtgttggaaggcaacacatgatgagaaggctcacacaagagagggaataaggggttaaacttacgcttttatcaggagcccactcctgagataaccaacccattaattcatccatgagggcagagctctcatgacctgatcatctcttaaaggccccacctcccaatacctttaaattggcaattaaatttcaacatgagttttggagagaacattcaaactatagcaccccccagtgctttttgtctgggtattcatcatgactgataaactttgactttgccaccacgtaacagtaatttctctagtttacatttttaaattgtgagtcttctcatcttgcaaaatgaatttgtatagttttagggaacttaaaaatctgtgtttaaaaaggatcatctgtgttaaactcccctggaaagagggttagtgtgataattgagagcatggacccgggtgctgccagactgcctgacttgaatccccgctctgccactttctggcagcctgtgtgaccctgggcctctggttgctcatgaaacacaaattagcaaagaggggcaaagtgagcaaatatatgtaaagtgcttaaaagagtgcttgccttatataagtgctgtatgagtgtttgtcattattttgtgactagtgtacaggtcctgaagttttttgggtgggggtgactatttgaagtgttcacttcaaaaatagctctaaaagtatttagccaggcagaataaaagtcagtttcagttatggaatgttttctctatcttttcagtgcttgcttttgccatgacttcctctcagggttgaataactgaagttctttgacatcataggcctgttttagtraagtacgtcatcctcccaagtgatttggttagtatttttctccttgaaaacccatctggtcactttttcagttgcgatttttctttaaagctctggaataaatccatttggcaaggtgtggagtgcgagggatgcctggttcctatgttcagctttagactccttatgttacacaggcacatgctctgcggaggacgtgcctgttgagcgtgctaaaggtgattgaatgtggaaaggtcgaaaaaggcattctgatgacagatgactcatcatcttggtccatatggctgtagagaggcatcctgcaaatggtgggtggaaatgagtagagtggatccaagccaagggaaccccaagtggggatgtggggaggggagggagggtgagtgttctgtggtttggtcagctttgctcttgctaaaaaaaaagttcagcactaccttcccttcactgtgctttccagttgggtaagaaatattcttgttttgttttgttttgttagagatggagtctctctctgtcacccaggctggagtgcagtggcatatcttggttcactgcaacctctgcctcctgggttcaagcgattctccttcctcagcctcctgagtagctgggattacaggtgcacaccaccatgcctggctaattttttgtatttttagtagagatggggttgcaccatgtttgccaggcttgtcttgaactactggcctcaagtgatctgcctgcctcggctgcccaaagtgctgggattacaggcatgagccactgcacctggctaatttttcacttttttaaaaaagggtcacatattagaccgttttcacactgctgataaagacatacccgagactgggtaatttatacaagaaaaagggtttaatggacttacagttccacgtggcttgggaggcctcacaatcgtggcagaaggcaaggaggagcaaatcacatcgtacctggatggcagcaggcaaagagagacagcttggcagggaaactcccatttttaaaactatcagatctcatgaaacttactgactatcatgagaacagcacggaaaagaccagcccccataattcagttacctcctaccaggttcatcccatgacacgtgggaattgtgggagctacagttcaaagatgagacttgggtggggacacagccaaaccacatcaggccagcagtgaggtatagccatagagagagatgtattagtaactgtttttttcgtttctaaacttgcctgcttacttgtgccttgaaatagtaatctagaagttccccaaatcggttctaatttatctttrtgtaccaagatgtagtagaattatctgccatatgattttaggggtaactatcaaaatattttaaactggtatttcaaagtttggttttgtagaaaacaaccttaaattttggaattgtaaatgaaatgtaatttaatccttttcattggtaataatgataacctttagcacgagagtcatcattttgtccatagttgtatttagaacctggtttgtttgtttcrttctgtgcaatgttgaacactaacaagtgctttctgaaggtaattctgtttttagcataagtcagagttgtttgaatgtgtgcagtgtttgtgtctattttccctgagagctaaatgatttcagacttgagatgttcctggctacgcactcacttagagcccttggtgtaggtgtatgwtcagaaactaaactatagatgctggagccagagtattttgccttgattttgcgaatgtgttttaccatacgaggctagtacataacaactctgaccttatcctctccacatttttccttctgattcagacctctgaggagtgtcacatcccactgggcgacatatgtctatagaaaaaagccaacagtatcttctgaatcacatcttttaggaaatgccaagggtaattttttttcttctgttgcccttgtgagtctagggtatctttcaagaataaagtgtataatagatttgtttagaaggttactgaagaattctgctttcataattaaaaaaacagctttttcttcctgtgtgtatgtgtttatgtgtaggagggcagtagtttatcttagtcatttatctttaaatatttagccstgaaaaatcatagccacataacccttctatctcaggttgttactaaggcagtgatgtatattctggtatcttgaatggaaagtttaaagcaattgtggtgatttctaaagaatgaagaatagttgtaaaatttgtggagctctactagggtgctgtggccatctatgcctgccaaatgtggattgcacaattaaaatgtttggttcctcactgggattgttcttcttgacataaccatgatttgcccctctcattgtagctctgttcattcagtaagcattattatatctaatgggtcctgaatatttctaaagtgaataaagtgcaagtatgactaactttgcactaggctggtgacagtgaagaagaatgtgtggaaaagaaggattagaggtagactaagcttgtcagggagctcctgacataggagggttcagagacatayattcagccacacatggtacaggtgaggtgttccaagaggtaagtggaatgatttttgcaagtaaggagtggcatttttggtcaaaatgattgcatgaaaaaagatgggtgtgtgtttagattagtcttagcgctacatttttggaaactctatccatgccccaagacaatgtaaatatgcctgacagtttttttttttcatcatccaaaattctgatttgaggagacagttgggtgtggtagcttatgcttgtaatcccagcagtttgggagacagaggcaggaggatcacttgagcccaggagtttgagaccagcctgggcaacacgatgaaagccctctctacaaaaatatagaaaaattacctgggcatggtggtgcatgcctgtctatactcacagcttgtcagaggctgaggtgggaggatcacctgagcctgaacctggggaggtcaaagctgcagtgagccgagattgtgccactgcactccagcctgggcaacagagcgagactccgcctcaaaaaaaaaaaaaaaaagaatttgggcagtgacccttagatgaatgttattttctttgttggcattttcccccctggactttgaaggtagagtttgatcaaggcatttctttactgtgtgtttgcatgaaggatcagcagttatttgttgagtttggtttgcataaaaaaattatttttgggctgggtgcggtggctcacgcctgtaatcccagcactttgggaggccgaggtgggcgagtcacgaggtcaggagttcgagaccagcctggccaacatggtgaaaccccatctttattaaaaatacaaaaaattagctgtgcgtggtggtgggcgcttgtagtcccagctactcgggaggctaaggcaggagaatcgcttgaacctgggaggcggaggttgcagtgagccgagatcgtgctactgtactttagcccaggtgacagtgcagtagcccaggcgactccatctcaaaaaagaaaaaaaaaatttgtaaccagataactgtaacagtgttcccctgaatgctgtgtctttaagtttgtgttgtaaagtaggtttgacaatttttatcatgttagaagaaagaattgtaaaacccaagacctatgtttgattatatagcttgagtatctcttatccagaatgctcgggaccagaagtattttggatttcagattttttggattttagaatgtctgccttatacttactggttgggtatctctaatccaaaaaaatgcaaaatctgagatgctccaataggcattttctttgaggatcaagttggcactcaaaattttggattttggagcatttcagatttcagattttcctattagagatactcgtactttctaacatgataagtatttggatattctcaaataaaataatttgtagacatataattaatttcaagttaaatagtgcactaagagagaccacatgactttgctagaagaagatgggcaataagaagaaagtgtatctacttcacataagactaggtaacaggtttttgttttgttttgttttgttttgttttgttttgttttgttttgtcagaattttgtttttgctgcccaggctggagtgcaatggtgcgatcttggctcactgcaacctctgcgtcacgggctccggtgattctcctgcttcagcctcctgagtagctgggattataggtgcctgccactatgcctggctaattttttgtatttttagtagagacggggtttcactctgttggccaggctggtctcaaactcctgacctcaggtgatctgcccacctcagcctcccaaagtgctgtgattacaggcgtgagccaccgtgcccggtctaggtaacagttttctaaacagagtaatactggttgaattacacaggaaataccactattcagtggggttaagttatgaagagacatttgggtgacatgtgacctgaaattttagcacactgccatcttcttacacactttatccaaagtacacagcctgatcagactttgtatctagctgctgattgcactgaagctattgcaactcctttgttaatgctcccaggtgatcgcatgcatttcttctggtgctaagcattcataattttcgataagtatttattgatcagcagctgtgtgccagacaccacagtagagcaacaaagagactaggtggggcctggctctcctgatactcagaatccagtggtgttttcagctgggttttgtttttttttttttgagacggagtctcgctctgtcccaggctgagtgcaatggcgcgatcttggctcactgcaacytccacctcttgggttcaagcgattctcctgcctcagcctcccaagtagctgggactacaggcagtgccaccacgcccagctaatttttgtatgtttagtagagacggggtttcgccatgttggccaggatagtctccatctcttgacctcgtgatctgcccacctcggcctcccaaagtgctgggattacaggtgtgagccaccaggcccagccagttttcagcttttttgctaccctaggcagtgagggttatctttaatttctttaatttaaatcaaaaccctgataactcactttttctcttagtgacttttcctacgttctgcacccttgctgtcaatatgagctcagagtagctgactgaaaaacatgataaagccttggatctcttctctttctcatttgttatagattctgtcctgcgttcgtgtcctccatgtccatttccagtgtttttcttctgattgaactgactgctgctttggggtgaggaacagttgtaccacagtatagtagacaatggtggcttatcttatgtgtgtctcagagattgactagattttaacattaaggaacattaaggggacaatatggaaaacatatgtatacacatatttgactggaccctagcaaagcttggttcatggatcaataaacaaattgagtatacattttttgtgtcttgataagctaggcatccgtcattcccaagagggagtagcatgcttcctgacctcatagtccaggagtgccgcacaaatggttgcagaataggtagggtcttgggagcaccagtgaagagagagtgaaaggtgatggctggcgcagagagggaagtaactgaccctcttttgaaggtgagggaggcaggtattaggaaggcttcctggagaagctgacacccagaaccataattggaaggtgggaatgaagcacattttagagggagggaagatcacatggaaaagctctagaggtatgaaacaacatggtgtattctggaaaccacaagtagttgggtaaccctggagctaaaaatatgagcagatgaggctggacaagtggacaggggcaaaagttaacctttcatgaaatttagaaacagggagttgagtaagcatcaaagttaatattaaaaatgagggggagttaaaagtaaaatttaaaactttgagtttaaaagtgtgaacaacatatttttaaactctacttccaacatttaaaaattaactggattggctgggcgtggtggctcacgcttgtaatcctagcaatttaggaggctgagatgggtggatcacaaggtcaggagattgagaccgtcctggctaacacggtgagacccccacctctactaaaaatacgaaaaattagccgggcgtggttgcaggcgcctgtagttccagctactcaggagactgaggcaggagaatagcacaaacccaggaggcagagcttgcagtgagctgagatcgcgccactgcactccagcctgggcaactgagtgagactccgtctcaaaaataaaataaaataaaataaaaattaactggattattaaccttttaaatttagatctacatttgacattaaactgtggtttctctgtatttgggtgtgtcttgacttatatgttcagatgcacctagcccatttgccattgctgcttaattagaagttgataaagtaaggtacaggatgaaatacttcaactcctaagtttaggtgttaggagaacctgcttccctaatttatgaaacaggtaattcatccagttcctgggaattggatgaattaagaaaattcattacaaagcatcattcaaggcatttgagggcatactttgctaattgctaatttaataataattattgtgcacttacaatgcacaaaccatgatgctaagaagacattaacatggtagaaaaagcatgggtttatgaatcagacctgaatatcagtctgtaacttacaagctgctgcgtagtcttttttttttttttttttttttttttaagatggggttgtgctctgtcacccagactggagtgtagtggcacatcatagctcactgcagcctcaaactgggttcaagtgattgatcctcccatctcagctccctgagtagctgagactacagatgcaggccactacgcctggccaattttaaaacttgttgtagaaatgggattttgctatgttgcccaggctagtcttgaactcctatcctcaagcaatcctcctgtctcagcccctcagagtgctgagattacagtcatgagccactgtgccgagttgtatagtcttgagcaagcaaagttttctttcttggattctttttcttcatccatgaaattagcacgttcatggcataggtttgtgaggattgactaacaaatgtaaaactcttagtggagttctggaaaataggtcatcaaatggtagacatttgatattattatttattataattgattttaagctccaatagaaataccttgatacttacatagatgttaggacttaacatttcaataataacttactgagaaacttcacaaaaaatactgtcattctaatgaataaggatcaacatattcacccctcataaagcacatttgggcaaagcataaaaccacccctcttggcctggcgcgatggctcacatctgtaatcccagcacttttggaggacgaggtgggtggatcacttgagatcaggagttcaagaccagcctgaccaatatggtgaaaccccatctctactaaaaatacaaaaattagccaggcgtggtggtgtgcacctgtaatcccagctacttgggagggctgaggcaggagaattgcttgaacctgggaggcggaggttgcagtgagctgagaccgtgccattgcactccagcctgggcaatgagagtgaaattccatctcaaagaaaaaaaaaatcacccctcctccattaaaccttgtgtagtaatgtaaaacaaaacaatgtaaaactcttgattgtcctgtcaccagtaagagaacccagattttggagagatggacaggttgattagggctaaagggagaatgagatgtggaaaactgcagagaatttaattttatctttttctgtaatacatgatcactataaaacatccaagccatatggaaaaatgcaacggaaagcaacaaatcacctgaaattccaccagccagaaacaaccagggtgaacagttgaaaagcatcattctagatacctctctgtgcgcatatgtagatggaaatgtgtaagaaggcatcagactttatatgctttaaaaaagtatttaatcttactgaatttttttttttttttgacatggagtctcgctgtgtcgcccaggctggagtgcagtggcacaatctctgctaactgcaacctccacctcctgggttcaagcgattctcctgcctcagcctcccaagtagtgggattacaggcacgcaccaccgtgactggctaattttttacatttttgatagagacagggtttcaccatattgggcaggctggtctcaaactactgacctcaagtgacccacccgctttggcctcccaaagtgctggaattccaggcgtgagccaccatacctagccttaattttactcaaatttaacagtaacaaaactaaagtgaacctgaaggagttattacggagcttcagataaatctttgttcatcaccaaggatattaattcctgtgagagctcttcaacattataaaagccactgggagactgacatatttgttttcttttgttttaaattcacatttcaaatttagacaggaggcattgtctccacagtgaaccctgagggaacttatacttcctttaacctcctcttacccttcgtctctcccagtttttgttggcttttgtcattaaaaatttattacagttttcttctgcaaatgtaattcctcagtttcttacattaaaaaaatttaggtgaattctgtgcactggttcttttacccacctctactcattttattttgattaatctcttggttatatctctgtgaatatactagaaatcattgaaatgtacactttaaatgaattaattgtatggtacgtgaactgtatctgagtaaaggtgcactgctgtttaacacagctttttcattcaacactgggttgactggattttgctggatatttttttcgtccctccctcctctcccctccctgcagaagagctcataatatgtttgagaatgtctaattttttaaaattagctaactgatatttttgagttgttcttgtgtctttcaaaacattgcaaccattgttacattttcttctggcctggttccccattttattttatttttatttgttaaatagagacaggtcttgctctggcacccaggcaagagtgcgatggtgcagtcgtgttaatagcttgctgcactctcaaactcctggatcctcccgcctcagcctcccaagtagctaggactacaggtgtatgctgctgtgcccagctagttttttattttttgtttagacagggtcttgctatgttgcccaggctggtcttgaactcttaggctcaagcaatcttcctgcctcagctctccaaagtacttggatttacaggcgtgagccactatgcacagcccttttccacctgtttcaaggtgattttttttcaccccgtatagactttctaaagagttatttcttcatacttgaagtcagtagaataacttgatgttgttgttatttatttatgtcctatatagagtgtatcctcctgatctgcaattcagttctttcctttcagggaagttttcctgtgttatatcctttttgtcatttgttcagatttctatttcaataatactagttatattggatattctattgactattttttgtctttatactttaaatttttcttgcttctgtgtttccttctactttcaggcacactcatatcttttattttgagggcaggagagaatgaaactttgtttatattccataactgtttgattatttttcaacctgtatgtgccatgcacctgtgctgtgggcccttgcacttactgttccctctaccggcagtgccctgtctccagatatccgtgtggatcgctggatacagatccctacacagataacccttcctcagaaggtctgtcttgtaccattctgtctacctacgtcactctccttacattattataatgtgacattatgtatttatgagcatattcgattttccattcctcccctatccctccacccccagtgcaggccccagaaagcacaggttatatccattttgttcatggctatattgccagtacctataacagtgcttggcatatagtaaagacttgtacatccagttgcagacaggtcatgcctgcaatctgtagctgagcctttagaaggtatacttgaattctgttacttttctggggataaaaatatgggcctatggtgaaatcatttacaaatttctttagtcttaattgagatacagtgggaccggttttcccctaatttgtgtatggggacttatattcaaagaacaagcaagcaggccrgacgcggtggcttgtgcctataatcccagcactttgagaggccaaagaggagaatcacttgagtccagcctggttaacaaagccagaccccatctgcgtgtgcgtgtgtgcacgtgcgtgcgcacacacacaaacacacacacacaaaaccaatgtccaggtgtggcgatgtttgcttgtagtccagctacttgggtggggggtggctgaggcaagaggaacccttaagcccaggagttagagattgcagtgagctatgatcgcatcactgccctccttcctgggtgacagcgagaccctgtctcaaacaaaacaaaagaaacaaaccacgcagaattcttaaacagaagaggctttaagcaaggggtttgtagatgacagctccttcctcaatggaatatgcattttcccttatgggaaaagggctcagtgattttagtataacttacttaagaacaagggttataaggtaacagttttatctgtgtctttattcaggaaaaatcctcgcgatgatcccagaggatctcagtgaagccatttgggaatttccccaagaattcctacctgaaaggaatttatcttttatttccctaagcctctttgaagatgcacacttgtggtttaaaaccaaattttctggagtacttatcttctgcttatcagtggatcaccaagtagtgattgtagcatatctaggtttttaaagtctttttctttttctttcttttccttcctcctcccttcctccctacctcccttcttgcctctatcttgccctgtcacccacgctggagtgcagtggcacgatcacagctcactgcatcctcagtcccttgggcacaagaagtcctcccatctcagctttggggtctttttctattaacctataagcttcctgagggcaggacccacttatttcaaatctcttaaaccctgggatctataactagtgtcccaggaagctgccatgagcaggaagtgggttctagagctctcagcactgtggggagtgtggggctcacagagtggtaggaggaagcataaacttcagttgctgacatctggagcacagctgctgttttttttttttttttccttctactttcattttaggtttaggggatacatgtgcaggttcgttacacgggtaaatttcgtgtacagatgatcctgtcaccaaggtagcgtagtacctgataggtagctttccaacctgcaccctggtcctggttcaagcagtccctgttgtctgctgtgcccacctttgtgcccatgtgtattcaatgattagctaccccttataagtgagaacacatggtatttggttttctggtcttgagttagttctcttaggctaatggcctccagctgcatccatgttgctacaagggacatgatctcattcttattacggctgcatagtattccatggtatatggaatatataccacatttctttatccagtccatcattgatgggtatcttggatgattccatgtttttgctatggtgaatagtactgtgatgaacatacaagtacatgtgtctttttggtagaacaatttattttcctttgggtgtatacccaataatagttttgctgatagtcgtaagttctttgggaaatctccacagtgctttccacagtggctgcactaatttacattcccactagcagtgtgtaagtgttcctgtttctctgcaaccttgctggcatttgttgtttttttactttttcgtagtaggacagctgctgcttcttttcaccatctgttaataataactggatgacatggaatatggaggtctttgatacatgtacaaataaacattgtgtaaacagataaggaaagtatacgataggagagagaaaaggcctttatgaagcaggttttggtggtaattaatttgctactaaggcttccagttggtgatgtgagtgatttgaactcctgggctagggaaggctgtggaagaataaccaaccacctgctttcaactttaagctaatcatcagtgattgattgtcatgaacaatggcttgcatttgtaacttggttcttacttattcaacaactgggaagagatgggcggtccgaagcaactatgttagctccagatcttaatggaggtaggaagggggctgatgtcgcatagccttttcacaagctgccaaacccaggcggatgttggaagttgcccttctgaactgccctttcatttccatcaggcggagggcttgctttgctgcctgggaacgtggtggtggactctggctctgcacccttcctgcagagtgaatgcgctccaaattagaaaaacagaagtgtcctactttctattccccaccactgcctcagcttgttgccgcagcacctcctgcttcagctgcccttccttgggttcttggcatggctgggaggagcaggtgccaaggcccagtggccagcactgctgggaacacaataccagtcaggaatttaatgatatctcactgcacttagtaaatattttgtgggggggtcttaaaaaaaacaacctgtagatgtcataattagtgatataacaagacagattctggaagaaatttaaaaatataaaatttcagctttcaatctggattggctgtttgaatgaaaagagtgagcagcttttctaggcttggttaggggatgaaggatagcgatagtctggtgtggaagcatgataaagcatgcggtggaacagaccctctgaggagctaaagggaggaaagcaagcagtccatgcttaaacatgatctttattttacgttagctcttggcatttctacttcttcaacaattaatggaatatattcacatttggaatgggctaattaaggaacctagaataacgctagtcagtcatttagaaagcctttcttggagtgttacttttagtaaatgtaaaagcatacttcaacttgtaattctctctaaatggaaaaattataaatgctgccacctgttgacaaaatttgagggtgcattctactccagttggtcagtgatccctgccgacaggggatcttactggctggataatgaccctcagctaaaaatgctttaaaatgtgctggtctgactgtaccttatctgacattctgttcttggcggctgattggtgtgagaagtacacctgaattgctttgatttgtttagcccaacttgagacacagatgtagatcaatttaaagaatgctgaagctcccatgctaccttatagaatccatcatttaagacaccatttcatattgtatgccctgaagccttaaagtggatctgtggctgaaaagtatgtttttctttttcttttttttctttttttgagataagagtcttgctctgtcacccaggctggagtgcagtggcatgaacatggctcactgcagccttggcctcctggactcaagcgatcctcctgcctcagcctcctgagtagctgggactaaaggcatataccaccatgcctggctaattttaaattattttgtagagacaggatctcactttgttgcccaggctggtctcaaaatcctgggctcaagtgaaatcctctcaaaatgctgggactgtaggtgttgaccattcttctcggctgagtatccatattttaaaagtcttgtagatgaataaatactactacttacttggtagagcacttgcccttatgtctagccagagtgagagagagccccttttcaggacctgtgacacagcaccccaaactttggaggcagccttagcctatccccagggcctctgtgaccattgctgggtctaggacaccacactcgccctgaaagtggcactctttgaggccagtcacttccaactctgcctttcatttctgagaggaaggtaagccatcctcctgttctcctttcttttatatccgcttcggtttctttattattgattcccctcctcaccgtaccctctggaatcctttttccttaacagtttcccccaccctcctcgccacatacacatgctatttgcagaagtctccactttctgtattaaagaaaacctagatttccccttaggatgctactttctttcttgtcttttctgttaccgaggactttctcctatgtgaaaatctcatgttgggtgatggtggtggtggtattattattctgtctcctagtgtgtctttcatccttttctaaaagctcaaatctatctttatccttcatatctttcttctcaaacctgctgtttgtctttttacctccagtcccacattgccttcattttttcccagtaccgtccgccccctgccatgcaatttatcctgagccagccactattctggaatttacatatagtaatttgcttatttctcacaatgactttatgaattaggtattactattttcataggcacagagaggttaagcaaccagggtcacaagtaagtggcttagctggacctcaaacataggcagcttgcctctggatctatattcctgtgaatcaacttttccttagtcatgtgtttcaggtcatgtgcaaagatgctcattgcagtatgactggaaacaacttggatgtccaccattaggggattggttaaattatgctctatctaaaccatgctgtactctgcagttattaaagagaatgattcccagcactttgggaagctgaggcracaggattgtttgaggccaggagttcaagaccagcctagggcacaaaccaagaccctgtctctgcagaagagaatgagacagtaatatgtaatatgaagaaaaaaatctccaaagagaaaaagcaagatgcagaacatttgttgtgtgtatgtggggagaaaatctggtctgtgcgtgtagcactggatcaggcggttcctgaagccatacaagatttagatttctcaagtcgttttgtaagctgcctgtcagagacatcaggatcaggcatttctccctgtctgagaatttgcttctcacagtctgcagttttctgttcaggaggaagacagcatggtgtggtacatggcgtgtgattgtagagacaaatagcacttgatttaaagctagattagtcacttatcatgtgatcttgagcaagtcacttcacttttcccagcattggtttttacagttttaaaatggggataaggcctacctgacagaattattgttacttttgagataatatttactcattcaacaaatattttcattcggcacttactgtgtgcaaagcacgcttacagcactaaggttatagcagtaaacaagaacttaaaatgttctactctaatttagtttacttctggtaggaatagaaacacttaaaaaataaggtaaatcatatatggcaaatggtgatgaatattctgaaggaaaacaaaaagaaaataaagggtgaataggagtgttggcgtgtggtagaggtgcagtttaacaggacagttagaaaagtcttaacaaggcaccactggagccaagatttggaagagctgaggatacamatgggtatctggagcaaaagcagagggaatatgaactgtgaatgtccagggtgggcacctgcttgagagctgcaaggatgccggtatggctggcacggagacgtggacagagaaatgaggtgagagaggtggcaggacaggggcccagatgggtaggcctttgcaagcctgtacaattttggcttttcctctgcatgtaatatatctggcacataagggatgctctacaaatggtaactgtgttataaggatgccaccatgatgccctgctttttaggtaggtagaagaaagatagacagggtaacattttaggattcttttttttttttgagacagggtttccctgtgtctcccaggctggaattcagtggcgcgatctcagtgcactgcaacctctgcctcctgggctcaggtgatcttcccaccttaatctcccaaagtgctgggatgagccactgtgctcagcctaggatccacccatgctcacccacccaactttttattttattttattttattttgagacaggatcttggtctgtcacctaggctgtagtgcagtggcacagtcacagctcactgcagcctcaacctgctgggcttatgcaatccttctacctcagcctcccaagtagctgggactacagacgggcactaccacgcccacctaatttttgtactttttgtagagatgaggtctcactatgttgcccaggctggaggattctttttaacaattactttttatatgsctgatacagcagcatcgttgcatagaaagagagarcactttagcagaaatctaaggaccagatgtcatatgcattgtgctgttggctttcactgaatccaagcttaattaaactgaggctaataacttctctatccacctcatagggttaatgagaagagtaagaggtaagtaaatttatagaaatgctttgtgaacagtttagtatatgtgaagcataaaggctatgtttgctgagttgcagacttggaagccatgtagtccagctccttccaaggcacagttgtcttgtctttgtgaatgcttctagaaaagggcactcactacagaaaataccacaaagctgccacttttcttgatttggatccttagttacagttaacacagcctgcacgtgcactagttccttggaagttataccatgttgctgcctcaaggtacacttgtattatcaacagcttaagagtgagtctttgtgttgaatttatccatctgtaacccaaatgaaacctcaccgtgataaggtattgaaccagatcaggaaagtagattaaggagctttactattaaagagtcaggtaggtgatgaaaggggcaaactgaaaaccagtggaaggaggcttatggaagtagtggctgtgttgtgcccaggttctgtgctgtgctggggttgagctccctgtgactcatgactacctgtgctgagctgtaactgccacagagagcaccagggactccccaakctcttagaaaaaacccagaaaaggaattaaatgtgggtggatgagggcctttctttcctgctgctgcrtttttattgaattgggaaatgagctgagctcctaggtgagctctaccaagagcagcagcaaccgtttattaatcagcacactctccatgtgcccagcactttgcatcttatacatttgacagggattgtcacttttaatcctcaaactgccctgtgcagtaggcattaccctttgtcatgggctgagttgtgggtgtgtcctctgaccccgaattcctgtgttgaagccctaactgcccccccagtacctcagattgtgactatatttagagagaaggtctgtaaagaggtgattaacttcaaatgaggtcattagggtgggccccaatccaatctgactggcgtccttataagaaaaggacatttggacgtggatacatagagtgaagaccatgtgaaggcagcaggagagacagccatctatgaatcaattagaggcctctgaaggagcaaaccctgctgataccttggtcttggacttatagcttccaggattgtttaagccacccagtctgtggcagccctagcaaactaatgtgccctcatttttgttgttgttgttgtttgtttgtttgtttgttttgagatggagtccctctctgttgcccaggctggagtgtagtggcacgatctcggctcactacaacttccacctccgggttcaagtgattctcctgcctcagcctcctgagtagctgagattacaggcgtgggccaccatgcctggcttatttttgtatttttagtagagatggggttttgccatgttggccaggctggtcttgaactcctgaccgcaagtgatccacccgtcttggcctcccagagtgctaggattacaggcgtgagccactgtgcccggccccttgtttcatatctgatgaaactaaggatctgagagtagatgaaactaaggatctgagagtatatgaaacttgccaaagttctcacagttacggctaggtaaagtcccgggattaaatccaggtgcgtctgattacaggtagagataaatctaggcattaaatccaggtgtgtctgttcccaaagcttgtgcttatacctaatgtgttattgagtcctgaatgtgtctaccttaaggctatttctcctcacttttgaaatagtgagtggcacccagatctttgacttatttctggtccattgttcttactaatataccatgcttgcctcccctgccaccactttccttagaggtaagatactgcacaagtacatgagagcctctggagaagaatgtcacaaacaggtgactaagttagggagttcgtaaatctggaaagatttgcatgtgtttgggactttccttcccagctcacttctgatgaagtgagatagaggcgacttgttcttcaaagtggtttgttacctagttagaagtagagttaagcctgacagaaaaatggggcagataagtgtttagtgtcatacttgcactgttgctgtcactgagaagtttggtggttcgtcatgaatcggggtaaatattagaaatacccaagtcctgctctcactcctagatgttctactctaggaaagtctgggacaggatctgagcatccatcatcattgattttttttcttttcttttcttttctttctttcttttttttttttgtttgaggcggagtcttgctctgtcaccaggctggagtgcagtggcacgatctctactcactgcaatctccgcctcccgggtttcattgattctcctgccttagcctcctgattagctgggattacaggcgcctgccaccatgcccggctaatttttatatttttagtagagatggggtttcaccaagttggccaggatggtcttgatctcttgatctcaggtcattcacccgcctcggcctcccaaagtgctgggattacaggcgtgagccaccatgtccgaccctgattttttcttttgagtcttccttggtgattttgatgtgctcatcaaatggagaacccttgaagttgtggaatggtttatttctatagttgttccttctaaaccagctttaggtacctgttgcttgtagtctaaatcactggaattaattatcatctgtggtctttagcaggtctgaatgtgagagtccagtaggtagcaggtgctatccaacatgtttttgaaatttttcttgctgagttcagcctattttgtacactttgcattttactcctccagagggctctagagctcagctgagcagactggcttgttaccctcattagacaaagaaactagccaataagatttgagcttttatttgttggaggaactaatgttatgttaycttttagagcttcctgttcttttcttttctagtgcttcccccgctcccagctctcaacctctatccgatataaagactkttttcttgtcaaggtcacagttagtgatgctagaacacaaggcagagactgtggctaagctttcaggtcttagaagagggatctctaaaattctttgtttacatttatcagtgagaaggttgaatttacatcttcaatatatggataattatgtataaattatttatttacccatgcagtttcactaatgtgattgcagtgcttttttttttttagacagtcttactctgtcacccaggctggagtgcagtggtacaatctcagctcactgtaacctctgcctcccaggttcaagcaattctcgtacctcagcctccctagtggctgggattacaggcatgcgccaccaggcccagctaatttttgtatttttagtagacatggagttttgccaggctggtctcgaactcctagcctcaagtgatccaccggcctgggcttcccaaagtgctgggattacaggcatgagccatcatgcccggccactaatacgacattcttttaaaagaatgagccaagccctccctgcctcccgcttccccaaagttcaaatattttctttctgtacttcagtgaagataactttggaagccactgctttagaaaatgcttttcattgatgtggcagaggtttgcggggaaagagtttatagatgatcttgaggttgtttgggctgtaggtacctttctttttttttcttttttctttctttctctttctctctgtcttccttttctttcttttcttcttttttttttctttttgagacaggagctcactatctcactctgtcacccaggctggagtgcagtagtgtgattgtagctcactgcagccttgaactccttgggctcaagtaatcctcccacctcagcttcccaagtacctgtaactacaggcatgcatcaccagtaaaagcaattttttaatttttatttttggtagagatgggttctctctacattgcccaggctggccttgaattcctggcctcaagtgatcccactgcctcggcctcctaaagtgttgagattacaggtgtgagcgactgtgcctggccttgcaggcaactttttattccaattgccatcttgacattgtagtgaagagtgagttgtccagggaaaggcagaacctgacagtcattgagaggggactttatgtggatggctcacaggcagtaaggaaggctttggaggaagcattggagagttagcaagcaataggtacctgaagcagtggcgtgggtggattttgtcacattcaactcagtgagcactcaaatcagcttggcattcacacagacttaggggtttcaatgcagtgctgcatattcatgtttgagccaccaacttcctgcagtaaggaaaggaattctttgaattgtaagtgctacagggccatgaatacccatttttaagttgtcatcttgatacttccaattttgaaagggtagagatgggctggtatccttatctgaatggatttaaagtttctcttctggatgttgcatcttttattatactttcagctcttcatctacctggttctttaactaggatataaagacatttttttagaaaatgatagtagatccagcaagatttttgtcagagcagataaactggagtgatttgtttaggaaaaagttaccactgtgtagccccaccagagccaaacctggagttacatttaaacaggtcaatctctgaagaaaagtgtaatttggggtcatatgacctaactcctgaggtcacccagagcttatacttaaatcagaaaaggaagagatgcccatgagcccaaattttaattttgttatttccacacatttagaaaagtaggaagaataagttttgcattatcccaatagatttaaaaactctagttccttttaaaatctttaaatagacttaaaacaattycaaattttttccagctttatcgcrgtatacttgacaagtaagtgtatatatttaaggtgtacaatgtgatgctttgatacatacagtgtgaaatgattaccacagttaggtttaataattaacatatccatcatctcacataggtatgatttcttatgtgtgtggcgagaatcctgaaaatcaactctgagcacatttcaagtgtacaatacagtatttatgatagtcaccatgctgttaatcagattgcctaccttggttaaagtgcagactcaggtgaaggtctggatggaggatcatactttaattgatttagactctaaaataaatgtatatagttatttttgctaacctaagaacctactcataaatggctagtgttaaaatgatgtaagataaaatgctttcccttcacttttttaacagaagtggaaatggaggtgatgtaacttgcctgaggtgacacaggtagttaagagcagagaaaggactagagccaggactggtttagtgatttttagtttagcgcattttaaatttttatcatatgattccttaatctttgagtcttccaaatgcagaagctaggttatagaatagcatattttattttaatattacatttatggaggtagatattcttggttaaagstcatttttaaaaaataatttcaacttttagattcagaggatacatgtgcaggtttgtgacatggatttattatgtggtgctaaggtttgggatgcaaatgatcccatcacccagatagtgtaaagctccttttagaatggtatatgcagatttaattctgtcactgaaaatgtttcaagaactaattggaactgggcaatagcttgcatttcacttgttttgttytttgcatttaggttttcctaggacattaggacaagccgaagccctggacaaaatctgtgaagtggatctagtgatcagtttgaatattccatttgaaacacttaaagatcgtctcagccgccgttggattcaccctcctagcggaagggtatataacctggacttcaatccacctcatgtacatgtaagaatatacaaagtgctttcacaacctgacaagaaaaagacaaacaatttccattgaaaagtggagaaaaggatatgagtagaccattcaaaaaagaacaaatctacatgaccaaaaaacattttttaaatgttcaaatgtagttgtcagggaagggacatttaagtatttaaataggatatcactttggatctattggactggcaaaatcaaaatataaaaatttttaattttatatttattactgataaatatatgtatacaatgtatataattatatttattttatttaaaaaataaaactaaaagtctattgctggtgggatctggggaaaataatactccctttttttgttagctgaagtattactagcctctttttaaagcaacataacaatgtacattcagaattttaagtaaataatttaattcaggctacttttaagagaatagctgtggaaatggaagcattagcaggttaggtcatgtataggttgatgcttgtttcaatgttgctgtagtgggcaaaaaacaaaaccaaaaaaatctcaaaaaagcaaatgaatgtccatctgtagtggaatggttaaatacattggagaatatttataccatcttggaatataatatagtcagtaaaaagaatgaattagcactacttaaaaattaatatacttgatttttagataagctttaggtttacataaaaattaaatggaaaatcccctccctcaccctagcttcttcattattagcattttgcattagtgtagtacatttgttacagttaataaactaatatagaaaagttattaactaaaattcatagtttgcattgacgttttcgttttttatagtctatggattttcacaaatgcacaatgacatgacatttttccatcattactgcattatacagaatagtttcatggtcttataatttatatttcctgtgctctacctattaattcctccctgattttcsccaaacttctgaaaactacagatctttttactgtccttataattttgccttctatagaatgtcatatcgttggaatcatatagtatatctacttatcagacttggctcctttcacttagtgatatgcactacacattctgtgttttttggaggcttggtagctcatttatttttgtaagtgaataatgttccattgtatggatgtaccacagtttattcgttttgaagaacatcttggttccatgtcttggcatttatgaataaagctgctccaaatattcacgtgcagagttttgtgcaaaatgtaagttttcaactattttgggtaaagaccaaggagtgtaattgctggattgtaagtgtatattttagctttgtgagtaactggcaaattgtcttcyaaactggttatttgattttgcatttccaccagcaataaatgtttctatttctccatatcatcaccagtatttagtgtagtaagtgttttagatttcagccgttctgctaggtgagcattatagttttttgacatggagaaatcttctgaaagtgtttttcttttttattttcttttctgagatggagtctcgctccatcacccaggctggagtgcagtggcgtgatctcagctcactgcaacgtccgcctcctgggttcaagtgatttttctgcctcagcctcctgagtagctgggattacaggcatgtgccagcatgcctggctagtttttgtatttttagtaaagacagggtttcactatgctagccaggctggtctcgaacccctgatctcaagtgatccacctgccttggcctcccaaagtgctgagatgacaggtacgagccactgcgcatggccctgaaagtatttttcaatgagaagtgcaaacagcagaatgatcccatttttgtaaaacagggactacacctctttatgtatatctgtttgtgtgtgtgagtgtgtgatctatagctttataagatcagggagaaagtcatgagggctgtatcctgggctggaactggatgagggaaaggaatcatagttgatgtgcagagtgggtagttaagtgactagggaaggctaaaggaataaaaagattacccttaaacagttcaaagtataacattgatacagttacctaaaattagacatgtgtaaaggtatatgtgtaaagatattttaacaaattttcttaaagaattattgtttttttgataaagactatttggtttatgataaagactatctgataaagacagattgagctgtctttatcatataatagtgaackccagttttgggtggtagatagtattacttgttattcaaatgtggaatacatgccttactaggttagtctttatggaaacattacacttggatatagatggagtcagtaattactatagaaaatttcttcgaggggctaagaatggcttcccaactcctgggtgccattgtgtcagtaaagtcccagtgagactttttcactaagcactccttttgaagtcttcttttaaaaatgtaaaagcaggccaggcttgttggcctgggaggtcaaggctgtagtgagctgtgattgtgccactgcacttcagcctgggcgacagagtaagacctggcctccctcccacctccaaaaaacataaaaattttctaattcttgtattagatcccttcctgatatctgtctcaagaagctatgatgggggaaaaatgggtgggaataaaaaaggagttctgacaatacagatgggaaaactgaagtccaacacagacgctttatattttgcatttgtccagacctgctgacgcagagattctcataaaatttgaaaagccttaccactgagttgcttttcaaagcctgggtttccctcaaagaacatctgcaattaccatgctgcttttgaagaccatagtgaaagtgctaacctagaccagctctaccarctgtggtgaagtggctatgttgtctgggatatataccctggggttcgtcatctcatgccaggaaaatttaggacacggacgcaaggagtttaggagcggaggtttaataggcagaagagaagagaagasaaagagaaacagccctctctacagagatagaaggggctccaagtggaaaagaccagctggtggtggatgccccggattttatagtccagggtgaggagatggtgtctgatttacatagggctcacagattgtttggatcaggcatgatgtttacacagtgctggagaaaggctggtggccccaccctaaccttattatacaaatgaactctccctgtcctgcttctgatagtacacgtggctgacaaagagaagggaagatggagccgccatcttgaacatgtctagtccctagttcctgccagcattcccccgtgcaagctcccagcttgcttgtctatgtctgcagctcgactttacaggctgatctttgttagaaaatgatttggggctgcttttcattaaagagaaaagccttactgaggattcccatgcccttaccatctgcctaagtgatttcttcttaactcctgtgtcagtggtagccggattccctgggaaggagggacgctgttgctctagcatcattctgctttttggaaacagggttgtatttgctgatgctctgaaattctggaaatgactttctgagccttgtggctgtaagtaaaataaagaaggtggcaatagaggtaatatattctcccatccccatctctcttgtcatgttgggttaacaaccatagaatacacatgtgataattmcatggcttactcataaatcataagaataagtcatatacccaaggccctgagctgtaatggaattttagtgcrtttcaaatttatagccagtttctgattatccagttgagttgcctgtgcctctcagttctgttctggcctaccttttgacaggtttatttcttgtgactatctcccctggtgagtaatagtcatggatgtgggaggcaaaattcaaaacgtgtccattttgcaattttaaggaggcatgattcctggggagattaaaacaaattgaaaatcaaggtgttttttttttaattataatttttcagttctcagaatgtttgtccctgattgtcatgggtaatttaataatttctattttaatacacctttaaatatgtcattttttaaatattctaattcatgccttctgtttctcttttccttaattttagtggttaagagtttcactaaaataaatgttattttttattttttattatttttatttaaatttttttgagacagtgtctcgctctgtcacccaggctggagtgcagtgacacgatttcactgcaacctttgcccctgggttcaagtgattctcctgcctcagactctcgagtagttgagaatacaggcacccgccaccacacccggctaatttttgtatttttagtagagacggggttttgccatgttggccaggctggtctcaaactcctgaccttaagtgatccgcccgccttggcctcccaaagtgctgagattataggcatgagccactgcgccccaaccaactgataaatgttatcacgtatgatgagagtgggggggttcttgcctttttccccaaacttatagtaagtgtattcaatatttaaccttatgtatgatatcagctataactttattataatgtccttcatgagattttgggggggaatagaaagctagcaaaataattagacaaacatactgcagaaaatcatatacattttcaaatcaaatacataaaaccagccaggcgcagtggcttatgcctgtaataccagcactttgggaggccaaggcaggtggatcacctcaggtcaggagttcgagaccagcctgaccaacgtggtgaaccacactgtctctactaaaaatacaaaaattagctgggcatggtggcaggcacctgtaatcccacctgttcggctgaggcaggagaatcacttgaaccccggggaggcggaggttgcagtgagccgagatcgagccattgcactccagcctgggcaacagagtgagactctgtcttaaaataaataaataaataaataaaataaaacctgtattaatcagaactagcagttaaggtatattttttgttttacattgagaaagaagcaacacataggaaaagctaaaataaaggatttaacaaatccaacaccagcttacctttgagtaatataatttaggtgaggacacagtcacttcagttttttttcccttctgtatgttcctacagtgtatgtcattatttgatctagtaaaataacctgaataagagaaatttcatagaagctccagaatagaattggaaagctggcagagatggtactgaaccgtattctcctagattagtatttttcctaagtaagccaagttgtttttttgagattttgttttccgcattaagaactcaggctttattttagaagacaaggtagttttagggatatttagagaaccaagatgacaaggtttgttgttaggagaggttgcatgcaattttaggctgaattgaaagtaccatttatcaacagcactggaacatgtttgaaaagatctgaactgttaataaagatttaatgtcagctcccaggaaataaggttaacatactgttaagtgtgctatttctttttctactactcttaaaattaccactgtcaccaaggcctaattcatcatgtggtaggagttaaagatgaatacrtggttttgcacagaaaagtttttaacctatgaaatggcccaactgttgtctatattaattggtttatttggtatttgtagggtattgatgaygtcactggtgaaccrttagtccagcaggaggatgataaacccgaagcagttgctgccaggctaagacagtacaaagacgtggcaaagccagtcattgaattatacaagtgagtgtgcttcaatattttcatgacaaaggacagactggaaaggtgtggagcctgctgggaggaacacggggctgaggcagagtagtgtttctttaagacagataaacactagcgatccaaaaccttcccagaagtcagatgaaatgctggagctgtacatgaaagataaggttcaatacttttatcctgaaactgttagaacataaggacccaaacctgatcatctctgtctgctttggatgtaaaacaacattgagatttattttcattttcttaaaaatttaagtgactgagatagtggtcccacatatgttgatactcccacatataaatatatggtttggatagaagattagaagacacttggtgtgtcccttcttgaagtgtctgtaaggagtttaacaaaaaaaggctaaaaccgtaaaccagagattaaaaattcaaatggctgcaggggctagggcaggtattggaaatgagtctcaaacatggtgggggatgtgtcaagctagacagttgagtgacaggtcttgggctgttccggccagttatcattctagggcacgcaggccaatgattcccatttttcaggaatagcagaaatctggttttctgtgtgtatgtgtgtgagggggaatctcagttttcatattggcaacatatttaaattttttaaataacatgcaagtcaarcaaaactttatgctgagtgcattcaaaacagcagtttatactctgttacaatcactttctggccttgtagtcccccccaaaatttagcaaaccttaagatcagagttttatgatcatattattatgatacatcaattatgtattccatgattgactaagtaatataggttttagtaaagcttttcagtggttcgcttttgaaaattatatattggggcacatttggaatggcccctataatgctattctttgatatgttttaaagggggagaaaaaaggtggcatcatgacaagcataccagaattgcaaaagctatgaccttatttatgtacacccagtggaggtgttgatacctttgaaaggggctgttttagcacttagtgtggtatatgatatagaccatgagatcatgcttgttttatatctaggatcttctgcactaatacgtggaaaagaaacctaaaaagccattgtatgttgggctttgtttttcaggagccgaggagtgctccaccaattttccggaacggagacgaacaaaatctggccctacgtttacacacttttctcaaacaagatcacacctattcagtccaaagaagcatattgaccctgcccaatggaagaaccaggaagatgtggtcattcattcaatagtgtgtgtagtattggtgctgtgtccaaattagaagctagctgaggtagcttgcagcatcttttctagttgaaatggtgaactgataggaaaacaaatgagtagaaagagttcatgaagaggccctcctctgcctttcaaaaggctggtcacctacacatgtttaaggtgtctctgcacatgtctcaagcccatcacaagaaagcaagtacagtgtggatttcaaatggtgtgtaacttcagctccagctggtttttgacagctgttgctgtggtaatatttttgacatgtgatggtgatagtctctggttctccccatccccacaaaggctgttgaaccacagcaccaggaagcctgagaatgaatcctgagggctctagcccaggctttgtcccaggctttctggtgtgtgccctcctggtaacagtgaaattgaagctacttactcatagtggttgtttctctggtcttgagtgactgtgtccacagttcatttttttccggtaggaataactccttttctacatccacgctccatagagtctctccttttcagacatcctgggatgaaagaatttggcttttttttttttttttttttggacatctgttttcactcttaggcttttaaacaatagttattgctyttatccctctcagattctaataactgagagcgatggggctatattgaatctctgtatgcactgagaactgagctatgaagaggatcttattaaactgctggtctgactttatggattgacactgttcmtttcttttattgtgaaaaaaaaaaaaaaaccctgaaagtcttgggaaccccctaaagtcttttgggaatcctcaaaaagcatgggaagttaagtatttagctacataaatgttgtaagatcatatcttatgtatagaagtaataagaccatttggaattactggactaattgaatagttaaggtttctattcgggacaataaaatgtattttgaaagtgctgctaactattgatgctgacagtgtttcactcctatgagtgacccaaacatattataaatatgtggtaaagggaatggagcctgtggggttgagcagaatgttgtactagctgtgcctggactgagtataacagctttatgattatgagaaaacaaattctttatttttttttctgttccaaagattcatcctatggggtggccataaagtctagaattagatactaatattttgtcattcattataacatatcaataaaccatttgttaaaagatttgcctggtttccagacttggtggccaccttgaataattcttgctgtcttctgggaaggatgatgaaatttattcctgctgccttaaaaatatgtatcccttcttcacccatcatgactgtccccagtgagtgtcctttactattcttgggagtgactcctgtctaacttttcatactggcgagaagaaaagaagcctattttaacactttagtggtgttgaaacacattacttactttctgaagatgtcccagtgaatcctctgtcaattcactgccatatgtaatctatatgataaggaawgcatcttccttctaagtactgcccaaactcttgccagctcctctcccattgtcccttcatgtgaatatttcttggctaccttagtggaaatatagatcagtyttctccccatccatcctctcaaacataatgagattgtttactttttagatttatgcagtgaaaatgcccagtcaggtctgaatcgtcagtgcattatattgacyctgagcactttagaatttagagttgcaattgaatgccagctgtggagatggggtgcatatcagatatataaataaagctcaggtttgctagggaaccaggtatagagaaaaataagtctgatatgaggaaaattgcacaatttagagtagttatgccgtagagaaaatttccacaaactaggaaatgtagagagttattctatagaatactcaaaagaggaaagtatgtgatttttggaaacaggaaaatcttcaaacttctttcttcacttccctttgtgtttagctgaccctccaatgtgatcattgcctttggagtttgggagaggtaygggaagtggcctgatccctgcttccatacttcactcctccatccatccttccctccctcttcccctccagctaaatggacaattctagccaacattgagtcactcaataagtctcaacagtgggtgtgtttgctgagattgtccagcggttgagcagtttggtctcacctccctcgctagttgagaccaaaaagagacaaataactttttcatggtctttgaaacataatgcttatttcgtggtcaatggctttaaaaaaatctgtttcttgttttcttcaacaaactcactagttttcccttaaatgatattgtaaaaattaaagtaatcttgaaaatgttttgacaaaagtaaaattaaagggacatcttttcttgttttgttttttttttttctattgccacacatgaccgttccttcacctttaagcaaagagagtggttcagatggtttctaagatgccaacctgacctcgcattctgtcattctacccagctcttaattcaatttgcttccattatcctaacaggcttctttcttacttagaacttggaaaggctgctgtatttaataccctccaacactaacgcagacttaagataggtactgtttattgaaaacctactgagtgaaatgtgcggttttaggaccttcataaacatctcatttaatctttctagcatcctgtgaaacagccatgatttcacgttgataaacaaagaagacaggggtcccagggatgtgaagcatcttgcccaggcttctgctgctggtgaccagtgtagccaggactccarcccaggttttcctgactcagaagactgagctttttcctggatgttattaatagctaattgtgtccaagcaaccaagggccttgagtctgcttggttctgcttatggcctcacatcaagaaatggagctagtccatgtctgtagtcccartgctttgggaagccatgatgggaaggttgtcggaggccaaaagttcaagaccaggctgggcaatatcacaagactccatctctacggaaaagtaaaaaattagccagtcatggtggtgtacacttatggtcctagttactcaggagacttaggcaggaggattgcttgatcctaggaattcgaggctgcagtgagctatgattgcacctctgcacccaagcctgggcgacacagcgagaccctctctcttaaaaaaaaaaaatagcagagctcaccaaagtgatgttcacctttttatgacattcctttttcttagcttaagaaaagaaagctgctagatgagagtcttagttttcctgcataagacctcctttatgaatagaataaaagactgtcaaagtaggctgggcttgggcccaggctaatctatgaaggaagcaagctcgtgttccttacctatccttttggtgtccattggattgtgccccgaagtggcctttacccttgagccgtccccagccatggtgctcacacataggcttttgagctccttggagctatccagatcctgctcacttttccttcctgagatcagaacaaatcacccccttactcccactccaaacaaggccttgatgataaactaatccttcctaaaatgctggtaggtaaacaagcaatgatgaagcattgaacacaggttaactcctgacttttgtaccattgtctattccattacacattaacatgactctgaatgccagatccaaacctttgcccaccatctgcttgtcgtgcaacagttgaggcagtaaccaggggagattcacttcctgtcttgtccttccccagggatcacccccctgctgccctctagcagccaarctcagatgagttccattgttaccctaggtgtgcccatctctttggtagggaaggagaaaggtaagaatagccatcartgaggaaggattcttggagcgaggagccactgtggtttttcctgctatttaagatgttgagaccggataactttagaaagatacctgcacaaacccataaatastgcttttataaagtttagttcaccggaacctgagttcagtatttgacattagctttttgtccaaagagttgaagcctgctggaggtctttgctcaaataataaataccacatatttccaagtgtgttcaggtataggcactaggtactgtctgtttacttcatgttaggcacattacatgcattggctaatcaaatcctcatcaattacatatgtaataatctaaacttgcctccttgtattataaatggaaataatcctgtttatttaaacgggttttcatgtacctgtagggattaggaaactcaaatggcctttttaatacctttccctagtttgagctccctgttctctttaacagataaaacaacatatttgcttcagcctggaatctgtttttggtgctttggtgcagagacaggaaatgggcactcagagtcacactggtagttgcacactgtatctacagagggcgtgtctcatctgtactctgctgggttacaggatttcagtaggtatttgtgtccacctgagaattctgtttattacctttcatttgacagtgtctttcctttctgcagttgattttgctagagaggcaattcataaggtgaggtcctgttcatagtatgacttgctttctcaatatctccttcaatttttagtaactcttggtctatttggtgtctttaaaaaaaataacctagtaataaagacttcttttaatgtggaaatgtggtctggtagtaagttatttctttccacatgtaactgacccaatctggtttccaaatgagaagtgtgcaggccccagaggttgagaagccatatttcaactgtgaaaaaaatctgcttcctgcatctgttgaaatatagttgttcatacttgccatcccttatctttcttgtaacaatttgcacagttcttgccagaataaatgccattatctgtatgtttcagggagttccccaatttgatcatttttgtgtgtgtgtggtgtgtgtgtgagagagagagatactgcagtaaaacatttctaaaggatgaaagctcttgtatggcatagatatgaattccttcctctggtaataattaggttattcccagaagcacagtgtcattctttaaataaaagctttcctgtttaaagcttttcaaaggagcagaccaccttgaagattccccctagggttgatatgtgtctaattcattttataaaaattattcttgtcttcattttaaagctttggctatatagtcagaaatgtcctaaataacaaactattttgtatttaatttagggaagactaaagggaagaaaaatgaaaactcagtctttatgtaagctccaaggatattagggcttaaagggcttttctagttttatgagaatttgtactactgatttttatatattcctgtttttgagatgracagatctctggggaaattgttgagttacaatggcatttcactgtgatccctctcaagctcagatcagttctataacccaatgacaacctgtctctttggtttactgtcctgtgaaatgtcagctcaagtttcccagaagtcgtgtgtttatgatgagtcagagtgcttttcctcggtgggacagttgctggccctcttaattttggtgtatgtgcttccaagtatctaaacctccagtctgatctgtatatgctatcctaactgttaattgtattattgattatgttgattatcttgcttgaaggttcatacttttcaatttgatagaaataaagtttttttctgcttatagctagcgaattcatttgtttgtatagctttttatacttgataatataaagtttcacaaatactttcattgatgcgtctctgcaaccactacattaccaacaatgttgtctccaatttgcagaaaagcaagatcttgaaccaagaattattatccccagtcctgttttcttttctgctacaccatattgccttattcgtatacccttaaattccttatttgtccagcactttattgtttacaattttaatgtacattctttgtttttttccccctaaccactagacaaccagggatttttctttttcttgaaatagataatgtgagcagattctctccctgttttacacattaggaaactggatcagattatatgactcttaaggttgtagcatctgggattactcagcagaagcagaaactatagcaggcctatcacatgggagctagaaccacaaagaaaatagagctgctgtaggagaagctccctgagatagtgagggatggggaaaaatactctggcatttcccagcctcacactctcctgtctctggggcggcttcccttagctgaacccagccagaagccagctgacataggagcctgagaaacatgttctaaaggcttgtccatgccgctgaaaaggcagaggaaaggggaactgaagaggatggaatgtagtagattgtattaaatttaatgacatccgtccagtcccctcctttttttttttttttttttttggagacagggtcttgctttgtcacccaggctggagtgcagtgatgcaatcatggctcactgtgcaccctcaacctcctgggttcatgtgatcctcctgcctcagcctcgttagtagctgagactacaggtgcatgccacaatgggctaatttttttttttctgatttttttttttgtagagacagggtctcactaagttgcccaggctggtctcaaactcctgggctcaagcagtccttccaccttggcctcccaaagtgcttggattacaggagtgagccactgtgcctggccactttcccttcttttgggaggattttacaacttggccccattggcttcatgcttggacatatggtttgctttgaccagtgaaatgtgggcagaaatgacgtgtgccacttctgagcagaagttttaggagctagggcatggtcaccattcttttcctttgcagtgagactggcgacctcacagagctctttcaacctggatcctaaagtgaagacgtggaccagagatgtagccaatccatcatagatgagtagtgtgcattaaaaataaacctttgctttataagccactgagatttggatagagtttattttcacagcataacttagcccaagctgactgataaaaccgggcctaagactaatatatcttgttatccagttataactttaattcttttattatgcatttttactctctcgggatgcaaagatgaatcagacccagtttttgcccgagacttcttcacaatgtactggaggagatggccatattattagattgctctatacatgactgttggagttgatcactgcgctataaaggaaacaacagaagtagtaactctcttggctggccaagtagagcccatggaagagctaatatttgagctgagtgttgcatgcaaaagggaacccaagcagatgaaatggtaggcacaagaaagtctgagcatgcatggcaggtggaggccacagcagtgtgaggcaggaccggggagataaagataagattgaattctactgggaagggcctggccttcatttggttggtagtaggcagtatattaccagaaaatgacaccatcagatttgcatgataacgttgtagctgtaccagggtctgaactaagatgtggtagcagagttcaacaaaaaaggatggttggataatagcagaagagaaaaacttaaatgactctagggaacaaaaatgagtgaaatagtggtgaatgtgaggcagggagtggcagggctgtgaggactggagggcactgccctatcagaggggagccattgctcagttctggacagttgtttccatcttagggatggtggctcaatgctgccaccatcattcaatttgtcaaaagaagccaaaaatttgtgttgcatgtgaagttttatttttaaatatttgcagttttaattttaaaaaattaggggagggctttccagccttaacaacaacaaaatggagagttatcgagaattctgtttttataagagagcactacccatttaaatcacttgagtttctcccctgctccgtaattcaactgatgtgatgttttcccatattaatttcagccagtgaatatgtgtaagtatatccagtgattctctctctctctctctctctctctctaccagagggaccacaatcaaggcaccttttgccttgctcaggaccacaaggagttggagacagggagctctactatttgaaagtgactaggagctaagcagtgctgagtctttcctgtggccagtttttctcctgccaggatcctggggtcagtccctttaaaaagtctagaaggcctcccatgaagaaattatgtctcataccccattagtagttgacactttgcatccctgccaatctagtgccatataacctgagagagggatgccatttcctgacaaggaggactcagaaatacaaaaatgaatagtccataactagatcagtcaggacagaccagccactctcttcaaagtagtggctcacatacactgacccctccagatccactgactatgtcaaccatcctgggggcactgaccatctcagacaggctactctggacatattgaacaccatgacatcctgactattctgggtacattgatcatatacacccaccacaatatgaaagacttctattagtccaacagggtcaaggagaagggaggcagactaaaattgcttagagacctgggtgaaccatcttttatattttatctttgttaaaaaaaactttgttatgtttcctcagtataaagataatttaaaagaggtgaattatttaggatacacatgaaagtcttacctaaaaatttatagatattgtatttataagttgaggctagatagtaaggattcttagaagataatgacagatgcctagatctgaatctttctacacatcttcaaaaaaccatacaggctgggcatggtggctcactcctgtaatcccagcactttgggaggctgagacaggagtattgcttgtgcccggtagttccaggctgcagtgagccaagatcatgctgctgcactccagcctgggcagcagagcaagaccctgtcattcataaataaataaatacatatatacacacacacatacatacatacatacagctcaacaaggacagcaaataaaattacaactcatatctactacatattaggaaatttaatagaaactctcattttatttaagagggtaaatcatagtcccagctattaagctcaggtagaaagaagagaaaaacaggaattatttgagaaaaacataatgcagtcggatcccagagagtctcacactaagtggagaaatactaagaatagccacactgcattacagcacttgctactggggaattgaaggggcttgaaagtgcatgggcccaaacatttaagtcttcagagggtactgcttctgggagagaaaagaggaactaagtaagaaaaggtatctcttggaaatttggtgatgaagagggaagaaaaagttggaaattaagaatcctacagaaagaagagtttcataaaaatgatgacatattaaactccccctaacactctccactccatgcagagaagaaaaaaaaaaaaaaagagaaaagagaaaaatgctgttcattaaggaaattgcattttactgtatctactgaagagggcactcttgagctaagaaacctagtaaactactcaaatccttcagcctcatttgcagaaacacctggcccaagaaaatccaacagttttgaaaatgaacagaaaatccagcagtcttgaaaatgaacatccaaaattattttttaaagaaaagaaaatgagaatcaaaattcttcagctgatgaaaatattcaagacccaacttcaaggcggagaaaaccacagcacgacacttcaacataaatcaaatagtatcaatgacatgtagaaaacacacaaaacagaaactcacaaatgcaaaatagaagtgggtacaaaacgaggatttgtgaaacgagttgactgagtacagaaaagaaaatgaaggaacacactaatcctaaaaattagagctaaattataaggtatgcaagaaggtgcaaattcaaaaaagtacacaaaggacacatgaaaaattggaatgaaaatttccaagagaattgaaacaaaatgaaaagccccaaaagaaaagaatagctatagaagacaaagaagatctaacacacctataattgaattttctaaagaagaaaaagcagtgaattgagactaagattcaaagctatgatccaataaagcttaccaaaagattaagttgaaaaatcctgaatctatttactgaaaggatgctttgtgtgaaaattaaccccaagtggtcaagtgtaagatattttcttgtatgcccgggaaaatacctctaaacctccaagcaaaaagaccacgtgattcaatacacagatcaaaacaacaatggagcagtgctctcaaggacagaaagtgtgaaccatggatttttatatccagttaagctgatcttcagttatcaagattgataaatagttttaaaatgcaaattcaagttatattttcttctctctttcctttcttcctttcctttcttttcttttcttccttcctttcttttctttgtctcatattgtcctccaggctggagtgcagtggcgtgatcatagctcactacagcctcaaattcctgggcccaagtgcctcagcctccagagtagctgggactgtaggtgtgtggcaccatacctggctaatttttaattttaattttaatttttaattttttggagagatgggatctcactatgttgcccaggctggtcttgaactcctggcctcaagcaatccttccaccttgacatctcaaagtattgggattacaagaatgagccaccatgcctgtatattttaatattccttactaggaatcttttttttcttttcttatgagacggagtctcactctgttgcccaggctggagtgcaatggcatgatctcagttcactgcaacctccacctcctgggttcaagagattctcctgcctcagtctcctgagtagctgggactacaggtgcacggcaccacacccagctaattttgtatttctttttagtagagatggggtttcaccatgttagccaggctggtcttgagcttctgacctcaagtgatccgcccacctcggcttcccaaagtgctgggattacaggcatgagccactgtgcctggcccttattaggaatctgttaacactagataacaagcctcattaaaccaagagataactggagaaaatacagcaggtaactgtggtgaacatgtcctttatttaattgaagagactaaaatgaaggcagagacaaaggcgtgaggataatatgtaaatgttctatgtccaaaagtagaaataacagaactaaagtaataaaaatatagaagaacagagggagacagaggagagcagaataagctacttgattgccatatatgtaataggtagaaactggagggtatctatattagtccattgtcacactgttaataaagacatacttgggactgggtaatttataaagggaagaggtttaattgactcgcagttcagcatggctggggaggccttagaacacttacaataatgacagaaggggatgcaaacatgttcttcttcacatggcggtagtaagaagtgcccagcaaaaatggggaaaagcc

SEQ ID NO: 94767 - DNA, 13493 bp, Homo sapiens
cacaagcctaatacagctaaacaaactttacctaatggccaatgtgaggtgacctaagaaaaattattatcagcaagagggggtattattaagaaggcattgaacagtttgaggtgaacaatgtagatattcttaacattggaataacatcaaatatctttaggctctgcccaaataggtcatcaaccttcagactttagctgagagcaaaacacaacaggagccaatagtctaataattatttctcttccctgaccccaatcaccaagaaggcaatctgctctctgaggatgcaagcctgaggaccagaatcaggagattagattctcttcttggcatagctctcactggtccatctcaacacctaacctcagctataaaatgagggcaccagcactaatgtactatagttctatatttaatgctgttattttggagtgtaccaagagctatctatggaggctgtagaggtgctaaactccgtactgctctgaccaaccctaacattctcttcaattctcagttaacaatttaagtaggatgttgtaaaatatggcatatacacgaagaaggcagaaaagaagaatgctgatccagcaactattagacataacatataagtgagaaaataaaaatatttagcttggaaagagaaactgatagtcctttaagtacctagagttagatgtcacaatgatgacttattctgtcttactttataagacatcgttgactaaggagtaaagattgcagggaagcatttgacacaatagagggaaacatgtaataactaactagggctacaaatataaagacttctgaaataaactgcctcccttgtcaccggatgtctcaaagcaaaatgagcaattctgtgggccattttggagcaggagtcaacatacgttttctgtaaagagatgtgtgtgccacatataattccttaaagatgtaaaaaaaatccttaagctcacaggtcatacaaaaacaggtagtttgttgacccttgttctagagaagcactgtctaacagaaatgtaatatgactcacatatgtaattaaaatttttccagtatctgtattttaaaaggtaaaaagaaacaggtgaagttaattttaatatcttatttaatccaatatctccataaagttattttaacatgcaaacaaaattattaatgagattctctacatttaaaacaaaactaagcctttaaaatgcagtgtatatttacacgtaaaaccatatctcaagtcaaactagtcacatttcaagtgctcattagctacatactgcagcaagtagttctagataaactgtgcatttcttgagaaacagaagagatgacctcccaatcaatattcaattctaagaacgcaaatcgatgaggaaaaaattggactagccagcctataaacaaaactgggggatctgtcaagctacctgaaaaaataaagctggatcctttctcatgccttactccaatataaattccagaccaaaacaagatgtcaatgtcaaaagtaaagtaatacaagcaacaacaacaaaaagaaaacaacatgtgtagtattttcttattgtcttgcagcgggaaaaatcttttaaggcatgtcataaatattcagaaaacacaaagaagacattaataaatttacctatataaaaatttatgttagtactacaaaaaaacattaaagagggtcaaaaagtaaatgacaaatgggggaaggttaagaaggttaacaaggatatccaggacttaaactcggctctgcaccaagcagaactaatagacgtctacagaactctccaccccaaatcaacagaacatacgttcttgtcagcgccacatcacactcattccaaaattgacaacatagttggaagtaaagcactcctcagcaaatgtgaaagaacagaaatcacaataaactgtctctcagaccacagtgcaatcaaattagaactcaggattaagaaactcactcaaaaccacacaactacatgaaaactgaacaacctgctcctgaatgactattgggtaaataacgaaatgaaggcagaaataaagacgttctttgaaaccaatgagaacaaagacacaatgtaccagaatctctgggacacatttaaagcagtctgtagagggaaatttgtagcactaaatgcccccaagagaaagcaggaaagatctaaaatcaacaccctaacatcacaattaaaagaactagagaagcaagagcaaacaaattcaaaagctagcagaaggcaagaaataactaagatcagagcagaactaaaggagatagagacacaaaaaacccttcaaaaaaatcaatgaatccaggagctggttttctgaaaagatcaacaaaattgatagactgctagcaagactaataaagaagaaaagagagaagaatcaaatagacgcaataaaaaatgataaaggggatatcaccaccgatcccacagaaatacaaactaccatcaaagaatactataaacacctctacacaaataaactagaaaatgtagaagaaatgggtaaattcctggacacatacaccctcccaagactaaaccaggaagaagctgaatctctgaatacaccaataacaggctctgaaattgaggcaataattaatagcctaccaaaaaaagtccaggaccagatggattcacagccaaattctaccagaggtacaaagaagagctggtaccattccttctaaaacgattccaatcaatagaaaaagagggaatcctccctaactcattttatgaggacagcatcatcctgataccaaagcctggcagagacacaacaaaaaaagagaattttagaccaatatccctgacgaatatggatgcgaaaatcctcaataaaatactggcaaactgaatccagcagcacatgaaaaagcttatccaccatgatcaagttggcttcatccctgggatgcaaagctggttcaacattgcaaatcaataaacataatccatcacataaacagaaccaacaacaacaaaaaaaccacgattatctcaatagatgcaggaaaggcctttgacaaaattcagcagcccttcatgctaaaaactctcaataaattaggtattgatggaacatatctcaaaataataagagctatttacgacaaacccacagccaatatcatactgaatgggaaaaactggaagcattccctttgaaaactggcacaagacaagaatgccctctctcaccactcctattcaacatagtgttagaagttctggccagggcaatcaggcaagagaaagaaataaagggtattcaattaggaaaagaggaagtcaaattgtccctgtttgcagatgacatcattgtatatttagaaaaccccatcatctcagcccaaaatctccttaagctgataagcaacttcagcaaagtctcaggatacaaaatcaatatgcaaaaatcacaagcgttcctatataccaatatcagacaaacagccaaatcatgagtgaactcccattcacaactgcttcaaagagaataaaatacctaggaatccaacttacaagggatgtgaaggacctcttcaaggagaactacaaaccactgctcaatgaaataaaagaggatacaaacaaatggaagaacattccatactcatggataggaagaatcaatattgtgaaaatggccatactgcccaaggtaatttatagattcagtgccatccccatcaagctaccaatgactttcttcacagaattggaaaaaactactttaaagttcatatggaaacaaaaaagagcccgcattgccaagacaattctaggcaacaagaacaaagctggaggcatcatgctacctgacttcaaactatactacaaggctacagtaaccaaaacagcatggtactgggaccaaaacagatatatagaccaatggaatagaacagaggcctcagaaacaacaccacacatctacaaccatctgatctttgacaaacctgacaaaaacaaaaaatggggaaaggattccctatttaataaatggtgctgggaaaactggctagccatatgtagaaagctgaaactggatcccttccttacaacttatacaaaaattaattcaagatggattaaagacttaaatgttagacctaaaaccataaaaaccctaggagaaaacctaggaaataccattcaggacataggcatgggcaaggacgtcatgactaaaacaccaaaagcaatggcaacaaaagccaaaatagacaaatcagatctaattaaactaaagagcttctgcacagcaaaagaaactaccatcagagtgagcaggtaacctacagaataggagaaaatttttgcaatctgtccatctgacaaagggctcatatccagaatctacaaagaacttaaacaaatttacaagagaaaaacaaccccaataaaaagtgggcaaaggatatgaatacgcacttctcaaaagaagacatttatgcagccaacagacacatgaaaaaatgctcatcatcgctggtcatcagagaaatgcaaatcaaaaccacaatgagataccatctcacgccagttagaatggcaatcattaaaatgtcaggaaacaacagatgctggagaggatgtggagaaataggaatgcttttatactgttagtgggagtgtaaactagttcaaccattgtggaagacagtgtggcaattcctcaaggatctagaactagaaataccatttgacccagtgatcccattactagataaatgcccaaaggattataaatcatgctactataaagacacatgcatacgtatgtttattgtggcactattcacaatagcaaagacttggagccaaccaaaatgtccatcaatgatagactggattaagaaaatgtggcacatatacaccatggaatactatgtagccataaaaaaggatgagttcatgtcctttgtagggacatggatgcagctggaaaccatcattctgagcaaactatcacgaggatagaaaaccaaacactgcatgttctcactcataggtgggaattgaacaatgagaacacttggacacagggcagggaacatcacatccaggggcctgtcatggggtggggggcagggggagggatagcattaggagaaatacctattgtaaatgatgagttaatgggtgcagcaaaccaacatggcacatgtatacctatgtaacaaaccttcacattatgcacatgtaccctagaacttaaagtataataataaaaaaaaaacttcaaattaagacctcaaactatgaaactactaaaagaaatactaagacaaacaaacaaacaaacaaaaacactggggaaaatctccaagacattggtctgggcacaaagatttcttgagtaataccccacaagcaaaggcaaccaaagcaaaatggacaaatgggatcacatcaagttaaaaagcttctgcacagcaaaggaaacagtcaacaaagtgaagagacaacccacagaatgggagaaaatagttacaaactgtcaatctaacaagggattaataacaatatataaagagctcaaacaactcaataggaaaaaaaactaataatctgatttaaaaacgggcaaaagagagtttctaaggatcatgtctgagagtgagtatttcttctttttttttctaaggcggagtcttgctctgtcacccaggctggagtgcagtggcatgatctcggctcactgtaaactctgccccccagattcaagtgattctcctgcctcagcctcctgagtagctgggattacaggcatgggctaccacgcccagctaatttttgtatttttagtagagatggggtttcaccatgttggccaggctggtctcgaactcctgacctcgtgatctgcccgcctcagcctctcaaagtgctgggattataagcgtgagccaccgcgcccggccaagagtgagtatttctgatccagagacaatggtcccgatgagatggagcctgaaggcatcattgagagaaactgaaatgagattgttgacagttttgatgatatgaacctcttggaatccctcctccatggcatctatgcctatggttttgagaagtcctctgccatccagcagcgagccattcttcttgtatcaaggattatgatgtgatcactcaagccctatctgggactgggaaaatggccacttttgccatatcaattctgcagtagattgaattagatctaaaggctacccacaccttggtcccagcatccacttgataattggctcaaaagatagaaaaggtggtcatgacactaggagactacatgggtgcctcctgtcatggctgtattgggggcaccaacgtgcatgctgaggtgcagaaactacagatggaagttccccatatcatcgtgggtacccctggccatatatctgatatgcttaaccagagatacctgtctcccaaatacatcaagatgtttgtactggacgaagctgatgaaatgttaagccatggattcaaggactcaatctatgacatattccaaaagctcaacagcaacacccaggtggttttgctatcagccacaaggccttctgatgtgcttgaggtgaccaagaagttcataagggaccccatttggattcctgtcaagaaggaagagttgaccctggagggggtccaccaattctacatcaatgtggaacatgaggagtggaaactgagcacactgtgtggcttgtatgaaaccctgattgtcaccctaggcagtcatcttcatcaatactggaaagaaggtggattggctcggctgggtgcagtggctcacgcctgtaatcccagcactttgggaggccaaggtgggcggatcacaaggtcaggagagccagaccatcctggcttacatggtgaaaccccatctctactaaaaatacaaaaagaaattagccgggcatggtggcaagtgcctgtagtcccagctactgggaggctgaggcaggagaatggcatgaacccgggaggaggagcttgcagtgagccgagatcgcacaactgcactccagcctgggtgacagagcaagactctgtctcaaaaaaaaaaagaagaaagtggattggctcactgagaagatgcatgcttgggacttcactgtctctgccatgcatggagatatggaacaaaagaatgaaatgtgatcatgagggagttttgttctggctctcacagagtattgattaccactgacccgcagccagaggcattcatgtgcagcaggtttcttcagttatcaactgtgaccttcccacctgtatccacagaattggtcgaggtggatggtttggccataagggtgtggctattaacatggtaacagaagaagacaagaggactctttaagaaactgagaccttatacaacacctcsattgaggtgatggccctcaatgttgctgacctcatctgaggggctatcctgctacctagccccagccaggattcattcttgggaaactgaggagcagcaggaggcggaaggaaagagagccaagggatggacatcttgtaatttttttccttgaataaacgtcactttttgaggcaaaaaaaaaaaaaaaagggagggtgaaagatctgaataggcatttctcaaaagacaacatacaaatggcaaacagatatatgaaaaggtgctcaatattactgattgtcagcgaaaggcaaatcaaaactacaatgtgatatcatctcaccacagttaaaatggtttttatccaaaagacaggctataagaaatgctggtgaggatgtggagaaaagggaacacttgtacgctgttggtgagaatataaattagtatagccactatggagaacagcatggaggttcctcaaaaaactaaaaatagagctaccatatgatccatcaatcatactgctaggtatatataaccaaaagaaaggaaatcagtatatcaaagagatacctgtactcccatgtttgttgcagcactattcacaatagccaggatttggaaacaacctttatccattcatcaacagacgaatggataaagaatatgtggtatgtgaccaggcacggtggctcacgcctgtaattccagcactctgggaggccgaggcaggtggatcacctgaggttgggagttcgagaccagcctgaccaacatgaagaaaccccatctctactaaaaatgcaaaattagccaggcatgatggcacaggcctgtaatcccagctactcgggaggctgaggcaggagaatctcttgaatcccagaggtggaggttgaagtgagccaagattgtgccattgcactccagcttagacaacaagagtgaaactccatctcacacacacacataaaaaaaaaaaaaaaaaagaatatgtggtacatatacacagtggagtagtattcagccacgaaaaaaaagagtcctgtcatctgcaacaacatggatggaactggaggacattatgataagaaaaataagccaggcacagaaagacaaacttcccattgtctcatgcatttgtgagaactaaaaatccaaacaattgaactcatgatgacagaaaatagaatgatgtaagttaccagaggctggaaagaaggtgggggtgggtgggtaaaagtgggcatggttaataggtacaaaaacataattagatggaatgaataagatcttgtctttgatagtacaacagggtgactacaatcaacaataatctactgtatatttttaaataactaaagtataattggaatgtttataacacaaagaaatgataaatgcttgaggtgatgaataccccatttaccctgatgtgattattacatactgtatgcctatatcaaaatatctcagctgggcatggtggctcacacctgtaatcccascactttgggaggccaaggcaggaggatcatgaggtcaggagttcaagaccagcctggccaatatggtgaaaacctgtctctactaaaattacaaaaattagccgggtatggtggcacaagcctgtagtcccagctactcaggaggctgaggcaggagaattgcttgaacccgggaggtggaggttgcagaagccgagatcacaccattgcactccagcctgggcaacagagtgagactctgtctcaaaaaaaaaaaaaaaaatcaagctaccaatgactttcttcacagaattggaaaaaactactttaaagttcatatggaaccaaaaaagagcccacatcgccaagtcaatccaaagccaaaagaacaaagctggaggcatcacactacctgacttcaaactatactacaaggctacagtaaccaaaacagcatggtactgggaccaaaacagagatatagatcaatggaacagaacagaggcctcagaaataatgccgcatatctacaactatctgatcttacaaacctgacaaaaacaagcaagggggaaaggattccctatttaataaatggtgctgggaaaactggctagccatatgtagaaagctgaaactggatcccttccttacaccttatacaaaaattaattcaagatggattaaagacttaaacatcagacctaaaaccataaaaaccctagaagaaaacctaggcattaccattcaggacataggcatgggcaaggacttcatgtctaaaacagcaaaagcaatggcaacaaaagccaaaattgacaaatgggatctaattaaactaaagagcttctgcacagcaaaagaaactaccatcagagtgaacaggcaacctacaaaatgggagaaaatttttgcaacctactcatctgacaaagggctaatatccagaatctacaatgaactcaaacaaatttacaagaaaaaaacaaacaaccccatcaaaaagtgggcgaaggacatgaacagacacttctcaaaagaagacatttatgcagccaaaaaacacatgaaaaaatgctcaccatcactggccatcagagaaatgcaaatcaaaaccacaatgagataccatctcacaccagttagaatggcaatcattaaaaagtcaggaaacaacaggtgctggagaggatgtggagaaataggaacacttttacactgttggtgggactgtaaactagttcaaccattgtggaagtcagtgtggcgattcctcagggatctagaactagaaataccatttgacccagccatcccattactgggtatatacccaaaggactataaatcatgctgctataaagacacatgcacacgtatgtttattgcggcactattcacaatagcaaagacttggaaccaacccaaatgtccgacaatgatagactggattaagaaaatgtggcacatatacaccatggaatactatgcagccataaaaaaggatgagttcatgtcctttgtagggacatggatgaaattggaaatcatcattctcagcaaactatcacaaggacaaaaaaccaaacactgcatgttctcactcataggtgggaattgaacaatgagaacacatggacacaggaaggggaacatcacactctggggactgttgtggggtggggggatgggggagggatagcattaggagatatacctattgctaaatgatgagttaatgggtgcagcacaccagcatggcacatgtatacatatgtaactaacctgcacattgtgcacatgtaccctaaaacttaaagtataataataataaaaaataataataatagttattgaaataaaaataataactggaattattcatatggttataataaataattgataagaaaacataccaaaaaaaaaaaggccgggcatggtggctcacgcctgtaatcccagcactttgggaggccaaggcaggcggatcacgaggtcaggagagcgagaccatcctggctaacacggtgaaaccctgtctctactaaaaatacaaaaaatgagccgggcgtggcggcaggagcctgtagtcccagctactcgggaggctgaggcaggagaatggcgtgaatccaggaggcggagcttgcagtgagccgagatcacgccactgcactccagcctgggcgacagagtgagactccgtctcaaaaaaaaaaacaaataaaaacaaaaaaaaaaaaaacaaagaacaagcaacagccctctatattaacttatttttgtgggttatgaagagagtgagaattggagaagtacaactgacaatgaaacctaacaaaccggacataaaaggaagccacttgccttcctcaggttaagctataatttgattcatttatgaggcacaggaaggacaagtattttcacttcatctttttgtgctgagtaatattacacaataatacgtatcaaaaagccatttttctgaaatgaaatgtatccttgaagcatatctacagaatgtaacacaaacaaaacctttaacccaaaacattcttctatataaatctaggaacacacccaaatgaatatcaccagtaaagttccctagattctgcagaaatgacaaactatgaacaaagcaatatattttcatgcactcataaattatcaaatgagcctccccaaaaatcagggaagcaaggtcatatggagtgtcttttgctagtttgccctctgctcccaaacaggctaagtcacttaatatacagatgtggataaagataattttgtacaatgccattctttagccactaggtttcccaggtttggggtttacaagatctataaaaccacagggctatggaatacaaataaaatctgaccctaaataatcttttcctttaccattgctgacattcctcaaaaccctagatctttcctttcaaaataatgaaaattagcaggaggctcatccacaacagacttccagggtctcactgtcaataaaatcggtgccatgaaacaatcagtgtgcttcaggggaagagtctctaagtggaaacataatacacaaaaggatgatcaacattaaaatgttttcctaattgggggaaaaaattcaacagctatttcaagagttaaaaggctgccttttattgaactgtcatgctatctctccaacaggcaagcagtggaaacattttaagagcattacctttaggaggaaaataagacttgctttcagctttgtgaggccagtctactacgagaggtccaaacctgcgaaagctggcagtgatctcatctacaaaacaaagaaagaatcttagcaaaagagaaaaaaatattgcaatcagaaaaccagaagagcacaaaacatgtctttttagtttaaaaaaatgttttgagggttgttttctatagcatctttacggaagtgaaacctactaagtgaaataccattgcttgggtgtacatttggttattcacttttaatcatgcaaagtgtgtttctaactataattcatttcctttcactgccaataaacttgacataaagaatttggaagaaaagtatctcatattaaactaaggtgacttctatgtcaaatagaaagattctaaaaataggaatgttctctgattttagtaagaaagtaaggtacagaaaatatttaaaatatggtttcacttgtaggaacctctaagattatttaagaaatagatacgattcttttggtaaggagtaggggcaataagtaggtaattctattgggtgataagaaaatgttgatggccaatgttctctttaataactacatattacgtaccctatatagaaaatatatcaaaaattatagatcaatacatttatattttccctctgacatatgactcaaagcagaggttataacctggctcctactcaggtttagggtaccactctctcagccatgatcttaaaaattgtcttgaagataatctaatcaatagatgagattaacatgaatacaagaacaatttggaggaaaataagcattcagctatgtataactttaatgtagttagtctaaaataaaaccactttttgagacttttctcctgtcaccatgaaaaaaggaaatcatgataaatttgaagtgtgtcatagctagaaaaatgctagaaaaacaagactgttagaatatcagacagtatttttatatcagacccaaagcctactggaactagagttgttttttgcttaagttaactttgtcacaattttatttcattcatcctttcaacaaatatttattgacaacttaccgtgtgctaaaataaactggctttaggcataagtgaacactcacttttggactgatagcatctcaaaactattattaagaaaaattctaattcatcttcattcttttaaagaggtggattatgctttttgttaataggtatttgtttttatttatttatttacttatgagacagggtctcactctgtcatccaggctggagttcagtggtatgatcatagctcactgtaacctcaaactcctgggc

SEQ ID NO: 94768 - DNA, 41234 bp, Homo sapiens
ttctgggaaactacttcttccattctctgtagtctggagggaactgtcaattaaggtcctttacaccattgccaagggatgaacaggagatccaagccaagccagaaattaatgtcttgagcagaatgacagatatagaaactggttggaactgagtcatttaaatcatagcatccataagaaattgtttgttgggttttggggtggtctcacccacgtttagacccaaatgaggggataaccacagaaataaggcacagggagatcagaatatcactctttttactgacaaagctgcttgacatatgcatttactgagagaaaagtggggttatgaattctggacccccaagttaaacttttcctcctgatcccaggcagtgctagaaaatcatcatagccctcttttctctttctttttttttcttttttttttttttttgagacagagtttcactcttgttgcccaggctggagtgcaatggcacagtctcagtttacggcaacctccgcctcccgagttcaaacgattctcctgcctcagcctcccgagcagctgggattacaggtgcccgccaccacgcccagctatttttttgtatttttagtagagacaggggttcaccattttggccaggctggtctcaaactcctgaccttaggtgaaccacccacctcagcctcccaaagtgctgggattataggtgtgagccaccgtgtccggcctcttcttttttttagatggagtctcgctctgtcacccaggctggagtgcaagtggcacaatctcggctcattgtaacctccacctccttggttcaagggattctcgtgcctcagcctactgagtagctgggattacaggtgcccgccaccacgcccagctaatttttgtatttttagtagagatggggtttcatcatgttggctaggctggtcttgaactcctgacctcaaatgatccgcccacctcagtctcccaaagtgctgggattacaagcgtgagccactgtgcctgaccaatcatagtcctctctgggagggctagactgtgggaaatgtattaatagaacatggaggaagagggcaaaaaatcgtgcttcttaagggcaggcacatttgaaagagaaaaaaggaggaagagctgagttgtgctcagttcattcttcccatactcactaatgagatacaggttgagtatccctaatccaaagtgcttgggaccagcagtatttcagattttggatcattttcagattttggaatatttgcatatacttaatgagatatcttggggatgggaaccaagtctaaatataaattcatttatgttttatatagaccttatacacataacctgaaggtaattttatacaatatttttaataattctgtgcacaaaaccaagtttgtgtatactgaatcatgggaaaacaaaagtgtcacttagacacccctctggaaaatctgtggttgttcggcgtcaccatcattcatgactctgaatttatatgctgtatcatttttcttacacttattcacatttatcagttaaaaaaaaagaccattaatacagtgaaaaagtaatgtgttcagggtaagtaagcagcatagtagcatcatcaaaataatacctggagatgctgaaaaaactgtgttgtatgtctgtgttttgactgcaacctgtcacgtgaggtcaggtgtggatttttgtcttttttctttttttttttttcagagacaaggttgctctgtcactcaggctgcagtgcagtgacaccatcatacctggctgtagccttgaactcctgggctcatgcaatccttccacctcaaccacagtggcacaatcatacctggctgcagccttgaattcctggactcaagcaatctttccacctcaacctcccaagtagctgggactactggagtgcaccatcatgcctggctaattttattattagtagagaccaagtccaggctggtctcaaactcctggcctcaggcaattctcccacctcagcctcccaaagcgctgggattacaggtgagagccaccacaccacctgttagtgtggaattttctttctttctttctttctttttttttgatacggagtctcgctctgtagcccaggctggagtgcagtggcgcaatcttgtctcactgcaacctctgcctcccaggtcctggttcaagcaattctcctgcctcagcctcccaagtagctgggattacaggcatgcgccaccatgcccagctaagttttctatttttagtagagatggggttttgccatgttggccaggctcatctcgaactcctgacttcaggtgatccgcccgccttggcctcccaaagtgttataggcgtgagccaccacacctggcctacttattccttatatctagattacccaacgcagccctggctcctatcacttccaaggcctgtggttgtacaactgaatcctctcagcgaattttgtttttgcttgatgtagctagagtctgtttctattgcttgtatccaaagaatatgtactagtttcctatggctgctagtttccaattaccacaaacttggtggtctatatgaacggaaatttattaccttaaagttttggaggtcaggagttcaaaataggtcgtatggggctaaaatcaaaatatcttcagggtcatgttcctttggagactctaggggagaacccatttccttgccttttctgacttcagaggctaccatcattttgtaactgaaaagcaggttagttgctcacaacattcagagtccagttaaaaagagcaaggtctgggacgaaaaaatgaatttattttgaagctagcttgtggaaatggcacgaagcatcctgccttaaatgtgccacttcccttttggagcagaaagcgggccttttataaggtggtgggaggaagtaagcagggggagggcgtctccgttagctctggtggcttaactgctgggcagttgacttagtgccttcctgggcagaagtaagttataaaagtggccaagtggacacgctttcaacattccctcttggtaggtgtgagttcgaagcaatcccccagagggtagaagttccaaggtgaaagttccctagcgggcatgctttgctctgttaactttccaagaattagatgaacttgccttgaagggagtgtctggtgaagaagttggtaaaatttcttctttagaaattcaaagaaattcaaagattaaatcagaagtgggagcaggaagaaaggagaagagaaaataaattttaaaaggaactggccggacacggtggctcactcctgtaatcccagcactttgggaggcccgagacaggcggatcaccggaggtcaggaatttgagaccagcctggccaacatggtgaaaccccatctctactgaaaatacaaaagttagccgggggtggtaggggcgcctgtaatcccagctattcacgaggctgaggcaggagaatctcttgaacccaggaggcggaggttgcagtgagcagagattgcaccactgcactccagcctgggtgacagagtgcggctccttctcaaaaaagaaaaaaaaaagacttaacttgtgattcattacacttcaaagtgtattgaataaatcttacactttgtgtctttatggatagtcttccttactttccctcctgggagccctaagtcttgtcacaatcactatagggattgatggtagaaagggaaggctgctcctactccccttgcctggtccctgtgcatagaaaatttcaataaactctggtcttattggactgaagtgaattttggccacagagaggcttcctgcagcttgttttcccatccctctgcccataagccctgtaatctctagggcacctgcttgtcatcctcagttgtttttgtttttgttttcagagtcttgctctgtcacccagcctggagtgtagtggtgccatctcagctcactgcaacctccacctcccgggttcaagcgatactcctgcctcagcctccctaatagctgggattacaggcatgcgccaccacactgggctaatttttttgtaattttagtagagacggggtttcgccatgttggccaggctggtctcgaactcctgacctcaggtgatctgcccccccctcaggctctcaaagtgctgggattacaggcgtgagtcactggacctggctcatcctcagtcttaattgtgagtctgctactgtgtgactttggtcactacgtatcttcaggcctcagcttccattctgaataatagacataacaatcctttcttccttcaatgtcattgggagtatccaacaagattaagcaggtacactgtaaaagtccagcgtggcgatgagaaatgaatgttgacttctgtgtggtaaggaagagaccacagctgggctgggcacagtggctcacgcctgtaatcccagcactttgggaggcccaggcgcgcggatcacgaggtcaggagatcaagaccatcctgactaacacggtgaaatcccgtgtctactaaaagtataaaaaaaattagccaggcgtggtggtgggcacctatagtcccagctacgcaggaggctgaggcaggagaatggcgtgaacccaggaggtggagcttgcagtgagccgagatcgcgccactgcactccagcctgggcaacagagcgagaccacgtctcaaaaaaaaaaaaaaaaagaagagaccacagctgaagggatagcaaattcatcatcaagatgtagaaaatgagttgttaggagcctgtggggaaacataatcgtttcattacacactcttaactaaaggtccaaagaggcccttggagctggatgaaactttcacacaccaaaaagctgtagaaattatttccctatccaagagggtcatctcttttgagaaaaactatcttttcctgactttaaaaggttaacgtttttcttaatataaaggtaaaacttgttttaaacttaagtttttaaacttattaagaatttaccatagaactttaaaaaatctattaaaatatacaaaggagaggtgctcctctaatcacactacacagcggtctacacttgtaataaacaaaatcgggattttttggggggggagtgggacggagtttcactcttgttgcccaggctggagtgtaatggctcaatcttggctcactgtaacctccgcctcctgggttcaagcagttctcctgcctcagcctcccaagtagctgggattacaggcatatgccaccactcccagctaattttgtattttcagtagagatggggtttcatcatgttggtcaggctggtctcgaacttctgacctcaggtaatccgctcgccatggtctcccaaagtgtggggattacaggcgtgagccaccgcgtccggccaaaattcggattttgttgtaactgcaattttgtatctcgctttgctaacattttcccgcatgattaaattatcttatacaacaggggtattccaggatacaaattggttgcaatttatttaaccaatctcttattgttggacatttggagtattgcctttattttatggtttttctcgggcttttgggctaagtgttgcaattaacaactttgttacacgaatctttactcatatccttgattttatccattgaattcgtggaagtggaattgctggaccaaagggtatttgaaacatattactaatttgtcttctaagagtgattttacccatttaaactcccacgcgcaatttaataggatttcaatgttgttgctggtgtcgtcaactgtcaaatgccgaagtataccttccggcctgacctcctgtcctccttcgcgttttcccgcccactccgcacacccgccacccttagtacatgctggcccgccccttccttatcccgcaccaattctgtccaatcaaaagcaaagttcctcagtatcgccgtgcagttggtaaggtgaagagtccgtcgtgctcaggggcgggcggaacgggctgacggacgcggctatgggccagtgtgagcggcgagtgggacgtgcgtggcgtgcgtgcgttgacctgggaagcactggacctgtgaggcgtgcgaactggtggcagtgagagacttcggckgacatggctcccagcgtgccagcggcagaacccgagtatcctaaaggcatcsgggccgtgctgctggggcctcccggggccggtaaagggacccaggtgagcggcaggactgggcttggcggcggagcctgctgaactccaaggtcaaggcggccggagatctagaagccctggacctgcccggagcgggccggggastaaggcctgcggggaacgctggcyggggtctcggttctggtggggcatttyggagagggtccaaattggaggtcggggcagtctgagttaggattggagtgcccgagggattcagtgttgaagtgttgggttagggaatgtgagggctgattaattccactaagggtctagagactggaaaggtttgaggggtagagtgagccctgggccgaggcatctagattacaggctgaatggaggcaattagctttatggcccaggttacctgcgagttggaggtgaattgtccagaatcagggttacattccaggcactggaggtcgggagattttgataatgatttatgacttagggggaggggaggagaagcatctccaacacgtggggcagagtgagaggtgacatgtgctgtgtgagccagttgaattgagatgggaggaaacctaaggctctccctgtttgaaagttgggggtgaatgtgtagaactggtttatagcctggagacccatgagtcgcaacctttgagtagtgtccacaataaggrttgggagtgctcatgggacctggcttggagttaggacctgaggctactgaaggctaagcagcttgggatgacgcaaatgattttagatgaaaaggaacttgaatttttttttattttgtttttattatttttgtttgtttgtatcttccttccctttggtttttatttattttttcctttttttattttgttgttgtttatagggaacttgaaattttaactttatcaatcaacaggttaaaaaacaggcccagaaaggtcaggtggctttcccaaattagtgaaatgagtttcatgagcctgagacctcaggaaccatggagttagagtctgaagttaccatctgccctagcaggcaacaggggcctcacttgggatctgggccccttctagatctgggacataatggggccatagattagggttgggatcgatgatctcatttcggatttggaagcccgcaggttggattattgatgtccccttcttgcttggggtctggcattgcacctggggccctaagcctctggctcttgcctgttgttaggcttcaaagagggaagtctgagctcccaaatgaaagggaatctgaggactgccctgtgcccgcttttctcttcctagcacttgccaagttttaaaaatcttggcaaacagaccatcttactcattcttggtaccccttgtggcacctagcacattacttggcccttgatggggttagtggaagtggatgaatgtcacagattaatgtgggtgataaagaaagaagttctggaacactccattcattcctgtgacctgggcactaagtcagaaaatacagctttcttttctctccacagactgagatgattcttctttggagcttacctgtacctgatccctttatcctttatcctcagcgttgttgacatctctttcctgttgctgccacactcatttattgggtaatctgcagcttagggaagtttaatcttagactctgcagacttttgctgtgagtgatcaagtataaacagtagctcaaatgcttcattgtttttctttttctttttcttttttttgagacagggtctcactctgttgcccaggttggagcgcagtggtgtgagctcaagcaatcctcccacctcaccctcccaggtagctgggagtacaggcacatgctaccatgcccagctaatttttaaacaattttttgtagagacagggtcttgctatgttgcccaggctggtattgaactcctggacacaggcgatcmtcctgccttgacctcccaaagtgcagggattataggcacaagccactatgccctgagatttttttcttaactcatattgaagttaataatttcagtaattatggaatggacaacctatactagtatagtactgggacaagggttttataatttagctagctatgtaacttccgagcctcagtgttcttacctgaaaaatggggataatacctaccttgctcattcagcatttcatgagcacctaacattggggatataaagcattgggcaagactgataaagttcttgccctcatcaactaaacattcacaatgatactggaaaattatgatatatgtgtgtgtgtgtgtgtgtgtgtgtgtgtgtgtgtgtgtatcaagcacccacaacctagatgacagcctgctatatagtaggtactcaataaattttgactcccttttatcttagtaacacatctcccttcccctccttcaacttggatgtttcagtgtaagacatgatttattcaggaagtttagaagaacattatactaatgagttgattgataagggtgcatgaagatgagagttggtcagagaaggctttgtagaaatagaggagatgtgattagagctgggagttgaaaggataagatttacacaagtcatttaacctctgtacactttccagagttgtaacaataggaatactggtgattgtatgtatttttgtggagtttaaaaaaaagttcaagcctgggcaacatggcgaaaccccatctctacaaaaaaatgcaaaaattagccaggcatggtggtgtgtgcctgtagtcccagctattcaggaggctgaggtgggaggatcacttgagccttggaggcagagtttgtagtgagctgggatctcaccattgcgccccagcctgggcaacagagtgagactttgtctcaaaaaaaaaagatcttaaatcagactttacaaatggtagcctacaataacatttagcctgcagasacatctcatacaccttaactttttattatgaagaattttgaatacacaaaagaagacaggatggcataatgagcccttacccagccccaaccattaactggtggccttcgctcctctagccattctcccttcacaaattattataaagcacctcccaggcatcataacatttcatttgtaaataatattagtatgtattgctaaaagataatttttaaaaacataagcataatatcctttaaaaaatcaacaatttttattcaaattttcttttgtgttaccaatgtgataattttaagtttcttttatttatttatttttttacagacaaagtcttgctcagttgcccaagctggagtgtagtagcccaatcatagctcacggcagcctcagtcctcccacctcagcttcctgaatagctgggattacaggtgcatgccaccatgcctggctaacttttctagtgttttaaagatgggggtcctgccatgttgctcaggctggtcttgaactaccgggctcctccctcagccacccaagtagctgggactacaggcatgtgccactgtgcccatcctttcttttaatttataagttccccttctctttttttcctggggttttgccgaagaaattggattatttttcttcttttttttttttttgagacagagtctcgctctgttgcccaggctggagtgcagtggtgtgatcttggctcactgcaagctctgcttcccggattcacgccattctgcctcagtctcccgagtagctgggactacaggtgcctgccaccacacccggctaattttttgtatctttagtagagacggggtttcactgtgttagccaggatggtctcgatctcctgacctcatgatccgcccaccttggcctcccaaagtgttgggattatagccgtgagccatcatgtccagccccagaaattggattatttttcctgggagtattataccactctctgggaattttcagttgtattcccctggtgtacttaacatcttcctctgccctctctatttcctgtaaattggtggtttatacttaattagtatatacttaattcaatttaggttcaattttttggcccarctacttcacaggtggtgggtgctgtgctctccctgaggaggcacatggtatttccttgtctctggtgtttatagtcatgctgttcagtgtctaggttcagtaattcgttatggatggtgaaatggtggtattctaattatattgttccctggtcatttattagctgaaatatttctataaagagaaacttcccctcatctactgtttcgttaccccgtgatatggttggtatagaaaagtcaggataaatgcttgatttattctctttgtcagctttcaaaatagtaggttgaccacagagcgttttcggttatgcaatttctcttaaaaatccagagctccagtttctcttgagaaaccagaagacctggcagtgatgcctccattcyagtgtggcagcagtcacttgcagttgtgtggcattgctgctttggatggtctgtgtgtcttcctgtcccctgcacggtcctcttcactgcccattgcttacatttgactcatttcatacagttgcattgcctgcttggctccyactggcagatgtttgcaatcttacatgtaaaatccctaacctggggttagtgcctagtgcctgctcagtaatgtttgttttcttcctgctatactttgttatacctgcgtaactcagtattttatgtgctttatgttgcatgactgaaataatgtttccttttaaaactcctcacttttaactaaagtagttaaatatttcaaaactactcgcttttgcatcaatgtaatgttttaaaacatctataatacctgggtttgttattttatttaaataactttatttccttgcctcccttttggggttggatgctccttcggtgtggtcaaaaccaaaggtatgtttcttggtttttttgccaacccctcctcatttcttccatgtgtcaaacttatgcccaattcttcgaggccaggcacgcttaggcagtcttatgggtcagatgcatcagttatgtcattgcagtgatacttgcaacatctctgagacccacactcttatttccccttttacagttggagaaactgaagtttgaatggcttgttctctaggctacatagcaagtaatttacagagcttgcatctgaatgactccaaagctcctgctctttctgctgctatctactgccccaggttagatttttctcctaccgtgtgcatgtcaggagggtgtaataattacaacatagtcacccattgctcagttaygtgacagacccccaagctaaagattttacatgtatcatctgatttaatcctataacactaggagataggtcctttttactgacagagaaactgagctcagaggctttatcttgcctcaggacacacatgtagtaagtagcaaaggtaggatttgaactcatgtctgtctgactcttgagtagtcattaatttacattgttgctgtgtaatctagatgaagaggcagaaatgaatatgaatggaaaaatacatacaagtgcagggtgccaggtgggaagcatcagatgagtgactttgaatgttgggttagttcagggatagaacaagaactacaatttgctgaagttctcctgttcatcctcctgtccacccagtgaggttggtaatgatttcctcagtaagttaagagacatctgaaatgcaaacacagrtttctgygattaaaaaaaaaacaacttaagctataagatacctagaaaaagtgaacagcttgatttattttacaatgtgaacagatttgtgtagcttacacccattatcaagaaacagaatattgccagcactttgaaatcctccttgtgctcccttccaggaggatagccactaaggctctttgggttgtttgtcttaaagccttatagtgtcatggctaagagctagggcttggtaatctggcctgttgccagttcttttactagctctgtgatcttgggcaacttagcccctgagtttcatctgtaaaatgcagttaaaaatagttcctacctcatggrtttattatgtattatacatactaagtaccgtaaaacaatgcatggaaaactgcttggcatgatgcacatgctcaaagttagctaatgttaatatgaatcctcagcggaagaaggggtagttggggaggtgtttttgttttaggagacagggtctcactctgtcactcaggctggagtgcaatggcacggtcatagttcattgaagcctcgaactcctgggctcaaatggtcctcccacctcagcctcctaagtagctggactataagtacctgccaccatgcccagctaattaaaaaaaaaaatgtagaaatggggtcttgctgtgttgcccggactggtctcaaacttttggcctcaagtgatcctcccaaagtgctgggattacagatgtgagccactgcttccagcccagttaggcttttgatgggagaaatgtactcagaagtatactacagaaaaggcttagaccaatattggagcagagagggcattcctgtggagtgaggagcttgtgttgaggtccttggagaggcatttatgccgcgtatttgggaaccatgcgtaagagcagtttgtctgcagtggtgcaggacgtaaacacagggcacttgtggaagtaagttgggagggcttggcaggttttagaagttgattgtggagggcagctgagtgccaggctaagatatttggactcttcctctattgtaccacagagatgttgaaggcttcggaatgtgtatgttttggagggtaggtagcatatccaacagtgttttaagatatgattctagctgcatgtgtaggaacattgacagcaggagtgacaaagactggaggcacaaaggtaattgtgccaggcacagtgatatgcgcccatagtcccaactactccggaagctgtggtgggaggattgcttgggcacaggagtttggggctatagtgtgctatgctgatcaggtgtctgcactaaattcagcatcaggccaggcactgtggcttgtgcctataattccagcactttgagaggctgaggtaggcagctcgcttgagctcaggagttggagaccagcctgggcaacatgacgaaaccccatctctacaaaaaatacaataattagccgggcatggtactgcatgcctgagtcccagctacctgggagactaaggcaggaagattgcttgagcccgggagtttgaggccacagtgaactatgaacatgtcactgcactccagcctgggcaatagagtgagaccctatctcaaaaaaaaaaaaaaaaaaaaaagttcaacatcaatatggtgacctcccaggagcaggagaccactaggttgcctaaggagaggtaaatcggcccaggtcagaaaaagagcaggccaaaattcccatgccgatgtgtagtgggctaacacttgtgaagccactgtgctccaccctgggcaacatagcaagacctcatttctaaaaaaacataagaagaagatgatggttacaaggtgagaagactggtgaatttgggattaaaccaaatctctaggactgatagtttccctttatttcctagttgtcaggccctatgctggatgtctttgcatacgtaatcttattaaatccccacaacagttcagcagatagacactgttttctgttctatggataaagaaaacgagaccttagaaaaggtaatgtaatttgttcaggatgacacagtgaataaacggtagagcccgtttcctaacccagatctataccactacaaaacccagtctctgccactacatcagggcttcacatactgtacccatcagaacctgaggtgctgcttgagagccactcartcataaactttaaaggtgggcctaggaaatgccctagatgattgataatacactgaaatttgagaaccactcagcccaccatgctgtctctctagtggttttagcattcccataattaccccagagtcctccaccccacagagttttcatagaggtgatgagcctgtttcttgggctcagcaacagtttttggctgacagcaacagactatgactgagtgtgggcttcagacccctgctcttcaaagtgtagtttagagcccagccactcatccaggccgggaagcttgcttaaaatgcaggtacttaggccctaccctattgaactagaatctgcatttttttttttttttcttgagacggagtttcactcttgttgcccaggctggagtgtagcggcacgatctcaatcccagctcaccacaacctctgcctcccagktttaagcgattcttctgcctctgcctccctagtaactgggattatgccaccacgcccagctaattttgtattttcagtagagacggggtttctccatgttggtcatgctggtcttgaactcccgacctcagatgatccgcctgcttcggcctcctagagtgctgggattacaggcgtgagccaccgcgcccagccggaatctgcattttaacagcattcctccagtgatttagagtctgtgaatggctgctctaaagcataagtttgaagtgtgaggggactataataaagttatttcattaggtttctgcagcctgtaaataaagactaatgcaaagaagaaagaccatggaaggaagccttttatttattgaatgcctgctgcgtgtctgatgtttttggtactttatttcatttatcctcataagaaccctgtgaagtagtcattatccccattaaactgatgaggaaactgacactctgagaagttaagtacttagcccaagatcacacggctactgagtgccttagctaggaatcaagtgtaaatctgtctgacttcaaaacccatgcgtgctctttacagcctaccacattgactcccaggcagccagcaggaaatgaaggaattcgttttctttttttctttttctttttttttttttttttgagacaagagtcttgctctgtcacccaggctggagtacagtggcgcgatctcmgctcactgcaacctccacctcacgggttcaagcagttctctgccacagcctcctgagtagctgggattacaagcacccaccaccacgcctggctaatttttgtatttttagtagagacggggtttcaccatcttggccaggctggtcttgaagtcttgaactcctgacctcgtgatccacccgccttagcctcccaaagttctgggattacaggcgtgagccaccatacccagccaggaattagttttcttccctattggtgtgtgttctttcatctagctgtagaatccaatcacctggaacagtgcataagagtcctgcagtttgggagtgataaaaatagaacaggttctgtgctaacagctcttctctgtggtgttttggtcagcctttccacttgagcaagcctgacctccaaattgtttacccaggttaatttcaacagcaatgagaaagattggcagaaagcactctctagatgtacggccacagtgccagcctggtttttcattgtcagggctcctgacattcactgrttttgcaaagtacagaattttggttttttgggtttgtttgtttgtttgagacgtagtcttgcttcttcgcccgggctggatctcggctcgccgcaacttccaccttctgggttcaagcaattctcctgcctcagcctcccaagtagctgggattacaggcacgtgccagcacgcccagctaatttttgtattcttagtagagatggggtttcaccatgttggccaggctagtctcgaactcctgacttccggtgatccacccgcctcggcctcccaaagtgctgggattacaggtgtgagccactgcgcccaacccagagtacagagtttttttttgttgctgtttttttgtgagatggagtcttgctctgtctccaggctggagtgcaatggcgcagtctcagctcactgcaacctccaactcctgggttcaagcgattcccctgcctcagcctcctgagtagctgggactacaggcatgcgccaccatgcccggctaatttttttatattttagtagagacggggtttcaccatgttggccaggatggtctcaatctcctgaccttgtgatccacccgccttggcctcccaaagtgctgggattacaggcgtgagccactgcacccggccaagtacagtttttaatgccttctcactagattccattttgctatgaagtcatttctttgctttaactgaattggtccatgaatcacaaaccagccctatctatgtaccttttattgtgtgcacctaagcatgcacctaagaaaactcccaattacataaaaattagccaggcacgtggcttgtgcctgcaatcccagctactgggaggctgaggcaggagaatcacctgagcccagggagttcgtggctgcagtgagccgtgatcgtgccactgcactccagcctgggtgatagagtgagactctgtctcaaaaaaaaagaaagaaagaaagaaaagaaaactcccagtgaactgatttgttggaatcgggatctaaacctgcttagtttataaaacaattgaacggaaaaagctaaaattgagctccttgaactgattatattccttgtaaattctgcattctttttttcccactgcaaagccagtgttgagctgtctagggtctcttcctgttctaattctgcattctcatgtataattcaccaaatataagctctttaagtacatagtctatgccttttattcatctgtttcccaggctcccgacagggttcttgggaaaggcattagtaaatgttttctttttgtatgaatgaatataggattaggacaggggttatggtaacagccagtgcccactgagcgcttactatatgccagggcctgcatatactgaattctgtataatcttctcatcaacccagtgatacagatactattaccatctccattttacttagaggaaatttgaaacctagaaaggtgaagtgacatcttaagtcaattttacataatggttagtggacctggagtctgcaaaccagcagtttaactctcaagcctgtgctcttgaccaaaacactataatgcctcctaaaactagtatgtaagtgcttattatttgccaagtgctctttgtatatatctcagctaatcctcacagctaccttctgagatggagccttttttgccttcattttaaacagataaggaaactgaaaagtgaggtggccaccatagtacagctacttagtgacagggaaggaggaaaacccagttctgcctgggggcaaactgctcctagttgcctccctgacccagtagctgtagtacatgacaattgtacattcatccctttggcaaatgtttattcagcacatgttatgtgccaggtgttgtaccaagtgcattatatacatgatctcatttaaacctcacagcaaccatgtgaagtgttggtactatttttattctcttttttttttttttttttttttgagacgaagtctcactgtcacccaggctggagctggagtgctgtggtgcaatctcagctcactgcagcctctgcctaccagattcaaataattctcctacctcagcctcctgagtagctgcaattccaggcaagcgccaccacacccagctaatttttgtatttttagtagagacggggtttccccatgttggtcaggctggtctcgaacttctgacctcgtgatccgcccacctcagcctcccaaagtgctggggttataggcgtgagccaccatgcccagcaagtcttcccatttataatggggaaactgaaacttatgtgtcactagtgtgttgagtggaaatagtgataattaatatttatgaytccttcctgtgtgctagttgtactgttttaagtgctttacatatattatttcatgtaattcttaccataaccctataatcagtatatgttagaatgtaatataaggtacttttatccccattacaggtaaggaagtaggcatttgcccatgtttacatagccagtaagtggcagggccaggttcacacctaggcagtctgactccacagcctgtaatgtaattgaatcttggtttttgtcttcctctctgtaggcacccagattggctgaaaacttctgtgtctgccatttagctactggggacatgctgagggccatggtggcttctggctcagagctaggaaaaaagctgaaggcaactatggatgctgggaaactggtaggtttggtggtaccaatgagtgttgatattcctcagaatctagatctgcactgtccaatatggtagccaccagccacaggtggctatttagattaatttaattaatgtaaaaatcagttcctcagttgcactagccatatttcaagtatttaccagccaacgctgatacagaactttccatcatcaaacaaaattctgttgaacaaccatgtgctagagggtgttttaacaaactggcagattataggaaattttttttcttttttttttgacaaagtctcgctctgtcgcccaggctggagtgcagtggcgcagtcttggctcactgcaacctccacctcctgggttcaagcgattcttgtacctcagcctcccgagtagctaggattacaggyacctgccaccatgcctggctaatttttatrtttttagtagagatggggtttcaccatgttggccaggctggtctcaaactcctgacctcaggtgatccaccctccttggcctcccaaagtgctgggattacaggygtgagccaccgcacttggccttrtaagactttttagagtgcaagttattttgtttgttctgaatttatggcactcattcatagtattcttgaagtttttctgtgctggtgtgttttgttatatacctaaattttagagccagaaatgaaactgctgtccctaggccagaactcagagatgtattcaagagaggatttaggaagtcacagaagtgttttttaacctgctttatggctctgtgtgctgtttctgtaacaaagcaattacttcgcagttgtgacaaaggtaatccttcttatctggggacgataattgcattttctctctttttttttgttctgagacccaggctggtgtgcagtggtgcaatcatggcttactacagcctcgacctcctgggctcaagtgatcctcccacttcggcctgatgagtagctagggttacaggcacacacctccatgccctgctacttttgttgttgttgttgttgttgttgttgttgttgtagagatggagtctcactgtgttgcccacactggttttgaactgagctaaacccaggagcagtcctcctgccccagcctctctaagtgctgggattacaggtgtgagctgccatgcccagccacattttctccttctttaggccagttgacctgattggacaaatacaatctattattttctggcactaatcaaagattgctagattaattataactgagttattctggaacttggcctctgagaatcaccttcagaagtcattttgtgcttggtcttctggtctttttttatcttagaatgttggttggggaaggagctggactttgctttaatcctcaagttaccttctgttaggctttgagattctgtagctgtatcaaatgatacctctgcctgcccatttctatctagttttcccttcatgtaattgaatctctgagtcaaaccagaaagctagatattttggactttgagttttgacagaagactctgtactaagaaaaaattgagatgtggcaatgagattgcttatctccaaccttcacttagttgcagagtgtgtactttgtccccaagttcacagttagcaccaagaaataaaagcattagctgccaagatgggcaggcttcactacaggctggagacttttctttctataacagcccaagagaaaaaccagtttctgaaaactgggagaagtccttattggggttttagagagactcagaagtatattggcttagggctggacatggtggctcactcctgtaatactaacactttgggaggctgagacaggcagatcacttgaggtcaccagttcgagaccagcctggccaacatggtgaaaccccgtctctattaaaaatacaaaaaattagctgggcatggtcgtgtgcgcctgtagtcccagctgtttgggaggctgaggcacttgaatcacctgaacctggaaggtggaggttgcagtgaggggagattgtgccactgtactccagcctgggcaacagaatgagactgtctcaaaaaaaaaaaaaaaaaaaaaaaagtgagggaagagtgttggcttggctcttcagttccttggttctgacccaatcttgccaattcagtgaacttctctgtttcctcatgtccaggatggcccagatgtgtaaccaagtacacacatcagtcacgttactgttagcctaatgacagctgtggaacagggaaagctgatgcctgtgttttggtcaaccccattctctcctggcactctctcaggtggtctgtcagccatttgtcctcacatttcctgtgccttgaggatcactgattgctgataagctgttatctgacagtttggactctggactctagtggcaggagggaccttcaggacctaagatacaaagctctcctggtgaagtaacaagtaatggaatctgtcttccctcacccagatttttgggatacaggagaatttcaagagacgagagtgtgtatttggcaaccacagagataaaattatgaaactggatcttccaaatggagccatttcacgtttgcttttatttttgcttctttgggtccaagaaaacttgctgtttagtaataaggttatatacacaaacttttggctgtggagttgggctaatgtcagtcacctaggtaatggatttaaacccaaggctattttgttcctaacttccaggtgagtgatgaaatggtagtggagctcattgagaagaatttggagacccccttgtgcaaaaatggttttcttctggatggcttccctcggactgtgaggcaggcagaaatggtgggtagcttagtttttatattactactgcatgaaaccaaattcttgtcctttgtctttcttaattcctttgaaggagatgggtctaaccaagctctggtagcttaggtgggccacacattcttttacagctcgatgacctcatggagaagaggaaagagaagcttgattctgtgattgaattcagcatcccagactctctgctgatccgaagaatcacaggaaggtatttgtcccttgaaggtcccttttcatgctwctcagagctttctcaaactctgagaattgctcttgcctaatcccggccatgaagcttagtgccatttcaacatggattgattttatttggtgacatccgctgaagtggtgagatgggatcgggatatggaaagaagagcaagggatttgaagtcagacagcatctcattcttgtcactttttttttttagatgggagtctaactctgtcgcccaggctggagtgcagtggcgcagtctcggctcactgcaacctccacttcctgggttcaagcagttctcctacctcaacctcccaagtagctgggattataggtgtctgccaccagggctggctaatttttttgtatttttagtagagatggagtttcaccatgttggcccggctggttttgaactgacctcaagtgatccgcctgcctcggcctcccaaagtgctaggattacacgcttgagcyactgtgcctggctcttattgcttttttttttttgagacagagtcttactctgtcacccaggctggagtgcagtggcgcgatcttggctcactgcaacctctgcctccccggttcaagtaattctcctgtctcagcctcccgagtaactcggactacaggcatgtaccaccacgcccagctaatttttgtagttttagtagagacaggtcttcaccatgttggccatgctggtctcaaacttctgacctcaagcaatccacctgccttggcctcccaaagtgctgggattacaggcttgagccactgtgcctggcctcttgtcactttttaactgtgaccctaggcacatttcttaacctctctgaggctgtttccttatatgtagaagggggttgataacacctgctttgagaagctatttcacgtgttaggtaacataaaatgcatagttcaaagccttgcctatattaggtgcttaagaaatgttaatgtctttacatgtgtatctcctccattttagtgctccttaaatctgatttcagctggagttgccatactttgctgtagactttttattgtaaaaataatataaccatctgtacaaagtttagaaaatggaggaagaatttgctcatagtacagccactttgtgtgtgtgtgtgtgtgtgtgtgtgtgtgtgtgtgtgtgttttaacatgtttgtttctctgtaatagcattgaacacagaaatgcctctgcttctggacacgtttgttctgacagaccaacactgctttagcctacagttgtctctaccctgtttcactaatcactgccatctgctttgtgccttccagaagtatgacagaagctttcaactgcaaatggaccctccattcccttctttattgtgggctgtagcttttttatgtctttgtcattttaatggtgtctcaggaaagtggtcagccaaccatcttgaaccagacatccatgaccattacttttaattgctgtgtaatatttcacagtaggttaaccattgtttacttatttccttattgttgtacatttatgtttcttccagttagccactgttaaaatgatactatggccatcataatgcatgtaaatttttggattagggaaaaaatgttttcttatttcagacattattactttgatttcctaatgaggttgaacatcttttccatgtgtttgtagtccataccttcaagaagagacaaacatgtgaatagacagcacagggttagcactattatcctggaaagcgatatgaaatacagtggactctaccttatattcattttcttttcaaatgtccaggttacatgtctccrgctattccataggctcctttaatgcaggaacttctgtttctttgtatccccactgggcacagagtagacaaagttgatgtaggtcgagaagcagtagggttaacagtaaagacatcactaggcctggggtctcttaggcactaagcacgtattagcagaatcaggtgatactggagacctttgattctatgggcccagcttcctgagtacctgcttcctgcatagcacagtactagaccctgggagcagaggaccacgagaggctctaggataaccatatagtgatgcccatctctgacctcagagagtcatatatgaaacttgggctgttcagtgtagtaggaagtccaagaagaaagcctggggacagggaagaaaggctgcctaggatagagataacattaaactcttcctcgatgaagagtatttcagagagcctttcccagaagggaggagaagccggaatgattatgggttggactttcgctgaggctagtagcagacgtgtctgcccagtggtctggggggcaggaaggtagaaggaatgctgttgagaagagctttactggggagatctgccaaaccaaagagggtagacttgacggagttcaggactcatgagatagtcttgagccactgggtattgtggcaaaaacagtattctaagaacattagcttggtcctggtgtacaaggtaaattacggcaaggagaaacagataaggataccatctaggagcctgtttatgatccacatgatgtggtggagatttctaactgaggttgggtgggagagaacagagagattctgaagaacaaacagcaggattgctgtaaagggtgaaagagagaagattcattccctccatttggaagtaggtggttagtgtgacttcctcacagagagaaggacccccktcctcacagagcatgtcactgctgaaggtgtttttccaagtttacccaacagatgagtggcagggttagccctggaagcctgctttctgcctcgtagtccaaaatgttgatggttagaagaaaatgaggcaggaaccagtcagtttaatatggatctttttcttttctgtttttttttgttgttgtcattgttgttgtttttgagacagagtctcactctgttgcccaggttggtcacagatgtcggctgtttgaagatgctggggaatgcaccccggacctcacacaggatctttttcaagtctgagatgatatggacccattgtaacaatcttctgaattagctctgacctcacttctagtaattttgagtcattgttctgtttcttgaatatgaatagttggtggttgtggtttttgtttttaacttattcaatattggctctctcaaatcctaattatcctaccagttggctctccggtattatcttaatacctggtaccatcccaattttgtggatgagaaaacaagtgtttaaagtgtcgcactgaatgttgggcgcagtggttcatgcctgtgatcccagcatttggtagggacctaaacaggaggattacttgaggccaggagtttcagaccagcttgagcaacatagcaagacctcgtctctactataaagcaaaaaaaaagttagccaggtgtggcagtgtgcacctgcggtggtggtcccagctacttgggagtctgaggtgggaggcctgcttgagctagggaggtcgaggctgcactgagccatgattaggccactggactccagcctgggtgacaaagcaaaaccctatctcaaaaaaataaaaataaagtatcacactcacrgtagcagtgattgtagattcccagtcctgatgatacctccaagccacgctcagtggctcatggagctattttggttggtacttgagagcaatcccattttgagaacttggagagtggggtttctttcatttaccttctgtggaatgagccttgtattgttttaaaaagtggtatttgtgaatggcaaaagagcagtgtgtgggagtcatatttgttgcagcctggctgctatgtgccctgtgctctctagaaggtaaaaaaatatcctggtccgtatctcatgcccctagcccctcccaaagttgctgcagctgagcccagcagcctgctctctcctttccctgggtctcccagtggatgccatttctgaatgaatgcatcagaggaatccttccaggcactcaaataatggaaggtgcaacctcacagtacatgactgcagtcacaggaacctttactcctctgtccagttggccttccatatccatggttccctcatctacggattcaagcatttgtggattaaaaatattcagaacaaaaccaccaataaatataacccaggaaagctgaagaaaakaaaaaataatacaaattttaaaattcagtatatcaattctttacatggcatttacattgtattaggtatacataatctagaggtgatttaaagtatgcaagacaaccagcctgggcaacatagtgagacctcatctctacaaaaaattaaaaaactagaccgggcgcggtggctcacacctgtaatcctaacactttgggaggccgaggtgggtggatcacgaggtcaggagttcgagaccagcctggccaacatggtgaaaccccgtctctactaaaaatacaaaaaattagccgggcgtggtggcaggcrtctgtaatcccagctactcaggaggctgaggcaggagaattgcttgaacctgggaggcagaggttgcagtgagccgagaccatgacactgcactccagcctrggcaacagaatgagactctgtctcaaaaaataataataaaataaaataaattaattaaataaaataaaagaattagccaggcatggtggcgcatgcttgtagtcagctactccagagactgaggcgggagggtcacttgagcccagtagtttgtggttacagtgaactatggtcattgccattgcactccagcctggacaacagagcaagaccatgtctcaaaaaataaaataaatagaccaggcgcagtggctcacacctgtaatcccagcacttcggaaggctgaggcaggtggatcacgaggtcaggagatcgagaccatcctggctaacacggtgaaaccccgtttctactaaatatacaaaaaattagccaggcttggtggtgggcgcctgtagtcccagctacttgggaggctgaggcaggagaatggcgtgaacccaggaggcggagcttgcagtgagcagagaccgcgccactgtattccaacctgggtgacagagggagactctgtctcaaaaataaaataaaaataaaagtacacaggaggatatgcataggttatatggaaatgctgtaccattttatatcagggacttgagcatctatggattttggtatccacagagggggctcctggaaccaatccccccatggataccaagggatgactctatagcttattttctctactgtcacctccctcctgcccataacccagtgccactttatgccaaatggaccatcttgtccccccaaaatatgctgtgattaacaaaaaagaaagtagcacattttacagaggtgctacttcaatagtctaaatagaattgaatagaatttttatttattttatttttttgagacagtcttgctctgtcactcaggctggagtgcagtggtatgatctcggttcactgcaacctccacccccaggttcaagcgatcctcctgcctcagcctcccaagtagctgggattacaggtgcctgccacccagctaaatttttcatatttttagtagaaacggggtttcgccacgttggtcaggctggtctcgaactcctgacctcaggtgatctgcccccctcagcctcccaaagtgttgggatcacaggcataagctgctgggcccggcccaaatattgctatgcctgccaaatggtgaaaaatattagggagctctagtctaatagaccttcatgagaaaagcaaccattagttaaataagcaaacaaacacttggttggcagagaattgagaaaccacagaagtgaagcaaggcctggctgctgagcagagcttggcctgcctcctttccttaggtttctaggctcctgtggtgtggccattcccagtcaggaacatgggcttgttgtctgtagggactcagcacagatgcagctgcccactatacattcagtgccaaataaatgcctgttcttgagctctatattccatgacttgtttaataagtcatttttcccgattacttgaatattgctccataagggttaggctatcttttatctgtgtgattgaaaagatgtgttccattatctggcagtgtttgcatccatgggaattatttttcctgttagtaccttcctggttttgtaaccaaactaggttagaaaatagagttcatttctttgtcctctgtcccccatagcactttgtacaaatctctgttaaaggattatcacgtttgttatttatttccacatttgtctctcccactaagcactacttgtgagcagggatcattactcattgctttgtagcttctgaattcagcttaaggcttgaatggaatacttattaatgtttgttaagtaaatgggtgaacagaatggatggctgtgtgagaccagcaccagagttccttctctcaagtcctgaattaggtagttatgccagcagtttgctcttcagccagatactcataataatgtttggtcaaaatagaaaatatactctgccgctggcataagctctcctggaagcccagttatttagctggattttctgctgggtgctgggtccttgcatccagcgtccctatctctgcttgtcattctggagccccctagagtggagtgcaggcgcgtactgtcagttaacctaactcatattcatttgctgtctttcaggctgattcaccccaagagtggccgttcctaccacgaggagttcaaccctccaaaagagcccatgaaagatgacgtatgtaaactcaggacaaaaaatttccttttctttccttcccctttcttcactgtttttctttttcctttattctttccatcttccttttatttctaccaatattactaacttagtcatgaaaaataacactatcaagtaaatcacatggcctgtgtcagatctattcagtgtctcctcaggtggtttattgcttggcctcaaggttgcttccagtggtgctagctttttgcagtgcccagattgtacctgtcttctgtcragagcagccccttttctggcatcatggccacctaagtgatcagctaatcaggagaagctttcttaaaagcctacaattggagagtgggaagagtgtggcactgaagagaagtttgatgaccagtcctccagaaaaatattctttttatagttattgctgctgtactgtgtcctggggtttcatacatggtcactgcaccatttgccataaagagtctatatggtttgttttaaagcatgcaggcaacagtaagaatttcctgggtttacctttgtcctatgaaacaagttcatcaggtcattcaggttctataaatacaggttccagagccgttatggcaacttagtcacattttgcaaagttgctaattctaccattgaaagttcttattttacttgccacttttagaatgttgatgggtgacactctagtaaatacactaaatatttaagcaactaagattacaattgctaatgtatctttgattttgatgtattctggtcttaggggcctttttgacttccttacttttgaccctagaagtgtttatcttggaagctgaatcgcctgagcacaaagatgagaaagtcattgcctatcttcccctcatgagcccctttcctcacagttggtgtttctgacaaactctctgacttctgttcaccagctgctctgctcctgggagtagcaaagttcttcactggagagggtctggattgcctgtctttgtctctgatgggctttgggaacagacagcatcctgggcagaatggtcccatctcaaatctgcatctggcatggaataagaaaaccttgctaacagtcccagcctttcattgctgtcttcctgttctcagatcaccggggaacccttgatccgtcgatcagatgataatgaaaaggccttgaaaatccgcctgcaagcctaccacactcaaaccaccccactcatagagtactacaggaaacgggggatccactccgccatcgatgcatcccagacccccgatgtcgtgttcgcaagcatcctagyagccttctccaaagccacatgtaaagacttggttatgtttatctaatgttgggtccaagaaggaatttctttccatccctgtgaggcaatgggtgggaatgataggacaggcaaagagaagcttcctcaggctagcaaaaatatcatttgatgtattgattaaaaaagcacttgcttgatgtatctttggcgtgtgtgctactctcatctgtgtgtatgtgtgttgtgtgtgtgtgtgtgtgcatgcacatatgtgttcactctgctactttgtaagttttaggctaggttgctttaccagctgtttacttcttttttgttgttgttttgagacaaggtttcgctctgccaccctggctggagtgcagtggcgtgatcttggctcacggcaacctctgcctcctggggctcaagcaattatcccacctcagcctcctgagcagctgggactacaggtgcatgccacaacacctggctgatatttgtattttttgtagagacaggattttgccaagttgcccaggctggtcttgaactcctaggcttaagcaatccacccaccttggcctcctgaagtgccaggatcacagacgtgagccactacacccagcccagctgtttacttctttaaccatacttttgattttattttttgaccaaaatgaactaacccaggtaatcttccagggaccgcaattccagaacctcatagtatttcttccatttccagcagctgattagaagtccaggatcatgtgaagtcaggcagggtcacagttcctgatggcacattatggacagagaattccattttgttttctaacccatgatgaaaacccacgtgagtcagtgtgtgaacagggatcattaattttttccccctaggtggaaggaaaaaggcacttactttgcaggttacagaaattactgggagaggatatcgtcataaaaagagccaggccaaattggaatatttttgtgatctgcatcatgatgctgaaaatagcaattatttgggaattgggtttgaaaactgaattgttgccagagaattaaaccaggtgaaaggtccttttgaattcagattgtcttctgaacatccaggctgatcatctgagagcagtcaaatctacttccccaaaaagagaccagggtaggtttatttgcttttatttttaatgtttgcctgtgtttccaagtgtgaacaaaacagtgtgtgatctattcttggattcattttgatcagtatttattcaaacccagtctctctccaggacataaaactgaaatcagatatgttctttttaagcccaaaccctctcctttctagatccaacccttcacccctaattttatgatggctatagccatggacttccccaagaaaagatcacccagaaataagaccacctgtgacagttaccagcttttattcataaccttagcttcccaactattgagcattttctaaggtccctgctgtcttttggtctctggtttgatttgtggcaaacagatgaagtaacagactgctatgaaggaccacaaaaacggcagcctctggaaaaaccattagaaagtcagtggcagatccagtaaataatatcgccagcctcagcataatctgctgctgactcgattcagtggactctaaagtgcccagcctcctgacctgagctctcctgccatctgtgagactaccagaggtcttatctgctgtccacatggcaactgggcatgagtacctggccaccttgcttccctctttgcctggtccaagtgagtgtctgctgcctctgtcctgccttgttttcctggctctaaaccaactccacccactcttaatggaaactcagtctggctttgtgtgtttctgggaagcacatgacttctgggaatgggcaaggaagaggagtgaaacaaaaactgtcagctatgtgtgcctggtctgggatccttctctgggtgacagtggcatcatgaatcttagaatcagctcccctttaactagggacaattgtaagcacttggcctcaaagttgaggttcttgaatgtttgctaattttatgtgcatgatccttgcccaaatatttgtcatccgtccacatagattcacgtgtgcatacaacatgtacaagtaatatttgggctgcccataagaactggaagattcatagggaatgcatatacccttctcagtatggttaggattctgtttttgcttcatttaattccagagttcctcagcctcagcaggttctgcttttacctgtcacagaaatgtccagtgtttaatgcatttggttgctggggcttacatgccagcctcctctgatatgtacttggtttttaaaaacccattttgttctctcttgtttcctctctatttcagcctagtatcagaaggccaggcgagactgcaacactgctcatcaccccgcggcgtgatccctgctcttaggtgctgggcagaggggaagggtggtcagggtkaggatggtgagggagggctggtgaggggctcagaggaatacttggaacaacagcagtgttattgtagtgtggcagtttcttttatacataggtgagagtttttaaagtgtaagggaaaaattaattttttaaaaaacaccatgcttggagggtgggggtagaaatagacacaatattatttctaaggaatcgggttttcatttactctggactggtgaaaatattttttaaagccagtgctctaagacctcagcttttatctcagaaccccatgggttccagaccaagagtacaggaaatcaaattgttgtcctgtctgtctatagcttggaacagggagctttgattactgactccggttccacacactgtaagatcaaaaaaccatctccacatttgaaagagatgtaaggtgtattcatagggatggtggctcaacaaatcaagcaaactggaatcaaggggagggggaagggaatgaaatggaaagggaggctgattcccttcccctgacttaccactaatttactaggctacctactytcatgagtaacctctcacagctacccagcacatgccacaatcctatgctcttgccttcttttatctgcactgtgtgaagggactcttttaaatawatgagcaagtgtcctaagctatgtcatccaaagattgtcctttccattctcaaatcctgtgactgggatcactcaacagcactgtgatgtattattttcaatgaggtgcctttcttaactgaccaaatgctgccttgtttggcccctaaatcaataaaatatgttaaaatttgtatcccctgttgtggcattttttttagataatctaagctagaaaaatgacattgaattctggacctggctggaaggaaaagaagccctttcttgtyrctggcagctgtgtggtagggaggtccaagtatgtgcatatgagataagcctgcaacctcttgaccttcagctcctatgcaggcttctcttgagcccagagacaaggcagcttggtctagtggagatagcactgtgcttggagttcaggggacctaggacaaatcccagccagttagttattcactgtgctcctgtttcctcagctgaaaaaggaagttggttatgccaccttcttggccttaatggcattaaatgaaatttataggaagaaggtttttgctcagtacctggcatgcaacagacattggataaatgttagttggatccagatatacacagaaagatatctgcttcctgccaggctggataactgttgaatggacacttgtccatagtctagaaagccagtgcttctaatccttaagccagatctttgactaccttttcagttgcttctttaacactctttgttgcttctctgtgtgtcctagtttaaattcatttcctctccagcaaaagtgagcttaaataatttctccaaactaaagctctcatgtttttggaagggctgcctttgcaagtgaggtttctgagaaatgactgttgttcccaaaacaagagggagctgggctggaagcaccactattcttctttaggcatcttgttacagagagaggcagggtcttcactgacatattaaatcctgttccctgaaccagcccctccctyttctgctccacttcctcacctgtgcagagtcattttcaggtgttagccttactgatttgcactgatctktttgttccctgagctttttaaataccctgtgaaaattttctttcctcccttggtcatcatgcatctaattgtggggaaatgtttgtcaaaccaacctgcaaagcagcatggtgtagttgagaagaataaacagagaagactgggtgagctattgtttgtttgcttctttgggcctgggtttcctcatctaatctgcaaaccaagaatgcagactagtcctaccactcccggaagactgacgttgtgccaggtattatgcaaaggcttcatgtaaccctcgacttcacgtaaccctcacacagcaccctgtggagtcagaactgtccttcacttttataggtgaggaaaccagactcagagaggtgaagtggcattcctgaggtcatgcataagaggcagtcaggactgaaacacagtctctaacacttatccgtccccttgatcttgttgctgaagtgatttaattacttgcgtagctctgcacacaggaagggctgctctgaataagagctcttttccatggacactcagcgctgccggaactgattttgaagaagtcactgccggctctgagggcctagggtatgtgtcttaggatctcctgtgtgcacaaagtgtcactgacagaacacagcaggatggagagcagcctcctcagaagcctcacaagtctttcctcagatgaagacagagcaacgagtcagaagacagatttcaacagcgacttcaccatgcgaccttggacaagttatctcacctcatcagtagaataggaatgatccctacccctcaaaggtgctgatgacactagtgaccaagatactcatgtgggttggactgcccaggacacagcagatgcttagtaaacacagatggaattcagagggaaaatgtaggcattgaagaaagttgtcttactgaccatccggaaccaggctaaggatcccctagaaatcatagacctctgaaattatatgcagaattctttatgtgttttcataattaataatagtctaacatattaaattcttagctgtgtgagaggttctgcatgcattatctcatttattctcctcgataaccctgtggaggtaagtattgctattatctctatggtatgtctgtagactttgagattcagacatctgataatggcagaaccagagcctgagtccaagtctggctccacaccccagcctcttaacactgtgccaattgctttgacactttgctggggagagatgaaatgatctcaaaggcactcatgatacagaaaaggctatgagccatggatccaaacaaaaggagaaactcaagtaggtttgctctgttacagtgaaggacctgccacaggtaagacctttttctattttgccatcctccgttgtttccttattgttggtactaaagttccaatgtgctggatttgcatagctcctggaatcacccgtattccagaaaggctggaggggtgagttatgttgggggaaggagccggttcccatctcttgtcctccacgattatctcctggttctggataaggtggccaggagagggtgtgtatgtaggctgttgagtcacaggcagccgtctcagattgcagctctgtgtagctgatggtgttgcattattcataactccagggggagcagtgtgcttctgatgttttgggaatgcagcagctttgggtttagagtcatccatggcagtgtgatgatgagctgctctcacagagggccccttccaggtgcccagtccagattgaggtgcccccagcagaaaacaggtggaaatggaaagacagagcatcagagggcaagacaacatgggcctagatcctgtgcaggtagccctcaagccaataagccaaacagatctgcactttgggggtaaagttgctatggagcaaataatttgattgtgtggtgttctgtaagggttttgcagacaaattcctctgagcttagctaggagttcattatgcttcctgtttagctggtcttctttcttctactaaataagaaatgcttcatttttggccgagcacggtggctcatgcctgtaatctcagcactttgggaggccggggcatgcggatcacaaggtcaggagtttgagaccagcctggccaacgtggtgaaaccccgtctctactaaagatacaaaaaaatcagctgggcatggtggcgcccacctgtaatcgcaactatttgggagttcgaggcaggagaattgcttgaacccgggaggcggaggttgcagtgagccgagatcgcgccattgcactccagcctgggcaacagggtaaggctccgtctcaagaaaaaaaaaagaaagaaagaaatgcttcactttctactgtcttccttcttgccctggctgtgaggaaactcaaaactacgtcttgtgttcagttgttaatcattcctcagccatggtttcttaataaaatttcaacgccagcccaattttagttctgtgtttagcatttttgtgctcatgtgtgttgtaaactgccttgagtctattttggaagagaagcagagtgtaaaggaagggctaattatgcagtacaggaggtcagactgcagagaagaaggtagctttgtgaaggaagtgggatctgggtgactccatgcagagggtggcagcattccagctgagggcacagcacaagggagggtacagcggccactggtgctctgggctgctttaacctcaagcaggggtccccaacccccaggccatgactaccaccagcaggaggtgagcgacaggcaagtgagcattaccgcctaagctccacctcctgtcagatcagcagtagcattagattctcataggagcacaaaccctattgtgaactatgcatgcgagtaatgtaggttgcccgctccttgtgagaatctaattaatgcctgattatctgaggtggaacagtttcatcctggtctgtggaaaaattgtcttccacgaaactagtccctggtgccaaaaatcttggagactgctgacctagagaacccctaccagagttcttgggaaatctgtatctgattagagataagtttttcaaacaaagcacagtgaccgtagaagggaagtttttcagctcatgaataatgtcaagaatgcagaagagcaaaagacaaggatacgtacatagagatttgatggaccgctttaagctcagcccatgtgccactcttcctctctcccctaaacacaccacagtctgtgctttgaccatgaatcaggcgatactttgctgtggggctgaagtgggggaagtccttcagttttattgtcagctctcttttccagtcatgtgtctagtggtatgggcatgagttctgaggatgacaaagatggtctgtgcttagatcttggccctgacagtagcttactgtgtgccttgagggagacacttaacctgtaagcctcaatgaactcatctgtaaaatgagggtcatagcactcatctagaagagtggtgaagttcatatgaattgagaaatagcagctgcccaataaatgatcctttctatgtcctttcccagggccatttgctgaggaaaaaaggaccttaccatggctaccagctatttcaggataggtatctttacccattcctattcctcagtgccacctcatcccccttggaattcagtaccaaacccgaacaggttgcttttcactggagtgtttcctgagctgccagatgtgcccctgagtggagatgggaatcagtgttatcttccccagggatgctgattctactccaggctggcaggagacattgtggtcctgacatggcagccaaccagatagcaatggtcttggcacccccaaagcttactgagagtaggacattctatagttgaagatgaggggagcatcttcaactgctgaaaccacaccttggcctggctgtacctgctcctatcttgaggccaaaataggagggagcacaaaagaacatggtggggtagatctgtgtgcacgtgacaccagtgaggtgctggagtgggccgtgagagtctttagtgagaatatgttggctcatgttttggaaacctttgaaaattgtcctgtggtaagggaatgagaacagtacctctctctttgtgctgttgacaggatgagttcatgtctgtcaggtgttttagaacagtgactcccatagtgctcagtaagtgtttccaagctagcagctctggctcagcaattccagtttgtacatgtcccccaaggaaatgactaagtatgtgcagaaagcattctttataacagggttagaattggaaacaacctaaatttccaacaaaaggggagattggctgattgattcatgggatggaatagtatgtgatcacgaaataagtcattttaagacaaagattttatggtaaatttattaagtgaataaacaaaggttttaaaacaatacagaatggaatatgcttttttttttttttttttttcctcctagagacaggatctccatatgttgcccaggctggtcttgtgcgccaccatgtctgggtaaagaatggatctatttttaaaaggaaactttttattttggagtaattttaagtttacagaaaggttctaaaaatagtatagagagtttctgtatatacttcacctagtttcctctaatgttaacattttacttaagtatggtacatttgtcaaaactaagagattaacattggtatattactagactgactatatttggttttcagtagtttttctactaatgtcttttctatccaggctccaaccctttataccacattgcattttttttttttttatttaaaagtgtatgtacatagaaaagcatccgggtgcatatagatgaaaatgttaacaatgatcatagctgagtggttgaattaagggagatttttgttttaaagttcttagtatgtcttctaatttttctatgtttaacatgtcacataattttaaaacacaaaactaacaattcaggctgagttggtgccctctgattaccccttgtatggctatactgtgtatgtttagctgagtcttttcaacactcagctaaagacggcaaatgaataagtctgcctcatccctctttccctatcatgcagcccagggcccggcacagaggaggcactgataatatctagttgaataatgggtgaagtcagagaagtttattgctaccaactctcggagataaactagtcttagcactctttttcagcttaaggaaacccaggcttatgtttccccagtttagtgaccccagcaggacaggacctgtttttaaagtttgcagtctcagggctgacttttatgcccatcgctgaattagttgctgtggccaggagcatggaatatgcctcttggccaggcttgggtccactgaccaggcctttagatggcttcccaaagaaaagtcagggttctgctatccaaaggaggtaagatggatactgaggaagttaaatacaacatcagagccatcccctaaacacaggcattttaatctctaattccttttgccatactatatgtcatgcttgggctccctgatgagaatagtaccacattaatgctattcatcattaaatcctagcatccagcacagtgcttgtatgtagcagggacctagtcaacatacaagtgaataaatacatttcttggtgacctaaacaaaatcatttaactagatgtttaaatcagaatgctttgagttgtaaataacagaaaactggctcaataaaggacatttgttgactcatgcaactgaaaagtctagtggagcccagcagtcaggcatggtgtggtcaggacttcacttatgtgccagtctctgactgcccccttggtatcatcaggcttgtctctctcatggtagcaaaatgactgcagcagttccagacgtgacatctgtactccgcaacatccagaacaagagaaaatacagagaccctgtatcacagaattcccagcaaaagtcctgagagtcactgtgaactgaataagattacatgcccacctctgaatcagcaattagtggcaagggttgtttactggcttagcctagatcatgtacctcacccttagaactggggagataggggagggagagagtagaatcagcttccctgaaactacatggattcctgatgggaactgagactttggggaaggggaaagcagtccggatcctgaggatgtaaccaataggaatccagctcaattgaataccctgaattgtgtggcataaacaagggctgcaggagttagagggcaatgagtgaaggttgcatcagtcagagcagggaggcttcatggaggagaatgagagactggagccaaaccctgaagagataaaagatttgggcaatggggtagggaggtggaaaggaaggaacattgcccatgtgctgtgccagacatcatactaaaccctctgtatgccgggcgtggtggctcacgcctgtaatcccaacactttgggaggctgagacaggtggatcacctgaggtcaggagttcgagacaagattggccaacatggagaaaccccgtctctacaaaaatacaaaaattagtcaggcatggtggtgcactcctttagtcccagctactcaggagactgaggtgggggcattgcctgaacccgggaggcagaggttgcggtgagccgagattgtgcctctgcactgcagcctgggtgataaagcaaaactccatctcaaaaaaaaaaaaaaaattctctgtatgcattatctcagttaacccttacaatgacctgcaagtttggtatcatcattatccccattttacagttgagaaactgaaacccaggggtcacacagtaagtgttgaggttgagacttggacccagcttgtctggctgagaagcttgtgcctggagctatgacgctggtgagtaaagtagacagtggtcacctgggaagtttgcattagtgtgaagtaagtggcctgacctcaggtcatcacagaggtagtgcagaatgtgaagttcttccctcagctgtgctgtttttggggcagcggggatcagaaccaaagcacaattcctttgaaagtttgccaaactttgaccttaaccatgtgaaaccttgtgcctttcctgctcaccagatggattcttcagacaaggcctaggtgctggttctgctccttactaggtggccttgaatgtatcattcacagtctttgagcctcagtttccctatttgcaaaatagacacagtaa

SEQ ID NO: 94769 - DNA, 36160 bp, Homo sapiens
tttttttttttttttttaatatatatatatatattttgcccgggtgcggtggctcatgcctgtaatcccagcactttgggaggctgaggcgggtggatcacaaggtcaggaaatcgagaccatcctggctaacacagtgaaaccctgtctctactaaaaatacaaaaaattagcccggcgtgtcgcgggtgcctgtagtcccagttattcgggaggctgaggcaggagaatggtgtgaacccgggaggtggagcttgcagtgagcagagatcgcaccactgcactccagcctgggccacagagcaagactccatctcaaaaaaaaaaattaaaattaaaaaaaataaattttttaattaattaattttttttttcggagtctcattctgttgccaggctgaagtgcagtgacacgatctcagctcactgcaacctccaacttcttggttcaagcgattctcctgactcagtctccagagtagctcggattacagccacccgccaccatgcccagctaatttttgtaattttagtagagatggggtttcaccatgttggtcagaatggtctcgatctcctgacctcatgatccgcctgcctcggcctcccaaagcgctaggattacaggtgtgaggtcaccatgcccagcctatttatttatttatttatttaatgagatgggctcttgttgtgttgcctaggctggtcttgaactcctgggttcaagcaatcctcccatcttggcctcccaaagtgctgtgattataggtgtgaaccactgtgctcggctggaggcatctttttctaattcacacaaaggcctagaggagtccccttttctacattcacaaagatatcttattggttactggtggtggtgatgatggcgtcttcaggggacactgaccaaaaagctgaggtatttaaaagaagcccttgcaggcctggtgtggtgactgatgcctgtaatgccagcactttgggagggtgaggtgggcggatcccttgagcccaaaagtttgagacccacctgggtaacccagccaaaccccctttttgctaaatatacaaaaattagccaggcgtggtggtgtgcgcttgtagtcccagatacctgagaggctgaggtgagaggattgcttaagcctgggagttcagggctgcaatgagccatgatagtgccactgcactccagcctgggtgacagagcaagaccctgtctcagaaaaaaaaaaaaagaaaagaagccctgcatgcagtcaaaagctgagtaagactccagcacccctcagatgggcttatgaggagctcctgtgccctcccagaactctctcccttgttccaatttcaggtgtaaccattgccaactgcctgctcagccctgggagcactggctgccctagactccttgcctgccctccttccccaccagtcccataggttaccttccacgcatacctcgacatgccctagattataaatcaggccacaggctcaggggcaagaaaagtcacacggctttattttcattaaatcaatagcagtgggtctctgagctttcttccctcgggactggcagaagattcagtctcagtgattattttgatgcccctcatttccttggggtgacctaggccctaaacagaaatggggctttagtctgtagttgtttgtggacataatatactcatcggctaaggctgcacagttcctaggggctggaaattctgctgcacctctgaccccagggacttagctaggccaggagccttgtggttgattcatttgtgcaatgcccatgttttcagctgaatgtaagccctgtgaaggcagaggctttgcattgttgcattgttcaccactgtcttttttttcttttctttttcagacggagtttgctcttgttgcccaggctggagtgcaatagcgtggtctcagctaactgcaacctccacctcccgggctcaagcaagtctcctgcctcagcctcccgagtagctgggattacaggcatctgccaccacatccagataatttttgtaattttagtagagatggggtttcaccatgttggccaggctggtcttgaactcctgacctcaggtgatctgcctgcctcggcctcccaaagtgctgggattacaggtgtgagccaccgcgcccagcctgttcaccactttctagacatccaatatttattgaacccaagtaaatgtccaaggacttcctgtctgagaatctgctaccttccaggggcaacctgaactcttaagatccagcaacgtctgtttgctgccctggctatgccagtctcccctctcttatgactgttccctccctcctttcactaccccctctaggaggtcagaggacacaccctggaggtagctgtctccaagaagctgtggctttctactctgccacatcctcctccaagggaagggatctttgctacctacttagaatggggtttaaaaatacagttagaggccaggcgtggtggctcaagcctgtaatcctagtactttgggaggccgaggcgggcggatcatggggtcaggagttcgagaccatcctggccaacatggtgaaaccctgtctctactaaaaatacaaaaaaattagccgggcttggtggcgggcacctgtagtcccagctactcgggaggctgaggcaggagaatggcgtgaacccgggaggcggagcttgcagtgagccgagatggcaccactgcactccagcctgggggacagagccagactccgtctcaaaaaaaaaaaaaaaaaatacagttagaacaggaactactcaaccaattacccagccacagcctcttcagttcctccctactactagttaccagttcctaagcgtagccccttacagcttttcaccaagacttctgctatggtttaaatgcttgttcgctctaaagctggtgttataattggttaccattatggaggtattgggaggttggacctttagaaggtgattgggccatcagggctccactctcatgagtgggagtaatgctgttacaaaagggcaagtttggtcttcttttgtcttggccctttgccaaracatgccatgtgaggactcagcctttctcctctccagaggatgcagcatgcaaggcatcatcttggaagaagcgaatggccttaccagacacccagcctgctggtgccttgatcttacactttccagcctgcaaaactgtgagccaatacacttctgctctttattaaatactcagtctcaggtattctgttataacagcacagaaaggactatgacaacttccctgccttagcctccttgcttgctggtttccccaaaaatccatcttccacagagccagtgcatctttctaaaatgcaaattaggttgtgtctctgccatagctccccacagctctcagctcaaacagctgagcacaacctggctcctgcctgcttccccaggcttagcaccccaagcccaatatcacccaactcagctctctgggatgattcagctccttctgcctgggataccctcctccccagctttctccttttcctgctaactcctacttgtaaattaaggttaagctggtgggacaaccatatcttacgtgctttgccatgcaaaacaacaggaaagacccaagaccacctgagaagtcttcttccccaaaagtcaaacctgaatgtcatcaaacccttggctgtaactatcagtttacaggaaatatgggggacagaggaatatgttaaatgacaccaccagaaaggaatcagccaaatcctccagaatgtgggaaattcacaggacaaagaacaaggaaaaaatggggagagggcaggagagctacaaattaagggagacttaagagacacatctaccaaatgcaatgtgtggaccttgtttggaccctgatttgaaagaacccgctgtaaaaaaaaaaaaaaaaaaaagagacatcagggaaatttggtgacatcagggaaactgaccacatatctgcctggtggaagtaaggaattactgtttttctttttctttctttttttttttgaggtggagtctcgctctgtcgcccaggctagagtgcagtggcactatctcggctcactgcaagctccgcctcccgggttcaagtgattctcctgcctcagcctcccaagtagctgggattacaggtgtgagccaccacgcctggtggaattactatttttttttttagatctgataatgtgttagaaaaagagagtcctagccgggtgcagtggctcacgcctgtaatcccagcactttgggaggccaaggtgggcagatcacctgaggttgggagtttgagaccagcctgaccaatatggagaaaccccatctctactaaaaatacaaaattagccaggtgtggtggcgcatgcctgtaataccagctactcgggaggcagagacaggataatcacttgaacccgggaggccgattttgcggtgagccgagatcctgccattgcactccagcctgggcaacaagagtgaaactccatctcaaaaaaaaaaaaaaaaagaaagaaagaaaaagagaatccttaccttttagagataaatactgtttacgttcaagatgatatgatcactggaatttaacatcatacagtgagggccaggtatggtagctcacacctgtcagcccagtgctttgggaggctgaggtgggaggatcacttgaagccaggagtttgggaccagcctgagtaatgtagtgagatgctgtttctaaaaaaaaaaaaaaaaaaagccaggtgaggtagcgagtgcctatagttccagctattccagaggttgaagcaggaagataggaagatagcttgagtccaggagctcgaggctgcagtgagctattattatcttgccactgcactctagcctgggtggcagagtgagacaacccccttcttttttttttttttttttttttttgagacagagtcttgctctatcacccaggctggaatgcaatgatgcaatcttggcttactgcaacttctacctcccaggctcaagggatcctcctgcctcagcctcccaagtagctggactatagacatgtattaccatgcccagctaatttttttattttttgtagagatggtgtttcactatgttgctcaggatggcctcaaactcctgggctcaagcgatcctcctgccttagcctaccaaagtgctgggattacagacatgagccactgcacccagcctgagacacttctctaaaaaaatacataaataaataaaagttaaaataataaaaaattttaaaagttgtttaaatagggccgggcgcggtggctcatgcctgtaatcccagcactttgggaggccgagacgggtggatcacaaggtcaggagatcgagaccatcctggctaacacagtgaaaccccgtctctactaaaaatacaaaaaaatagccgggcgtggtggcgggcrcctgtagtcccagctactcgggaggctgaggcaggagaatggtgtgaatccgggaggcagagcttgcagtgagctgagatggtgccactgcactacagcctgggtgacagaatgagactccgtctcaaaaaaaaaaaaaagttgtttaaatacataaaataatcaaaagtgagtatagatgaaataagagtggccataagttcataattactgaagctggaggaaggtacttgggggttcattacaccattctctctcctgtttctgtttgactgtttccataatacaatgttaagaaaggattaaacgtgtcaccccctcctagaagccctctcacattcctcagtctgaattagatccccctttccggggcttgccaatacacctgatgtgctgaccggcaattctgttgtttgcccctccctcttgggggcaggggctgcactggcaggagaggtgtggcttccacttaagggtccggtatgcctgcctcctcgggccagcccagatcataccctgctgggcaaaggaggaagagccagaggatccagacgccttggaggacttggaacacctgtaacaggacaaggagtyctgctcmggcacgtggccacagaaaactacttaggaagcctgtggtgagaacaacaacagtgcctgagaatcccacggctctggggaagtgagccccgaggatgaggctgctcgcctggctgattttcctggctaactggggaggtgccagggctgaaccaggtacagcactgggaatgtctgctatgcctttgttttgtactgtgaactctggggctgcgggaagctgctcgcagccagcttgaaggtgcttctaaagatagcaaggcaggagctaggcagggaggcaggtggggagagctagtgggmcttagcaagtgctgtttgaggctgaagattttaagtggaggcgccagctggccagggagggacaccgacattgcgaagaggtctgggtacgtgagagctagctaattagtagaggtaggaggtggcaggaaagattcgtggactcattcaacaaatgaggtcctttcctgtaccatacgttattctaggagccagggatatatcagagaagaaaagaaagtccccgtctcaatgaagaattccttcatctggggagaaaaaaacaaaccacacgaacaagtaaagtacgcagcattggaggagatgatragtgttatggggaaaataaagtagaacagggaaggcgggttgtggggagggggtacttacaagacgkccagagaagagctgtcaaatcaggtgacactcaagtggagccttgaggcagtgagtgggggagccacatgggtgtccagaacattacaggaagagaggacagtgcacggggtctgaggtggacacacaggwgatgtgcatgaggaacagcaaggaagcccgcgtggctgaagcagggtgggcaggacaagtgggggtgaggttggcagatggtggggtggggcaggtgccaaatcatggatagcctcgaagactctcttgaggactcagacatttttctttccacgtgcctgtagataggaaggacgcaggcttttgctcagggtgaaatgggatgtcattggagggttctaggcacaggtgtaatctattctgacttctgtatgtttaaaaggacscttgaggccagacgcagtggctaacatctgtaatcccagcactttgggaggctgaggagggtggattgcttgagtccaggagtttgagaccagcctgggcaacatagcaaaaccctgactctactaaaaataccaaaaattagctgggtgtggtagtgggtgcctgtagtgccagctacttgggagactcagctgggagaattacctgagcctgggaggttgaggctgcagtgagctgtgattgtgccactgcaccccagcctgggtgacgggaatgagaccatctcaaaaaaaaaaaagaaaatgaaagaaaaaaattctctttatagcccctctgaagtaggtgctaatatcattatacccattttgcagatgaggcaaatgagtctcagaggggacattgcacttgctgaagatctcccagctgggaaatggcaggacaaagcctgtgcctggctgtactatgcttcatgtcctcttgggatggtggggtttagaggtactatttttttctcttttctccaaacttgctggaatgtattccttttaaagtaaatttaaaaggaattccgggccggatgcggtggctcacgcctgtaatcccagcactttgggaggccgaggcgggcggatcacgaggtcaggagattgagacaatcctggctaatacggtgaaactaaaaatactctactaaaagtacaaaaaattagccaggcgtggtgatgagcacctgtcgtcccagctacttgggaggctgaagcaggagaatggggtaaacccgggaggtggagcttgcagtgagccgagattgcaccactgcactccagcctgggcgacagagtgaggctccgtctcaaaaaacaaacaaacaaacaaacaacaacaaaaaaaggaattccgcagcacctgtaaggtttttccaactccaggtgtcttcctgaagcacaggtggattctgagacaggggatcagacagcatcatccctgctttgcattaaactgtgggatttctgcctccactttccttagccaggagcttgggtggatgccaacttgctggctccttctcctcctacacatgtcctgtgtaacatttcgctccttcctcagcttctaactgcagagaagcagacaggttcttcccctgtgggttagcttggtaggaaaacactccctggaaggccagcccagggctgagggagcaggaccagggcaggaatggtaacacctacctctggagctattgtgaacagagggtattcactgtaggtggtccgtaaatgtaggttttaacaaatgaactccatgggttttggagggcctccatttacaaaggatgaattacaattgtgttttggggctaatgctagccttaatagcaaaggactgaaatagagactgagatcattgtgtggtgtgggttataggcaataacagacaaaagccactgaatcacaggagtcagactaggagggccttcagggaacctctgttcagtactttcatcttatacttgaggaaacggaggctgaggggcagtgtggcccagggaatgagtcctaaggctgccttgctcaccccacagccaggtgctctgtataagagaactcttttacctgcacaactgargcaggaggtgggactggactccagaggcagggctttgacaccagaccagattgaggactagctaaaatacggcctgggcaaaagcagttttcaaacacacccagcagtgtggcatgtcaatttacctttgcaatggcaacacccaggagttactgccccttctatggcagtaacccaatgatttaaaagttactaccccttccctagaaatttctgcataaatgccccttaatctccaggcaattaaaagtgggtataaatgtgactgcaaaactgccctgagctgctactctctgcctctggggtagccctgctctgcaggagcagtcatggagctgtacatcacctgttcamcaaagctgtttgcttcaacctcaagcttgcccttgaattttttcctgggcaaagccaagaaccctcatgggctaagctccactttggggctcacctgctctgcatcacaagcatccctctgctgggtgcattctaatcctcattttatagatgaggaaactaaggctcagctctgaaaatcccttgcttaagttgccactgcctgtatggaagagccaggattcaaaataagatgtccctgattgcaggtttcatgcatgtccttgcagaaataacttactgcctgaagccagaaaacttaggtcctacctgtggtcctgcctttgaatacctgtgtgacctgcaacctttattttactgtttataaaatagggatgttagcagaggagagattaaatgtgatggccttaagtgagatcatgccaggtacattgtaaaatgttgtaaaagtttaaggaggcatacacacagatggtccctgacttacgaagattccactaagctgtatgatggggcgaaagccttaggcattcattagaaaccacacttcgaggagccatacaaccactctgtgtttcactttcaattcagtatttaatacattgcaagagacattcaacacttaattataaaataggtctgcatcagatgattttgcccaactgtaggctaatgtaagtgttctgagctcctttaaggtagactgggctaagctacgatgccctttggtaggttgggtgtgttgaatgcatttttgacttatgatattttcaattttgggggacgtagccccattgtaagtcaaggaaaacctgtatatatctccaaggccatgctggtaggtggtggcagaatatagtgcactgtgatcatttccattctgacgtgctcggcatccccggtctgccgctcactcgctcagtttcctcatctgtaaaatgagtacatcttaggatgcatttcataatgttgtcatgaggctgcatggatagagtgtgtggcacagtgtctggcattcagtaggtgctaaatgaatggcagatgccttcctgcccccctgtctccaaccataagggaactcaccttctagccattttaagaacttaggttttataaatgactatgactatgggagttctccccacccctatcacaaatcatactaaaaagatcccatatcatgtatgattttaatttttttatcttatttttcttttttggagacagggtctctatctgttgctcaggctggagtgcggtgctgcaatcatagctcaaggtaacctcaaactcctggactttagggatcctcctgcctcagcctcccaagtacggagaaattaaatttctttttaaaaagtagctgagtgtggtggcatatacctgcattcctagtgtggtggctcatacctgtaatcctagcactttgggaggccgaggcaggcagatcacttgagctcaggaatttgagaccagactgggcaacatggcaaaccccacctctacaaaaaagtacaagaaaatttgccaggcctggtggcacrtgcctgtagtcccagctacttgggggactaaggtgggagaatcagttgagcccaggaggttgaggctgcagtgacccaggatcacactgctgcactccagcctgggtttttgtttgtttgtttttgtttgtttgtttgtttgtttgtttttgtagaggcacggttttgaactcctggcctcaagtgatcctcccactttggcctcccaaagcactgggattaccggtgtgagccaatgcatgtggcccatgagatttttaatattgcttttgaaatgaattgttgattttgatgacttacttgatatttgtaatttttgtctttcctgcacttttagagtcaatgcatttttttccaagtctcagatatttctgtgggccttgcagagctatgaggccttgggccctatgtctgttgtccctagtgagcataaaggcctggtgatcccctttggtgaaggaggaggcgggccaggacactttttgcctgcccagggacgcgctgtgcccaccagtcctcctcttagagatggtcatctggggcagacaggctctatcttcatcttgtttcccttcagatgtcctgcctgccctgcccctgcactttacctgtggacagtagccaaggacacgctggggctggctgggtagaacgtggccactccccaccttgtcctgtctctcatggtgagagggggccttgtagaaccccccaggaaccaaatgtggagtaaccactgcttcccatttatgacgttctgttcatcatctcwcatttctcattttaattctcacgagggccccaaggggtagggggcgctgttatcttgattttacagaggaggaaacgggcccaggggaaggttccgctgttcacacagctatggggtggtgcagtaggactccctcccaggtctgtggcctcagctactcactgtactcaataccaaatttatttatcttctcagtaataaatgaataataatgatagctgagattggtgtacctttctataaaactcaagttatagatgaatactgtcttactgtaaaaggtccaagcagtgcgaatgtagaaagcctcttaactttaacaagatccccagtgaagcatctgaacagtaacatttgagaagttctggtctaaagggtaaagcattaaagtacccaggcgcccacacctccccagtctcactcctggcccaaggggtaattgcaggtaacggtatggtgcgttgggattgtcctctatgagccctttctccttcactatcttatttgatgctcactgagaggcaggccagatgtcaacatcctctagctcagtgaggcctggtggcttgcccaaagcccctaggcaaacacatggaagaggctggattagaaaccagatctcccacctccccatccatggtcctgacatgctaattagagcttaattattttgatgtagggcctggaagctgatggatcccatattcttatggaaarcatgtatttattattacagccaccttctgggcrgcggggggttccaagtcaacaggcatgacgacattgtgtctcagctttggggtcagagaggtctgggtttgagccttagtttgcttatctatgcagtgggcataagaatccctatctcacagactggctgccaggatgaaataagaccagtgkatgaaagtctgggcacctatccaacactgtctgagtgcctacaattctaactggcctccccacagccttgttcattcatcgaatgtgcatttgcacgtcttccacgtcccaggcacccttctaggcactgaggacatagaggtaaacaagacgggcttggtgctctcatggaactgacattgtaaacagggaagatggacaataagcaagccaacaaggtaagttcacatgtgatagtgctctgagaaaaaggaagctggggaagaaatagcgaccagacaggcaggagaggtggcacttgagatgaggtggtcagggragtcttctgaggaggtgaccttggggcagaggcctgaatgaggaggaggcagccgcatgatgatgtgggaagattgggcgaggccatggcgtagtcagggaagaggccctgtgaggagaagcagcttggctgagggtggtgggttgggctgagctgacaaggtcgctgggatctgcactcccacaatgaggaggctggaccccaaggagttggagctgcccacctggaccccaaggaggtggagctgcccgcctggacctctggctctctccaccattctgtccactagcctggcctctcctggagtcagcacacacacatgcacacacacagacacacacgcacacacacataaacacacatgcatgtacacacacccttcagtagtatgtgccagagaggctggaaagtagtttcagttctacacactggctggaaaacgacaactgacaggtgagatgaggagtttctggagtggagaaatgttcctgaatactttgagggctgacgtcaaaggrgccaaactgctcagtgtttgtagttaactgagaaagagccagcttgaggcaggggaatagcctctttctctgtctgcagaggaagcgcaaggaccatgtgcccaagagaaaggcaaagggcctccccgcmacatccatcctggccagcctggctccgggcttggaagcaggtgagagccactcacggtctcagctcagggacttgggatgcccagcaactctgcccaccaactaactggtatgaggcagttcattcctttactctggcttggggttttgtcactgtattctttttaatttttttgagacagtcttgctgtgtcgcacaggcaggagtgcagtggtgcaatctcggctcactgcaacctccgcctcctgggttcaagcgattctcctgcctcagcttcccaagtagctgtagctgggattaaaagagtgtaccaccatgcctggctatttttttgttttttgttgttgtgtttttttttgagatggagtctcgctctgtcgccaggctggagtgcagtggcacaatctcggctcactgcaacctccgcctcctgggttcaagcaattctcctgcctcagcctcctgagtagctgggattacaggcrtgagccactgtgcctggctgaattttattttctgtagagacgaagtcttgctttgttgcccctgctagtcttgaactcctggcctcaagcaatcttcctgccttaacctcccaaagtgctgagattacaggtgtgagccactgtgccaccatgcctggcaggaatatattagtgatcacaatatgtgtggaaaggttaaattttccccattataaacaaaggctcagtttggataaaaaataaaaatgtgggaatatgctgtcaacaaaaagacccatctaaaatagaaaggcactggtttttaacccctttcacaatcacatcttcctgggagggattggagcccagagatccccatcatttaccatgtgatcttaggcatgttgacctccagaccttagtttccttatctgtaaagtgggataatgttcccagggctctgcggagaacactgtaacaatgcatgtgggagggataatgatttgcttaatcagccatttacactttagtatgaatgtgtttcacatcctttcctgagactgtttagatcaggagaggtggggaaaagctcaagagcatctgggagggaaagtcaaggagtgagggtcaggggccagcctttatctgcaggctgtccactgaatgtcctgtggcctgggtggggccctggctatccaaccctgagatcaaaagaagtccagtctcccaggcccagacacagcttcctggggccagtgatgttgacttgtggctctaggtgacacaagaaatgggggaggaagtgattgcaatagcagagggtgaggaaatcctgggcgtcattcttgttttatcgagaaacaggatgaacagaggccagatctgctcaaccctccttcagtaagcagtcattgaaacaacttgtgctggccaggtgcggtggctcacgcctgtaatgccagcactttgggaagctgaggcgggcggatcacctgaggtcaaggagtttgagaccagcctggctaacatggcgaaaccccatttctactaaaaatacaaatacaaaaaaaaaaaaattagctgggcgtggtggcgcatgactgtaatcccagctgcttgggaggctgaggccagagaatcacttgaacccaggaggcagaggttgcagtgagccgagattgcaccattgcactccagcttgggcacagagcgaaactctgtctcaaaaaaaaaaaaaaaaaaagaaactactgtgccaggccgtgttgggttcgcatgagaagtctactccatctcacctgtttctttggattcctttctctttattacactgtgaagttttttgccacttcagcctcctttggtcggaaactgagtctaggtttcggtcaatcacctcagcaagcaggaccactcccagctgcttgagccacaccctggatccagaatcaccagcaaatatacctaccagaggaggtcagcccgatctgaagtggcgttcctttttccctggtctagtactcttatactcacttccacatgtagtccccaggtttttgctgtttttgttttgttttgttttggagacagagtcttgctctgtcacccaggctgcagtgcagtggcatgatcacggctcactgcagcctccacctcctgggctcaggcgatcctctcaccttagcctcctgagtagctgggaccacaggtacatgaccccacacccgacgaattttcttaattttgtgtagagatgaggtccgcctatgtagcccaggctggtcttgaactcctggcctcaaagaatcatcttaccttggcctcccaaagtactgggattacaggcatgaaccactgcacccgggctttgctggtattgcttagcaaggttttccagctcatttggtgtgtaagccttttccatccaggtcagacttttttctttttttttttttttaattttccaagaaattccaggacaggtcagattttcatatgtagttatatttccctgcagcatgagaggatatggctctagttaatgggcttagaaaagtgacatagcccaggtcacacagctcctaagtggctcagagcctgagcacttaacccataccctctcccgcctttgctttaaaacaagccccctcattagaatgcctgagctctaatgttgtggctgcccatccaatgtggggaggaggacggggccttgccaaaggtcagcgctcagggatggagctgagcctgttctgtgctctgctcaatgtgtccctgggcagagccaggcctgtgggccttttctctgaacccggggtgctcagagaagacttccatttgcctgtgtaacgcccctgccccagcccagggctcccctggacttccttgcttccaggctgagagagagaccagctttgaaggaggatgttttttcccctgcagggaagttctggcacatcgctgacctgcaccttgaccctgactacaaggtatccaaagacccyttccaggtgtgcccatcagctggatcccagccagtgcccgacgcaggcccctggggtgactacctctgtgattctccctgggccctcatcaactcctccatctatgccatgaaggagattgagccagagccagacttcattctctggactgggtgagtacagttgaggtggcagctaccctttgccaggcatctgctatgtgctacataccagtctggccctttgcccacattatctcccttaatcctcacatcagtctcacgtgaggctgaggaacctaaagctcaaaggaattttgtaacttgcccggggaytcctgagtccaactgattccacagtctgtgtcctcgacctccatgtctcctggctgtggcagaacgcagctctcaatcaggcttttggacgtggtcctggcatgcctgggcacccggagagtgtccaggttttaagctatgggtggacactggagccatttcccctggggcttagggactctaagtctgagaggtccaagtgcagggagggaagaagttatgagggctgaaggtggcccagcctggggtcctagtgtcctggccagctgctggccacccctgggctgcccagtggtcctggattttctcaccagtcagagctctgctctacagagtgacagcttgagggccgatcccactcagccgcagagacccagtttctgcttcctgtccaaggttgctgctctaattccttcaactttcctgggaacttgcctccttatcattcaagattcccccattccggctgggtatagtggctcatgcttgtaattccagcactttgggaggccgaggcagtggatcacctgaggtcaggagtttgagaccatcctggccaacatggtgaaaccccgtctctactaaaaatacaaaaattagcctggcgtggtagtgcacgcctgtggttccagctactcgggaggctgaggcaggagaatcgcttgcatttgggaggtagaggttgcagtgagccaagatcacaccactacactcccagcctgagtgacacagcaagactctgtctcaaaaaaaaaaaagaaagaaaaagaaaaaaagatacccccatctcctcgcttgctccctcacttggcagggcaacaagtcgtgctcagttgtggggtagatgctagggatctgagatgatggacacccacacttggctccaaggagctcacgktcttgtgggcaatgcagacaaacccattgaccctacccttacatccaagcaaggagagagagtcacctggggggatgtgggaacttcacagggcacatgatcccatctggcaggattaggggaaggacatcctgcaggaggtggtggagcaggggagctctcgaggaaggctggaaggaattctgactttgcgctccctctaccagcctcagtggacacttctataaggcagggtgaaacccatgatgcccctagctgtgatgtggtttgtgggtgtgaccaggaaggaccctcagatgaacctgccaggctggacacataagaagacatgtgacattgtctcaggaggggcctggacagctctggcttccttgggctcaggaatcaatctaagaagagagtgagmtttggtccatgaccttgggcctgctcccttgaggggagcttctgatttctccgagaagggagagcatgtgtagcattcagacagatgggatccctcaggaaattcatgatcctttaacagatgcacatttttttttttttttgagatggagtttcgctctttttgcccaggctggagtgcaatggcgtgatcttggctcaccacaatctccgcctcctgggttcaagcgattctcctgcctcagcctcccgagtagctgggattacaggcatgcgccaccacgcccggctaattttgtatttttattagagayarggtttctccatgttggtgagagtggtctcaaactcycgacctcaggtgatctgcccgcctcagcctcccaaagtgctgggattgcaggcgtgagccactgcacccggccacagttgcacctttttttcctgggaaatctctgagaccttgaagaggtacacagcatcagatgagaagatctctaggaccctttacaattcttcaattataataaaatttgacttctaagagagctgcagtccctttgaggatggccattagaaattaggtatgttttactactcaggaggctgaggcaggagaatcgcttgaacctgggagacggaggttgcagtgagccgaaattgcgccactgcactccagcctgggtgacagagcgagactccatctcaaaaaaaaaaaaaaaaagaaattaggtgtttttttgttttttttttttaagatggagtctcgctctgtcgcccaggctggagtgcagtggtgcgatctcggctcactggtgccccctaccacgcctggctaatttttgtatttttagtagagacagggtttcaccatattggcctggctggtctcgaactcctgaccttatgatccgcctgcctcggcctccccaagtgctgggattacaggcgtgagtcaccgcccccggcctaggtgtgttttttatcagacagaattagattctctaacctagaaattaaaaatatgaaattttgtccctgtgtctttgggtttccggcctgtccccagggagttttcagggcaaaacagcccctcttgctgccctaatgtgggtatcagagacactataggatgcagtggctgtgagcatagactctggggccaggctgactgggctcaaatcttggccccaccactttctagtggtgtacacttaggtacaatttttcccccgtgtctctggtgcttgatttaggataggcaaaattcttaacttttctgtgtcttggtttctttatctgtcaaacgggcctaaactaataatagaatttacattgcagtgttataatggggaaaaaattagtggctgtggcaacaacacacagaaagtgcctggcagaaagtcagccggtgtgagcttctagcagcagtattaatactattatgctaattagtttccctgggggaatacctgggcagcagaggccccaggattttgactgtccggacgtctccccatccctacactccacctgccaccattctcctccccttgccaagcrtttctaaggtggacccaagaattttgattcatggcatgaagggcacagtggtcccagggcagaatcagtatctgccctggaaaagatctgaaccctacacttgaagccagcttcaaactcctttgaactcttctggaaaggaacagaattcagagatggcttctcaaccctgagctccctcggggtttgcagatgggactggaactccagagctttcctctctaaataataatattcattacaacctagcagctactcttactgtactatattatgtatataattttcctccttgatggatacctaacaaacactctgtgagtaagaactgtattatcccaacattacagatgagttaatagaggctcagagaggttaaacagccaatcaagggacccacagcaggaaaatggcaaagcctagttctcagctctgtcccatctgactccactctagcctggccattccccctcaaggggacatctgaggcccaggtccataggttttcctctcactgcagagctgtcccttccttttcttctgctgcttcctgagttgcctgccccaaattggcttggtggtgttttgtagtgatgacacgcctcatgtgcccgatgagaaactgggagaggcagctgtactggaaattgtggaacgcctgaccaagctcatcagagaggtctttccaggtaagactgtgccatcagtccctccacagtgttctcrgaactctaggcactgcctggcacagtgggacaacagcagcagcgagtgtcctggctgaccttcatccatggacagcgatggctgttggccaggtcttcatggtgaccatttctcaccttcctaacaagcccgaaggcaacatgcaagcccatgggccggtggatacacacagaatcctatcaaaggaaatgcccagcctttcactgacttctgctcctgcctatctccagactcatgagcccttctccaggtgtctagagttgcacacaggtgtcgtccctgggtgagtctcacacacagcccttgtgtcctgctctggagttggcatccatcaccctcaaactgtcctggctgccagggcctctgggaaatgctaatttccagccaaggtgctgtttcttgttgcttccaaggacttcagagtctggcagagcaggcagggactgggggtgagtgaggcagcagccctacgggacactatagggtgaatagggtctgcgtgccccatctgatggcccttgcaaatgttttaaagcagtctgcaccgaaaacaacatcctggaggctaaatctggctgccaggctgccaactgggcgcctgagaaagcagcccatagcccccacccccaccttttttgggttccagtacctctgccccctctaaagatcttcatcatgrgtcccaggacacagatatggagtaataataaaaataaataatggcactagcagcagttactctagatcaagtgtaaagggtcaggctggctctaagaatattcaagccttagctccttcactgtcaccataagccttgggggaggtgctgtgacctcaattttactgaagagggaggtgagccttagggttaaataaactagtgaaggtcacatttacttaagaggcccaaatcctggtgtgagcactgcccttactktctgttcccgctgcttcctttcctcaacaaagtcaatctaggcaaagagatgcctggatgcttccaggttatctaacccagccaacccaagtcaggctgcttggtttcctttgtcttccagcaggggtcaaaccaggacattcccctgaccccaacagcaggcaccattattcccaatgtatagaaaaggaacctgtggctccgagctagtcggttccgagggagggactcaaactcagatccaactgggagtacctctcctttgcttcacatggggcttctggaacacaagtcaaataatgagtaagaaaatgcttcactgactgttttgttttttgagagaaggtcttgctgtcacccaggctggagtacagtggcacgatcaagggtcactgctgccttcatctcccaggctcaagcaatccttccatctcactctcctaagtagttgggattacaggcacacgccaccacgccctactaattatttttattatttttttatttttttaaggctgagtcttgctccgtcgcccaagctaaagtgcagtggtgcgatcttggctcactgcaacctccacccccatgggttcaagtgattctctcgcctcagcctcctgagtagctggactctaggcatccaccaccatagccagctaattttagtatttttggtagagatggcatttcactatgttggccaggctggtctcaaagtcctgacctcaagtgatccgcacgccttggcctcccaaagtgctgggattacaggcgtgagccactgcgcctggcctgttttcaatttttgtagagatggggttcttgctgtgttgcctaggctggtcttgaactcctgggctcaagtaattctctctcttagcctcccaaagtgtagggattacaggcatgagccaccrtgcctggcctattgactakgatttaacamaaatgtaaattataagattttgtagtttctactacacttgcatgtttattgaatttcctaatatccaagatgccaytgactgaaagatgcatcattatgtataactaagaaaaaacagctaccaattataatctgacacagcgctttctcatggccacacctcacttttagagatggtactatgagaacaaattggaagagatgaaatgaaggtattatctagctgagaattctaaaaacacaagtcaagcagaacactcccatcttatagataactaaactgaagtacagagaggtcgagtaagtggcctaagaagaggaagggactgaaactcgagattcagggttccacatcatgtgttcttcctgctgtgttcaactttacccaccagagtcagctgtgaacactggtcctcacctcatcagcacagccaagtggttgacaacacaggcacgcaaggcaaacaaatccagggccctgggccaggtgcagtgatcatatgcctgtaaacccagcactttgagaagctaaggctggaggatcrcttgaggtcaggagtttgagactggcctgggcaacatagcaagaccctgcttctacaaaaaataaaaaaaaattagctgtgtgtggtgctgtgtatctatactcttagctacttgggaggctgagacaggaggatcacttgaccccaggaatttgaggttacaatgagctatgatcgtgccactgcactgcagcctgggaggcaaaggaagaccctgtcatgcagggcccaattctagctctggtatggtttagctgggtaatctcataaagactcagtctgctccctgtgaaaaaggaaaataatggtacctgtccacagggttgttatgaggattaaataaggtaattcattcactcatttagtcaatcaacaaatagttattgagcatccactatgggtgagacaccattccaggagtagaagacatggcaatgaacaagacaccaggtcgcaccctcatggagcttatgtttgcaaggagctgggcacacagaagcagtgaaaacacaggagtgagtccctcccttctcatagggattttttttttttcttaaatggattcttaatggctgctggcatttactttagagaggtgaggtttttctaggcagttacagtgatgcgttttgacaacctcctactttggcagagttctcagcatttccaggtcttgtcggctgtacagggcaaagggtgtgttagagatatttcccaactggaatgggaggctccagcctccctcatttgttccaggtcactccctgtgatagactaagctcatataagggcccagccctgttctgagtccaagagttatttttgttgattgtcaaatatttattgagcaccgattaggtgccagacactgagcataaaataaaaacagaaatgaggctgttcatgtggaggaaatgagtctaatgggttcccctacacctccaggcctcattcacaggccccttcctcagggaggcctccccaaacccactcctaccctctgttattactcccatagcaagtggccattccctttctgtgacatcccttacacctctactcaatacctgtcaaccctattgaactgcaggacctctggggctggaagcctggtttccagttctatgcattggctcatagttggtgctcaataagatacttgctgactgcatggatgagtgaaactcctaaggcctcccagagtgacgcagaccctttccctaacagtaagatgatctggaatcaacaggaattgggaacactaaattaccaagtggctgatgacgatcggactcatttagacctagttttccccttctcatcatctgctgctttccttctaactaggaaactttctgctgggaatgggtttagggactgtgatgaaagaacccactgctcttccctccaaagtctaagcaaagttcagtcagattctatcaaatgtgggtttcctatctgtgtcttttcctcatctgtgctatcgctcttccccttgagctctgatggccagtggccaacagaaaatgattaactcccccgagtgcttttgcatatatattttgatatttcaccctttcttcctagatactaaagtctatgctgctttgggaaatcatgattttcaccccaaaaaccagttcccagctggaagtaacaacatctacaatcagatagcagaactatggaaaccctggcttagtaatgagtccatcgctctcttcaaaaaaggtaccaacaccacctgctcctatcaagagcacttactgtatgccagggtctgatcttcgtcttcacaacaacctcttagaataagtactgattttatccccaatttacagataaggaagccagggtcatacagcttagaaaasgcagtcttgggagcagactccagaattaactccaaagcccttcctctaaaccccacgacactgatgatgctcctaagttcatatttattgagcctttactgtgtgcgaggcactgccctctcagcctggtcctagacacttcacaacaacccttggaaggagtggtttcatttccagcaggtttgaaccttgccaccactgacaccatgggctggataactctgtcgcagacaactgccacgtgtgttgcagaatgttgcaaacactcactagagtgataccctcaggaacacccccagctgtgacaaccaaaaatgtctcagacattgcccagtgttctcttgggccagaagcacctggttgagaatgactggttcagaaacacagccagcccaaggtgactttgaccctactcttccctttcctcggtctcctgctgttgggactccccagtggttaaagccgaccagaagcctgtgccacagaagcctgttgatttagtccacatagatcagctcttggaaaagacagctgagcagtgaagggtcgacagtggatctggatgggcaaacacacatcactgttagtctcactatgcagataaggaaaccgaagtatagagaggtgaagttactttcccaagttgcacagcgaatgagttccagagccaggaattgaatccaggccgcctggctccagagcctctgatcttccagattgatgtcccacccatgggaaagatrggaggggaagatgcaacggaaaaagaaagtgggacattgaggtggaaggggcggaagcctgtctggccagaggtgggggcctccttcatattgtccctggctgtgacaggtgccttctactgtgagaagctgccgggtcccagcggggctgggcgaattgtggtcctcaacaccaatctgtactataccagcaatgcgctgacagcagacatggcggaccctggccagcagttccagtggctggaagatgtgctgaccgatgcatccaaagctggggacatggtaagaggccctgcttctttcttttctcatctggggttatttcctgcacaagtctccygcttggcacaaactcacccacccacccaaagatgcccatatcccagagggtcctttatcagcccggcaccagcagagggcttcctccatcctcaccacagccctgtgtgctgggatctggagcccactgcagatgaggaccctgaggctcataaagagtggtgacggtcccaagtcacataataagtgacgaagcccagactagaagaccagactccaagtccagtgctctttccactcccaccacatgcacagctgcagccagtactgtgtgccagatctccaggggatgccctgcccttgagtgtgtccagctagyctgctggcctgacagctcctcaaggactggctcagtgtctcatttgcccaagtccttgcactgaccagcccatcccaagaggatctcacagctggtgcccatgagcatgcactatgccaacattgggcacgttgtttaggacattatgcggatgatctcaggtagcagaactatggaaaccccggctcagtagcgagtccatcattctcaaaaccccaccagctatgtgctattccagatgagaaaacagcagctcagagaggtgatacacagctggtgtctaagctgcagtctgactccaaaactcatacatttaactctgtcccctgttctaactcctgccatggtggccaagtgcccaggtgttgtcagatgagtgactcaaggaatgtaagaaacgaatgcacattaccgtgtagcatatcacacaaccacgcaagaatggtttcgttgcagtgttcaagctctccaagagaagagtagtctttgaaggattaggaaagcttcatgrgggaggtgctctttgaagtgtggggaggatttacagaagtgaaaaggagaagggtactccaggtggcaggcacagaggtgggaaggtatgtggtgcattcattgcagggcacagggagaaagtgggacatggaatccgggaggccttcagggaggagatacatttgggcctgtctacctgcctttggggcaatttgcaggttttgagaagtagaaatgagggtctggagagggcatctgtgagcctcttctgggaacccctcccttgtaggtgtacattgtyggccacgtgcccccggggttctttgagaagacgcaaaacaaggcatggttccgggagggcttcaatgaaaaatacctgaaggtggyccggaagcatcatcrcgtcatagcagggcagttcttcgggcaccaccacaccgacagctttcggatgctctatgatgatgcaggtattcaacctggagggcaactgccagctccctccctccttctctccccagaccygctcagtcctgctgtctctctcctgacaggtgtccccataagcgccatgttcatcacacctggagtcaccccatggaaaaccacattacctggagtggtcaatggggccaacaatccagccatccgggtgttcgaatatgaccgagccacactgagcctgaaggtcaggagtcctgcggaggccagaggaggagggtgggaggggcttaaatgcatcaccaccttccctcactctcagcttatccaccttcccctgaccactgagcctcaggaaggttgagctccttccacccttctccagctcaggatcagaaccctggaggcacctgccaccgagtcagggcagtgcctcaccaagtcaccttttcccctggatgactgtcacagcytcatacctggtctccctgcctctggccctgccctgctatggcccatccgctacacaagagagaagaaactaatctcctatagcaccactttcatcttgtctccgtcctgctcaaaaaccttcagtggctccccagtgccttcaagataaagttgtgtctccttgacctagtactcaaggcttcccacagtctgacttcaagcccattgtccacattttccgtacacagacgaggctccagcccctaattctttgggcagtccctcacctcgtaggatgagcttgtggttgttgagatgaaaaatattattcctttatttatccaacaaaatgcattaagtgtgtgccattggccaggccctgttctaatctcagaagatatgtaaatttaaaaacaaagtcacccctctcctggacctgacatcttacaggagagggacaataaatatgtaraattaattatagtactgagagaagggctaaggagaaaatcaaaacagtgaggcgacagggtgacagctatgggaggtgtgtactgtgttagataggtgggaaggggaagtgtccacataaggtgccatttgagttctgagygtattgagggagggagcccagtgggtatctyggggaggtggagggaacagcaagtcaaaggccccrgggtgggaatgtgcgtggtaggttaggggaagagcacggaggccatgtggccacagtaagaggcacaaggggagagtgggaggggaggtccgatcttgcaggcctccatgaggactctggatttggagggttttgcgcagaagaatgamatcctgtgacttataattttatggaatcatcatgtctgctgtgcagggaacaggctgtaggggcaggtgggggagcagtgaggccgtttggagggaaggacaaatcccagatgacaggatagtagcttgcccagggtggaggcagtgagatggtgaaaagtgccaggtcccagatgaattctggatgcaggatttgctagagtggatatgagctgtgagaaaaagggacgaatccaggaggcttccaaggctcttggcctgtgcaacggtaggctgtggctgccgattactgagataagtggcagggtgatcaggcttcggagggtcagtcagaggtcttgttttggacctgttacctttgggagggctaaatggcatcaagtgaaagtggacagggaaggggcaagttggagcttgaagaggtgaggatagagatgtgatctgggagtggagagaggacatttaaagccaacgactgcatgagctaacccaggtccttgattctagtaaaggtagattaagaagaggtctgaggggtttaaagagtggcctgttgtccacatgggcactccaagggtctgagcaaggggaatggcaggctgcaccatcaccccctaacaggccctccattctcctcagggagggagtcagccctgagcttgaatcctggctccaccactcataagctttttgatcttttgacctctgtgcctcacttgcttcatctgtaaaatgggagtaacagaacctcgcagggtttgaggaggactacatgaaataatggaatgttcctggcacagagtggccatgcatacgggcagctcctcttaccccgtctgcagtggcctgaagcaggttcataaatgtacctggaacccgctggactgatgaaccctgcagagtctagccgtgaacatgcacctgggtcctaggagtctacagttcataatctctctcatgcttagtgttgctctttttatgttgcttttatctattcattatgtaaatatttactgagcgtcttctatgtgtaccctagcatggtgggacctggggtaaacctggggtccaatcctgctaccactgaatacctgtatgaatacctgtatgaccctggccaagtgaattaacctctttaggcctcagtttcctcatttgtgaaacctaggtaataagcgcagttacctcattcgattcagaggatgtctgccaagcacaatgggtgcacagctaagtgctcaataactactagtggtcatggtcactgctctaaagaacttgggggcaaatgcaaggtgcaggatggggatggaagcagacaactgctcacagccggtctaccccaaaccctttttccaggacatggtgacctacttcatgaacctgagccaggcgaatgctcaggggacgccgcgctgggagctcgagtaccagctgaccgaggcctatggggtgccggacgccagcgcccactccatgcacacagtgctggaccrcatcgctggcgaccagagcacactgcagcgctactacgtctataactcagtcagctactctgctggggtctgcgacgaggcctgcagcatgcagcacgtgtgtgccatgcgccaggtggacattgacgcttacaccacctgtctgtatgcctctggcaccacgcccgtgccccagctcccgctgctgctgatggccctgctgggcctgtgcacgctcgtgctgtgacctgccaggctcaccttcttcctggtaacgggtaacgggggcagcgcccaggatcacccagagctgggccttccaccatttcctccgcgcctgaggagtgaactgaaataggacaaccgaatcaggaagcgaagccccaggagctgcagccatccgtgatcgcgccactgcactccagcctgggygacaaagccagactctctccaaaaacaaaccagaaacagaaaagaaatgacgacccaagacccccctacaagcatacttcttttgcgtattatgtttwactcacaaaacaaagctcatcatgcgtttgattctgtgttgtgttccttttcttttcttttgagacggagtctcgctctgtcgcccaggccggagtgcagtggcgctatctcggctctctgcaacctctgcctcccgggttcaagcgattctcctgcctcagcctcctagctgggactacaggcgcgcgccaccacgcccgactaatttgtatttttagtagagacggggtttcgccatgtttgccaggctggtctcgaactcctgacctcaggtgatccgcccgcctgggcctcccaaagtgttgggattacaggcgtgagtcaccgcgcccggcctctattcccttccgtatggaaatgaggttaactcatttgcaggaacctaacgcccgccctcccccgactcggatcgctggcgtgaacccagcggccccgtgctctccgggtatccctggatcgaggcgcacgcgttgttgcaaagtctcgcacttagggattagaatgtgcctttgcgtttcgttttgttttgcaacaatacaggtgtgagggatcgcagccctggtccaggctctagtctccccgccctctcgctttcttgggcctccgggcgcctcaaaggtaaaactaggccatttgaagcctgcgaagcgaagggcagtcggtcttcaggcctagcgggcttggctgggctgggtcggtggacccctgggctggcggcgggagcagagcatcgagcggcttttagctggggttcgggcggaggacctgggacaaccgcgggcctcgctcctccccggacggggcgggacggggaagtcccgcccaccaggcccaggccccgggccgccccgagggctgcgcccacctccttcctgcctcggcaaccccgggccctgagggcaggccccaaccgcggaggagcaggagagggcggaggccggcgggccatgccctggtcgtcccgcggcgccctccttcgggacctggtcctgggcgtgctgggcaccgccgccttcctgctcgacctgggcaccgacctgtgggccgccgtccagtatgcgctcggcggccgctacctgtgggcggcgctggtgctggcgctgctgggcctggcctccgtggcgctgcagctcttcagctggctctggctgcgcgctgaccctgccggcctgcacgggtcgcagcccccgcgccgctgcctggcgctgctgcatctcctgcagctgggttacctgtacaggtgagtgcttcgccccgggaggggaggagtgtcggagcccagcacctccgtcagctgggtcacctgtacaggtgacacgccatatgccgggaaggggactgggagagggaaccaagtcctgtgggcgcctggcctacaggtgagcgtgcagccctttacggaaagggaatcccggtagactgccttcattctagccctagctttcctggcacaggcgaagaaactgaggcccagggaagaaagggaggcgcatgggctttgaagtcggacctctcagggatccacttctggctttgccccctctcgcctcacttctgcatttctctgagcctcagtttcctcctgcgtagaaaggaggtagtcaccctgagacaggtgtgacgggcaggcctgttgtgaagagtgagcgaaagaatgagaaagtgcctcgcacagtgcctggcctgtaatggcaggggctgcggactcagttcagcatcccatgtttcagcatgggcagggccttgggaagtcactgacctctcagtggggctgtttggttgctgttcccattgggatggggatagcgcctgcccgtttggtgaagatgcagtgaaatgacatctgtccactgccctggctcagagtgagcactcagcaacctcagctggcttcttgacctgggcctccctgggagtttcagcagccctgaccccaccacagcgcttgcccctcacaaaggccgcctctcaccctgtctgcctggttgtattcttccccctgaaacttggcttcccaccccagacccagcaagagggcagagatggcctctgactcatccatgcccatggagccagccagggctgggcataggctgggtcctggaaaatgtgtgtggattctgctcctttttggacctggtggagcctcgtagagatgggaaaacaaacccaaggctcagaggcatgcgacaaagtcagggcagagggtggtgtgggttgggatggggtggccagggccaggatctgctcttgaatccgtttttacaaactcttgagatctggccttgacaaagccacacggagtctccaggagtggaagagaggagctttgaatgtggcagttttgcctgagggattatagagacatcagaaaaccccgggtgggcatgaaggggtgcagttgttaagtcctgggcaggcctccatgagccgtgaatctgtaactaccttatgcatctttgtggccaatatttctgctgagcttgagtcagacagactgtactagctttggctttggaaatgggtctctgttcctgcctgtgaattggccgaggcaggggtccctgctaggtcactggggaccataggcaaaggctcctgctgagggagaaccccagcctgtcctgcctgcctgctcctcagtgtgttcttgtgtccttccaggggaagtgacagtacatgtctggtgaatgagcttgtgatgagtgaacggggttctctcccaataggcaactgagagcaaagttctgggtggagggtccttggtgcatcctccacttactcttcatgccagtgggtaccccagacctgtctgtccaaactctggactctcttaactccgccccaatctccatccttaaccactcagggccagcctcttaaatgggatccctccttccaatctaaccctcctccagcccctcccctgtgtggccggggcaaggcagagtctgattccatctggcctgtgcccagaagtgcccaagaggcaaatgtcctcttgcccacaggaccccaggagatcttgggcacactaaagtttgagaactactgcctcaggcaactttatagcatgcctttccaattcaggtttggatccaaatcctcattccagtacttattagctgcttataattttttgtttgttttttaaaaagaggtagggtctggtcaggcttggtggctcatgcctgtaatcctagcagtctgggaggctgacgtgggtggatcacttgaggtcaggagtttgagaccagcctgctgaacatggcaaaagctcatctctacaaaaattagccaggtgtggtggcgcatgcctgtaatcccagcatcccagctactctggaggctgaggcaggagaatcgcttgaacctgggaggtggaggttgcagtgagccgagtttgtgccactgcactctagcctgggcgacaagcgacagatgtagactctgtctccaaaaaaaaagaaaaaaaaaaagagagagagaggcagggtctctgttgcctgggctggagtgcagtggcacaatcaatcatggctcacagtggccttgaactcctgggctcaagctgtcctcctgcgtcagcctcctgagtagcttggactacaggcttgtaccaccacgtccaactaattaaaaaaaattctttgtagagatggggcttgctgtgttgcccagggtggtctcaaactcctggcctccagtgatcctcttgccttggcctgtcaaaatgttgggattacaggcgcgagccactgcacccagaccttattagcttcttgatcctgtttccccatctgtaaaatgggcttttgtgagaagtaaacaggacaaggtttgtgatgagcttgggacagtgcttagccagcgggagtagaaggtgtattgatccccatttttgtttttttgttttttttgagacggagtcttgttctgtcgccaggctggagtgcagtggcacgatctcggctcactgtaacctccgccttgcagattcaagagattctcctgcctcagcctcctgagtagctgggactacaggcgcgcaccaccacacccagctaattttttgtattagtagagacgaggcttcaccatgttagccaggatggtctcaatctcctgaactcgtgatcagcccgcctcagactcccaaagtgctgggattacaggcatgagccaccacacccggcctcgatcctcattttacagatgaaacaagttcagtgaggttaggacattgccgaaggccccatagcatggatgtgaggagacaggttggagcctgtgtccactcattagatgggtgggaggctgaggaattcacaggacactaacctggccctctgggcatttgtgtgtggtgcctaggtgcgtgcaggagctgcggcaggggctgctggtgtggcagcaggaggagccctctgagtttgacttggcctacgccgacttcctcgccctggacatcagcatgctgcggctcttcgagaccttcytggagacggcaccacagctcacgctggtgctggccatcatgctgcagagtggccgggctgagtactaccagtgtgagtgaaggcctgtggctggccccgctgtcgtggcttggtggggggtctctcaaatgttggaactgtttttagtcttttataaaggctgcttagaaaacaggagaacaggctttagtcaggcagatctggcttgaaacctaaagtcactctacagctgtttgagtttggacaaatgccttgacctctctgagtatgtttgttctcatctgaaatatgggcttaaatcctcctgcctcataaggttgatgaaaggattaaatgaggtgatgcaaagaaagcccatttcctggtacataagttcctggtacagagtctcactctgtcatcgcccgtagtggagtacagcagcctgatcatggctcactgtagcctccacctcccaggctcaagtgatcctcctgtctcagcctcctgagtagctgggactacaagtgtgtatcaccatgctggctaatttttctttctttttttttttttttttgtagagacgaggtcccactttgttacccaggctggtcttgaactcctgagctcaagtaacctcctacctcagcctcctaaggtgctgggattacaggtgtcgcccactgtgcctggcccacaagtcttaattgtaatttttataattttgaagataatgaagtgtgtaaggtgcctgatacagcataggtaactttttagttaagaaacaatttcatacgttgggaggccaaggtgcacaggtcgcttgaggccagagttggagaccatcctgggtaacatagtgagacctcatctcttcaaaattttaaaagagaaacaagaaacaatatattgaatgccttcatccagtcaggttttcattgtgcatctcttctgtgcctgttactgtgctggggacacagcagtgaacaagatgaacccagcccctgccctgccaggatgatagactaaaacaagtagctacggttgagtgactggaaaagggagaggcagggagcagaggatcacagggccccctaagcatgggtgaagtttacagtgaggagctttgggagggtttttgcatgaaaggaaagtgacttgcccatttccacagacctggacagtggccaagctaaagagggcccccactcacatccgactcagggtccaagccttcccctttgcctttctccaccgctgccataaatgccacagcctctcaagaaaccagtcctcactctaccgtcactcgctgtgtgacctggagagccttcctgtggaagatggaggttggactcgatctccaagggccctttcgtcttgctagtctgagtctatatattgattgaaaaaacaataatagcggctgtcacaatcgagtgccagctattagccaggccctgtgggaagcacttacagtcatcattgctcatgttcacagcagccctgtaggtttgtgctatattgatcttcatttttaaagaggtgc

SEQ ID NO: 94770 - DNA, 206828 bp, Homo sapiens
ctttgcctcctcagaaaatggtaccaccatctcaagaaagaaagcatatttcttgacactccatcatgacacttcaatacagcattcatccagagacacacccctttctctactgccttttaaaaaatcccctttttggtgacttaattttattatatgatcttgctgcaacactgagaatcaatcccccaaggagccaatagttattcatttgcagactgatataaaaattcaaaggtggaatggactatcaatcatgaggcaaaaaagtagtggaactatcaccaaaacctcagatggaaaaccattccacatgtggctccagggacgaatcactaaataattccactgacctaatcaccattcctgactacctccttttggagactaggtaagttgtagagaagcttccagaaataaaaaccgcttgattagtaggtgggataactggtaaaagctattttatccttcaatcttgggaaataagtatgttttaaatgaataataataataaaacaataaaataaaagcacttcctgaattccaagcacattcaatacatggactttacatacaccatttaccatatccacgcaaggtcccagttgagttgattaaataactgaggcttaaagcagcttaatcacctgcccaaggtcacaagaaactgcaagagaattcaaactaaatttttaggacttctgtgatgacacaacataataaaaaatatacatatatttggttttcatccctggttctcagcacagagctcctaaaacccttgaaatttcctgagtgatagaggtgataggagcatcttttttttattcataataaataccttttaaccatacctgagtttatgctaatgagataactggtggctgaaagtccttagcttcaggttgggggctggttgtgggaagaaccaaccatattattaaaaggttggaattcaattagaacacttggacacagagtggggaacatcacacactgggtcctgtcgtggggtggggggatgggggagggatagcattatgtcataatgtcataatgtatgggggatgggggagggatagcattgtgtcataatgtaaatgacgagttaatgggtgcagcaaaccaacatggtacatgtatacctatgtaacaaacctgcatgttgtgcacatgtaccctagaacttaaagtataaaaaaaaaagtttgttagcaggtcaaggaaaataaagatcaagagccaaggaaggcattccctgggataaagataataaatttcaacaaatcaacactaaaagtaactttataatattgatttaaaaatttaaaaaaccatatttcttcaatgctaaggtgtcatcttttcacattttaatatcatagatataatagctaacattcatcttgcacttactttgtaccaggttctgttatgtgtgctttacatgtgctgactcatagaatatgggatatttcatggagtgaaaaatttcatcttttgctctctgaaaagttgttattaaaccaatgttacaaatttaaactccatgactgtttagaatccaggaaccattgtaggtgcagaaataaatagtgcttacagatatacattaacaaaaattacattgaggaaaaaaaaagttggaatttccagcccaccgacctattctccccacttccccacctactacccctccaccctgccacacacatacctgacctctggggaggggaaagggactggggattgagttaatcacccatggccaatgattcaatcaatcatgcctaatggaacatccataaaaaccctaaatgaggaggtatggagagtttctgacttagtgaacctatccatgtgccaggagggtggtgcaccccaactctaaaaggacagaagctcctgtgctttggacccttccagacttcaccttttgcatctcctcatccagctgttcatttatatcctttaaaataacctggtaaacataagcatagtgcttccctgagttctctaagctattaaagtaaattatagaaaccaaaagaaggttgtaggaagccctgatttgtagccaagttagacataagtgtgggtaatatgtggacccaccacttgccgttgatatctgaagtggtagatagtcttgcaggactgagctcttaacctatagggcctgtgctaactctgggtagtggtaaaatttaattaaattctaggacatctggttggtggctgcaaaatatttaagaattacttggtgtggaaaacccacacattgggtgtcagaagtattgtgagtacaggccaggcacagtggctcacgcctgtaatcctagcactttgggaggccgacagaagagggcagatcaccagaggtcaggagttcgagaccagcctggctaacatggcaaaaccctgtctctactaaatttccaaaaattagctgggcatggtggcgggcacctgtaatcccagctagttgggaggctgaggcaggagaataggttgaacccaggagacagaggttgcagtaagccgagatcatgccattgcactcccatctgggcgacagagcgagacaccgtcacaaaaaaaaaaaaaaaaaaaaaaagaagaagtattgtgagtagagaaataattttcttttaactttgctctgcttcttcttatattccggccaggagtgaacctgtgctcatctgtgctcccgaaagaatggctgcttgacaagctcatcaactgctgtaaaaggcatttttcctgctgtgtgtctaagaaaagcaccaaaaaaccaccatgactctttccaagggagaaatgacagctccgtctttgacctgaatagcatgaaaacaaggcagtctgatccagagagctgccctgtcatggagagaataacccttggggacaccaagtacccaaacagcacagcacatgaatataaacaatgaatacccaatggctataggcctcctttggcttacagcccctcacagcactttaagaggtgaaaatagaactggaagacgccttagggatccccgggcacaacccccgctttttgcagataaggaaactgaggctagttaacatgtctattaaagaagctggagcagggtgaaagctagaaccttgatctcaaactctcaggcttctgttttattttctctatcaccctgcaagcccagatcccagaagggaaccccatggttcccatcacgctgctatagactgaatatttatatcccctcaaaattcatgtattgaaacctaatcctcaatgtgatggtatttggaggtgaggcctttgggaagtgattaggtcataagggtggagctctcaccagagggattagggcacttagaaaagagaccgcaagagctccctggcccttttctgccatgttgaggacacagtgagaagatagacatctatgaaccaggaagcaggccctcaccagacactgaacctgccagtttcttgatcttagaattcccagcctccagaacttgtgagaaataaatttctgctgtttacaaactacccaatctgtttttgatataacaacacaaatggactaagacacacactctaatctcctcatgagaaactgggcttttaccataggggagctgaagagaaaaaaacattgttttttattttctactgctaatttgaaaggatactcatatttatcagtgcctcatgggggcagtccagtctgtaagtcccagagggagatatggagatgaaaaagggtcaaatacctgggccttcctgaagcacaaatcattctgtgaaggcaaacaatttagtagttatacagtctgatttcccagagcaagcaatgctcatcctaccattgcttatgtttatgtacaatttaagaggaccaaatggcttcgtcgcactgtggagtgtcaatgctggtgtcattaacatacaattatacatgcgtggagcagatcatcgagtacctgtcctcttaataaatcacatcatgaaaagctatggtttagatgtcactttcatttcataaaatgattcaccacagtatgtcttaaaagctagttttgctcatgcatttagtctacaattccactgatagagatgtgattgcctcgcaacttgtcagaaacacatcctctgaataaaacatggtactcctcccagccacagaatgccaaccttgatccagatctattttgggcgcttggctcctagaaatgaatgaaagtcgttgttgaggtggaattttgcttcaggtcctgtgggacttgatgaggacattcttcccagcacaagaagctgaccagggacagggtgccacagctgagtgtgttactgaggataaacatatttaaaccgctgtttgtggacagttcccctcctcctttactgtcaacatatatcataaaataaatcctttcatttcatcttaggaaggcaagatattcaggctagtgatgaaagaacagtaaggagagacttgatagcccagaccagtagcagctaaactaaccttgaaagcagaagaaaaaaaaaagagagccactaagccaccgagtgagaatgggtggcaggaagagttagagagatcctgcccattcgcatttccttctcttcactctctcttcagcctgtctcttgacaagagtgtcccggttcacccatcgcaaatctccacttaccatgacaggcatgaggatggaatgtcctatctcgagacacctacaggctaactgaggaatagaaatcagggagggaagcagctcctaggtcttacagtttaatgattacaccgccgttttcagcccctgacttcattaaattcagggtaaggacgacccacacgacgtccttctcgtgccaggtacttggcaagtcagaaccagtcgccgctgtgtcctcccggcaagatgagcgcaggtttcagaagccccagctctggaagtttgctgtgccaggctcctcggagcagcaccactgccccagacgaacacgcacacacacgcactcacacacacacacacgcacacgcacgcacacacacacacacgcacggctcattggacacttgccctgccacccccgaaagcacagcgccgaggaaaggccggttccggccgcgaaggcagcaggtgtcccctgaccctttccctccgccctccaaccccagccccatccctagctgagttcctatggacgccccccaaactcgcagttctcgggcagaattgcgaccaagaaataaaagacaaaatgagcagacttacctaactcgtctgggctgtaggatgcgggcgaggcttccacaaactcactgtctgggggagaagaaaagcagaaaacaactcgaatcgctaccattcaggacgaacccgccaagcaccagctcaagcgcaggtccccgggaaaagcgcgggcttctctctcccagcgctcagaatccctgagccggaggccccgcgggattcagaccgccagatccccagggagtgacaaatcgccgcagaaacttgggggacaactcggccctggcaccgcgcggcttccaggcgcggtcaggcgcgcgccaactttccccgcgtgccaccccgcggctcccccggccgggcgctgggccgcggccgcatcctctgccctcagcccgcggggcgcattgctctgtctgccgggcctggcgccgacgccccagcgccgaggagccgcgaagttttcccgcggtcccgggggcccgagggcgcgcggcggcggcggcgagcacccctcgcccacccaggcgccccgcgcatccccgctcgttgctaggcgaccgtggccgtcacgctccgcagaggcgcgcgcggcctcccaactcccggctggcggaatcctccctagtccccgccccgtttgcccattttccaaaaaatcagagcataacccgttctaacccgattccctgctctgttatgttatgtctgccctcctctgatgcttgggaaatcgtttgttctgtgggcttctcctgaggagatggacgattttcagagcttgcagaaaggtaggaggagacccaaatgccccccaatcccctccttttggaaccagaattccaactccagtccaacattatttcctactcttcaagagatcacctggctcawgtgggcaaagtaatatgagctgcattgcacaggttgggaaaccgaggctgagaagttgttaatttatgcgtgacatcattatggtaggggtatgtgagggagaagtgggggaggagagaagagcagtgctccttctactctataaaagattgactgctttcaaatacagaatgtagaagcaatggttatgctctgagarctgtaaattctaaaataattaatgtaacactgtgagaacctccccctctgagtcagtagcctgataacttggacagatgtgttatgtatctccccccagcccccaggactgactgtgactgctctgcattaagggggcgagggtgctggacttggggtgtgctccagagagagccccgcagctgatggcccataacagggtcagtgggaaggaaggaacaagtatggaaatggttgtcctttctccatccttggaggactattggagggtcaacagtctgggcagcctcctgggggccttctattgtctcaaagtgatcagagcaccagctgcagcagcctaagggccccgatctgagccaatgtgctctcatcctgtaaacactcagccatctctggcttttccactgtcagtttttggtttacaaatcaccatgaaggacagaaagccccttcggccagcattgcttagggagcycagggaagcaggggtggggctgtcctccccaagcaaggcagcattcttgagctkctgagcctatctctccaacctcttctttttcctgcttcttataatctgagctcccaaatccaggaattaaatatgtttgggtgarggtttgcactcatcactccatcccctcccaactcctagaatcctcccatttgtcctctggaactcatggttcatcgctagcaaaatctatatatcctcagcctcctctctgaatgtttctttcagtgttgtgctctgacccatacctggctttccttgaaaataacaggctgcattacttgcctcctctacttatttcagccatctatggatcctctggttgttctacctcatttcttgaagataatggcatctgattcactgtcacttttcccagtatcattcctgtgattattcttatttttctcyatctacatagtcacactctgatctctcaactcttctgcatcttatccctttcttgacctgctccaaccacaccagccccctgctgtcatagcgacaccatgcataatatcaaggtgaagtaatccactctcctacctttccagcttatcccctctgttattttaatccaatgtgtccttgaccccaccagcatctataatttacttatccatgaccttttctctgcccctyactctcctcatgaccctccttccttccttatggactttagtttccagtttcattattatttctctcttacttacaccttcaaatccatgttctgctctctttccatgctatttacctggtgaaaacacaaccctagtaaaatataactctccaccttctttccatctacacccagctaaacatgattgaagaagcacaaaattggctgggcatggtggctcacatctatatttccagcactctgggaggctgaggtgggtggatcacctgaggtcctgaatttgagaccagcctggccaacatggtgaaaacccatctctagtaaaaatacaaaaattagccaagtgtggtggcacatgtctgtaatcccagctactcaggaggctgaggcaggagaatcgcttgataccaggaggtggaggttgcagtgagcagagatcacgccattgcagtccagcctgggtgacagagcaagactccgtctcaaaaaaaaaaaaaagcacaaaattatgctctctggtcttattttcgattcatgtccactaaaatcaaatggagctagtgcagcccagcaatcactctgcatttgcctgtttatttactctcccgctctcttgttgctatggatgaatcatctaaggccattatggcctcctgtatggatcagatcccatttatgtggcttttccctcttcccacctggattaatattttcttctgtccttgatcactcctgtcagtatacagacatactactatgatcctgtctttttaaaaatcctttcttgactctatgtatctccagccattactccaattctcatctcccctttacaacaaaattcattaaaataattgtctacactgatagcacccattctccattttgctcttacaagcagcctaaataggtttctacctcactctgccagagtagctcttgtcaaggtcaagaatggctttgccattgccaattccaattatcagtcctagatcctaacagcaggttttgacctgctgatcttatgagtggatgggctcagatgggctgtctgcagaatcagtctcctctggtttcccatagaatcaagcaaataacatttgtgtctcaagagaggtgacctatagaaggccttgggatcagccagacctgggttctaatacctgttccaatactagctagtaacttaatttctttcagccttagctttgtgtaaacatggagataataatcatacctagcataccaatgtggtgagagtgcaataaactaatgcacttggagcccctaggagagagagtgtcacactgtaaaagtcaaataaacattagttattattggatgccatgctcctttacagctgacacaaatggactctttttatcccttaacaattttgagttactaaaagaagatattaaccacagagtatgtttacattagaggaatgttcgttgtctccaacttttagtttgcattccaagagttggcttgaargctggttacttggagctggcaacaggtttacccctatgaagagcgttgccagtgctccacagggtgattaggttctggagcctgccaaactgttctcacaatggacttgccttcaatttgttcatataaatggatgacttgtaaactaggaactatccttacaacattttagttatttgaatttcctaatcaactgagggttaatgagaaaacatttctcttgtttcagtatttgctgttgaaaattctctaaagtcaatgattccaattttctatcttaggaagtagaatagagccaacaataatgtttcatattaattaaacaaacatttattgggaatttaccatgcttccagcgctgtgcaaggcactgcagacacagagatgatcagtgcccttctaataagggattccgtgacagaccttattgaatctcagggcaatgtccaaagtgcctacccacacttgacttttataggtctcttataaagaaatggttctgctggagtgtcactgagttataataaacagtgcacaagtttacggatttgcatctcagctctgtgaatattgggtggcrggcattttcagtttcctaacaataatacatacctcactggattgttaggagcagcgaaataggtaaggtatgagacagacsaggcacagtgtctagcacacataggtacataataaatattcattttctggctgggaatggtggctcatgcctgtaatcacaacactttgggaggcagaggcaggtggatcacctgaggtcaggagttcaaaagcagcctggccaacatagtgaaactccatctctactaaaaatacaaaaattagctgggtgtggaggcaggtgcctgtaatcccagctactcaggaggctgaagcaggagaatcgcttgaacccgtgaggcagaggttgcagtgagcagagattgtgccattgcactccagcctgggtgacagagtgagatttcgtctcaaaatacatacatacataaataaatgttcattttcttcccacatagagggctagagcatgccagattgctctccttttcatcccaggtggcaggtgggcctcctgctgccatggccccagcagacagcaagagggagtccctgcccctgtttctagggaagcatatttattagaggtgggacgtatggggaggaaacgacaaggtggaaatatttctggagctcaagaggaagtttaccatagaaacagattatacaggggcctggtgtctaatggtcactgttactattgccatgatatatcgtgagttgatgggcttttgggagctggcctgggaacccaactcctaactctaatgttctttctttccttatattattgtaaatgttttaattttatttttataatataaacaaataaaatgtgtttgctgtaaaggaaaaaacatttggtatagatgagtataaactgaaaaataaaagtctcctttcctgtcctctcctaatctccatccgcaaactaaaaaccatccacaacttcttatgtgtcctagtaggaatttttaaggcatattcaaatgtgtatacgaattgtttaaacaagttggatattattattatggattccarattaaaggcaaaaatttctaaatgaaattttgctccactcccaaacataagctggggtatgactgttttctgtttaggaaggcaagaaagtatattaaaaagtcatagaagaaaagtcttatcaaccattagaaaacagtaaaatcttaaacaaaatttaagtgtttaaagggtaacacataacgcttcagttatctggaaaactcaatcagctccctcgttcctcagtaaatgaggtatggttatatagcaacactggacataatgccaggatcaaaggaaatcttagctgcatttctagagctaagagcacactctacatacttttttgggggtacaatgcccatcacagatattctgcttagtgtgcagggactccagctgtaagccgggaacctgccctgtagcagtctgggaatgccatcaagcccctgcccagcctctgctgcagaggtggcagggtctgctttgactgcaggctctacttggaggagcagaccacaggagggcctttacaggctgttctcactcaaggggcccccaggggttacatagctacttgatggtgttcagaagaggaagagacggagtctcacacagatatgcttctttctccaagagatgggtgaggggctaaatgccacatggggagaaactttatccagccaaatgatgctattaattctctttgcaagaaagagctgcrcaaatgccataataacaagttaagacagtagctagggcccactaggatgtgtgtatggccttcccatccccagcccccaaggaaatcaccaatttcaagcatgaaagacagaaagaagtgagctgagctgagtcatctctctgccttcctctccttcctggtattgccctttgatcatcttctctgcaggtagccttctctctcctggaggccctctgctagttaacagcagagcagagcggggaagcaatacccgctcctcctcccctcctctcccaggggagcatgggcaggactgatttagagggaagaggggctaaggctgcctgagctcagcatgactctcttctgttatccttgtctcttatctgcacctcctaggacaagccaacagataggacaaacacatgcctatcagtaagstttcatcaaaatgaaatttgcaattgattggttgaagcattagctcccaggctgaattggcccaatgggcatttcttgttctctaggatttaatagtctttccttttagcacagctccacttctttataagacttgatgaaaaggaaaaagaaaacacagctgttttattttccctaaatgaaaatcaggcctcaggtaactactttgtttcgtaatttccagaagacaggagtgggctccataggaagaataattaaccatatctcacctaaaaaaatcattatcctaagcagaaacaatacagatgttgtatggatctgcctcaaggccagcgaccaagagatgaaatgaaattaactctgacaggaagccaatggttcattttggtaaaaatgccaaatgtgtcctctaaaaattccaaatatcaatgcaggaggtgctatcaacaaaagcaaggtgttttgggaaatatataaataaattaaatttgtcccattcctgcactgcgttccccaccagattcctgttaccaagtatagtccagagaggaagatttaaaagaatcttcactcaatatcatatcaaaggaaataaaatctggctgagccaagaagctactagaaggtgtacttggacatgagtcagaataaagaacgattccaaaaatacrtacaagaaaaggtccctgcagaggaaaatcatacacttccgacttacactcagatctattgagtgaaatcagacaaaatacccagtgttaagattaaggacaaaaacatttgctgcaattgaaatytatgactaaactattaaaaaacaaaatctgtaggataaatgtgagtttctgctgaaatgcagagaccatgatcttatatttccaacccagcatctaaggcagaggcctgagggggaattgcttctttcagagctgcaaatcgagtcttcttggaccacacagaggcttctcttctttcacagaaaagtggttttcccaagatgctattgccttagcagtcagcatagtgtgggtggtagaaagagaagcaggagaccttgctgtagccctgtttttgccactaatctttaataagtgtcctaatctgcttatactgtgctcttctctgtaaaacgacagttgaaacagatgagagactttaaggaactaattgaaacaagtgccagtaggagatcacagataatggattccattatatgcatctgttcactacagagtacgcaagaaaaatagacmaaaaggatcaaacttctcagaaaggtggagatgcagagtaatgttgtccttagaaactgacagacaggartaaaatggatagaacgcagctctggagtatgaagacctgagtgtgaatctgctgtctgagctgggcttagttagtttgcctttgcaagactcagttttctcatctgcaaaatggagataagactaactacttcacaagatttcaataagggtttgaatgcaatgaaatcatgtacatggcaatgtttggcacacagactgctgtcaggaaaagttgcctccttcctccttgaccagtgttaaaactctccctgaccctgagaggcttcagaaaggaaatctgctccttcctgtttatataaccataatgggaacagtaccactgaatttctatgacgcacctggcccacgctgccaggccgtgtttcccagacttcctgcctctcccctaaagaggagcttaagcaggttgagttccctgggaagcatggatgacagacagcaggattcccaaacagctgagtgagcacatctataagaggaagaagaaatattttatagatttgctgagaaggaactcctcttccgtaccaaatccccacatacttgatatggctggtggccgaacagcccaatcaacttgtaatgcaacagtcagaaatgcgacagtggccaaacactgtctcccttttgtttcatatgtcagggactgcatgtgatttcttttggaaaatgtgctccagacctttaaaatgagtttraaaacccagtggcccagatcactgggaatatttttaggagtgtcagaagcaggagtggaagagggacttyccttcagaaactccttatcacccccaaacatcctgggttcacagctagcttcctggaagctctcctacccaattgcagcccgagatgctctgaggataatagaagggcagatgttgtgtggatctgcctcaaggcctatgactcaacaggatgacagagactccctggaagataatgcaattctctgtggactgcaggaagccaacaacaaaaccccaaggtttggacactccagggctttctctggtactccactagaaatgcaaaccccaccagcccatattgagcctcagagatagaatagctggcactagccagtggtggggagaggtgaggtagggaaatggagtgtcgaggaaagatgctttgaagcaggtgggtcaaggccttggctatgcatgagctgagatggctgtaggggagagccctgctgtgagcttggatgagaatgcacatgttacaacagcactgtttattttctggccctgctcagggctagttttcattttaactgtgacaagcaaataaccagcaatacaagtttgtaaatggaccaccagagccttaagctgtgaaggcagagtagggagtgttggagagggaattggagggacagaagcctatggtggctaggattggactgatctcagtttaaattccagctctgccatttgtgagctgaatgatgtcgtacaagtttctcagcctcttcaggccaattttttcattcatgaactcagaataaagctgttgtgagaattaattgagatagtctatatctatacaaaaaaggcttagtgtaacatctggcaatattatatatctaataaatggttaaaatatttttctataattcgtccatttctgacttagctctggcacattacacttcctctccgagtgccagtatcctcatcctacttcaacacctcacgaggttctcattttggcacctgactctgtcctctgaggacctgcacctttcttggatctcatcccaggcctctgagaaccaccttagtatcagctgcccacaaggatttacagatttcagccacactgattccttgtgtctgtgcttcacccactgacagtgggtgactgtgcttcacccacttcaccacaacactgccctgctttgtcttggatgccttcatatttgcaggatatagactgattatctgaactggaaccagatattatggtatctgttgcctaccagaactaagcttttccctcagccccagaagctcgtcacttacccaaaagcagtaccttctctttaggcaaacctagacacaggtctggcttcccttcctatgttccagccttgccccaaagattgcagatagatgacatggtaaactcacagaaggataagacagagcttggagatggtcacagtatggagtttttagccacccctttgttacagtgatccctaaggcttctttcagttctaaaattctctggtggatgattctattgcctaggttacaaaagcaccaagcatcagtgggaaaaccacactttctttctctcctctgcctttaggctttggtaacaagcctagggtcattgaatcaaatgctataggtgtgctgaaagcaaggtgaagtgatgtggtggtgccagaagcagttgtataatcagataggttcccacagccaaaaaaggttttcaatgaaggcagagatattcagaggatgtggtcccaactgtcattcattcattcattcattcatccagccacacagccagccagccatcaaatatacaccatgaatttgccatgcaacagtgaaaggggtacaaagatgaataaaacaaggcatctgtctcaagaagcacacaggctgttcaggattcaggcaagcacaatacagtgtgatgatacgtgctgtgacatgggaatctgcagaggctatggcagcactgaggaggraggagagactctccttcagaccaggatgggggttggtaggaggtggtggcaggaagagatcccagaacagatgacttaagcagaagcttcaaagatgagtaggaactggccaagtggaagagagatgataatagcagcctttgcaaaggttcacaggcatgtgagggcaggatgtattcagggatccaggaagaggctgatacagtgagaaggagggggttgctattagtgatgggcagcaggagatgaatctagaggggcaggcagaggtcagatctggaagggctgtgtgttgaactagggaggtttagtttttttccatggggtgtgaagagatgctggcttaagaacttctaaaaagaggctggaatgacagtatgacagtgcacaggaacaaatgacagttggtttttgggtggaatgcatccaaatttcctctctcaaagcttcctgtcttccctttggcgactatctcattgtgtgmagcagtcttggttggaagacataccctggtgtagtgcagaaggtctgcaaatgtttgttgccrtataagttaccctgttttagaggtgggcacatcagagagtatagtctgytgttctctatgtctatcttgctctcgttcttgtattactagtgcttggcataaaatagatactcaataatatttgttgaataaatgaataaacaacaaacaaatgggagacatatccttgtgaaaacatctgtgagtgcattaacctcaacaacctttcatcgtccatctatagaatggctcctaccatcaaagtaggtctctatcagatttgagggatggaggagggagcggactcttagacctgacagaggaccacagctctgtgtcagggtatggttcttatatttgtatgctctgctccaggaaagtaacaatatctccatcatttaatgctgagtcacattaattggataatcataaagaagggaaagagctggcctactctgtttatattggttgctttatcctcaacttgaatgtttacaggctgctgagaggagaaatgagcaaaacaggaacagagtgcctaacacatgttaggtgctcaaagatgtctgacyagcttcccacctggccagggcaagagctcattacatgacagctgatggtcctcatcataacactgcraagtgggcattcttactctcatgttagagcccagggaatgacagattttctcaaggccataaaacttgtaaatagtgaattcggtatctgaacccaggtctgtctgacttcaaagtccattccctctcctctccactcagctgcttttgaaaagacaaacagcgtgggcacgtactgagtacagtggattgacataatgaggtgcagaagctgaagagtaccatgctatcagggacatcaaaaacggccttacccgctctggtgctggcaaaatgatgaattccagcatgggataaccaggctccttcctccaaagtccatttttcactgaggtccatgcttctagccccttgtatgtatagctttcagatcaaatggaagcaatctcctgaaataaataatgaatataaaaaagggatttgaattaccactgatgttctctttgtgaagagaagctttcttgaaggaaagtggtcagtttctagctcatttcattcctttggcacacaaagctcgttgtctagatttgggtatggcctgagtgtgaagttgctcaagcccacaaaccaggttttcctcaccattcagttaacaaatatttgtggaatgactattgtatgccaggctttgagcaagaaatttactatttagttgtgcatagtttatagactcctagaatttcagggcaggatatagtgggatctcaattttatttaaaagatacacactcttctatttgcctaaaaaatgactaaaaaaacttgaactaataagttagaagcagttttcattgtattagaattatgactactttttatcttccttgtaattttctgcattttcaacaatgaacatgtattgcttttgtaatctcaaaaaggtatgcaataaatattattttaraagaacacttcagagccaagagggaccatggagaccaattttccttttccttttgaaaactataatagaaaggcacagttacaagrgctcttggctttcgtaaaaagatcattcccactccattggccaccactgagaaggccagcctgaagaatctctctatatgcaaactgtacctgggctgattacaactcatggccaaactcttgcccatattacaaagagatcttgataacgctctgcatgtagcaggttctcaaatgaaagtgattgartaattgaacatgactgattcatcacatctgtgaatgcagcaagtgggacatccacacagtagaagtcctgtcagcctaattaggataggcaccaatcatcatttgctgtagtcagcccagctggcttaatttggtctctagaatgctgttcagagttgccctgcgggttcctgcattgcctgccagactgcagacatggtagattgacttgttgctttttggctatctgcctggaaaaatatgatacttatgggagatgcaccaaacaaataacaatatctaataaaatactaggaagtaccaaagaatgtagtgcactttattgggtactgcttctctagcaatttgtgttgaatccaattacccaaaaattttggaagggagttctagaccagagtgaatatggcacagtgtaatagtgagaacgttagacttatcaataaatccagattttagccctgactctgcactaactggatgactttgggcaaaccagttactttctctgggcttaatttcctcttgcaaagacctcttcaggcctcccagacttgcagcctataataatatgcttttgtatacaaaggctacctatccacccatgtcagtggattgaggaagctgcattatttatccgttagccaactgagacatcagcacacaagaggtggctgattgaggctagaagtagtctgccattgaaccagacacrttctctgtgcaaaactaaaaacatgtctggagtagaaatccaatattgggccataatcacaytggtatcatcatttaatcaactgaagtaaatatccaacattttatatctttgctgattattaaatagtattaacaataatactacatccttaaaaagcaacacttatttacaacaggtaattcaaaatcacttcattaatctttgcagtatctttgggaagtgaagtagagactccaagagctttgtttgacaaaaataggctttagtgattaaccaaagagtggttttcaaagaagattcccatctctcttggcccagtggcctaggtaccctctggcttccaggaaacagatttgcaagatgatatggatgtgtgaggttaggctctcacatccatgattttattttattaatctgaactacataggcccatggtgagtgttttattaacttcaacctgcaacccctgctggtttctctgatgcttgaatttcacttcagcttgggaaaaccaagcactaaatgtaaaatgaaatggcatcaaacacatgtattttgaggaaggttttgatccatcacacctgttactgaaattccaacacctccctttagccacaggaagccccagagttgctcaggagattctggagcctagaaaagagttttcaggcctcaggccatataaaataacttactaaagaatttctattgggtatttaacctccatccaagtctaaaccctgccatagacaaagtccatgaagaagaaactaaaatgtaatgcaaccttgagaatttaatgaaaaacataatgcaaccatggaaacaggaagtgaagaaatactttctgctgaagcagctaatgacagcacaaatactaatatgcctgataagttggggtgggtgaatgggaaagaccatcaaaaacttacagatgtaattctggctttgagaatcacttttttagaactaagctacctgcatagatggacattggggtctatggaatactggaatactatgaatacataattggcacttcataaatattggttgattgaatggatgaataaatgcccagtgtgggtgaagactctacctaggtattagatctcataaagctctcaaaggagatttgtgtacaccgatagagtggtgtgagacagaccagcagaatggacctttggatttaagaaggtttaactctcctgttaaaacccgtagaccagaactctcctgaaactgacacagcctcttcttttatgggtccatctacccagctgcccaagccagaaacttggccatccttgacttattacatctcacatccaactgatcactatgctttgttcattctttcaaatgtctcaataatccatctgcttctgttttcattgcctcagcctttgttgaactgccatcatctctcactaagcactatgacaacttcagtgagtccctggtcttcatttcctccaacccattctccacaatttaggtgtagtagtatttttaaagcacgcatctgatcatgtcacttctggattaaaatactccagtaactcattgttcccaggagaaagtctggactatttaacatggtatataatgctcaattattacaaggcatttgcagtccctgaataagctcccttcttcagtcttttgtatattcagccattcctagagctctagcaagactgttcttcctgcccaccctcttcatcttgctaactacaacttatcttccacatctcatcttagacttggttctgtgttcctcagaggctcccacaggctccctgtgcttacctcattatagcatttatcacactgcattgcaattttctgttaatatatctatagtttagttcatagttatgcacttgagagtaaagrtcctatcttatttttatttgaccctaacatttgcacagtgtcatcataagggaggcacttaatatagatttgctgaatgaatgaatatgtgaatgaatagtgttgtttggcacaagtrtatttcagcttaacatgtctttttgaaaagtattctgtttgcaacctcacccattgcctcagcttctctggaaatttctccatctcaaaaccacacccaagctgcctrtgcttcctggccctgttctggcctcctcatccagtctaacttgcctacattcccccacgtcttctcacacttcagcttacatacctgcccttgtacccagcatgccactggagtccctgccactcatactcctgcctccttccccaagcttgggatgaatccgtatgcttgattatccacaggatactcctgccacctaatgcagccaagtcacackggaacttctaaccaccacttctagggccatttctggcactgaagacttgatctaaaaatacaaattcagaaaaaccctggtcgyacattgactatgcyttaattgcctctatatggccccatctgtagagagggaattcattaactagaagtaccatgtctggggaatcaggtagcatattccatcattcagatattcaagcaacccctagttctaacgcatatgaacaccatcacagcaaacaagtgtacttgctggtaacttacactgtaaatcaggatatacataaatgtatatatactgacatacaaaaatgaattcattcattcatttgataaatactaacttggtgtctcctaggtactagtcactgcactaaacacatggaatagaaaaacaacaaatattgtatctttcttcaagtagctttcaaacttgaggaggagacaygtatatgaacgtatcattacagaacaacataccaagtacaagcatagatgcatgcacagggtaaaccagggatctgcaaataatgaaatctggaagttggaatggatctcagggcctttagtccaactcttgccttatgcatgactttccagtatatgcttattcagccaatacttaaatactaccagtgataaggagctcactccctcgccagatagcccattacattttttaacgcttctgtgaaacaattcactttcagagtctcaacaaaatattaatattcaccagcaatcctcagtgctgctgagctgttcccggaactcctgccccttgttctgtgcttcaaaggctgcttgaaggagagatgctctccagccttgcagatgtagacctccttcttcagtgagtcaggaatcagaaggaatagtccatcttggttacaagtagagggtgtaaatctttctggtcacacccagaagacaaaccaaacaacccactgaagcacaagagggaagaggtcacacaatgggatcttccttctccaccagaaatacttaagatctccgtcatctaggatctaggtctagtttatgtcagctatccaaaaatcctaatcatcagtggcctgtggaccacagtagaacagagggaagtctcctcctgggctgctccaagggtttggttctgacgagtttccgtttctaagcttgaaaagttattttccttctagctccaaatagttccaaacatatcagaatctatcttcactcttaatattcaagtgataaaatttcagtggcacctacaataatcttacacttgtttggaatagaaaaacattctaggtattcactgtgagaaaaaaaaatacctttttacatgaataaaagtacatgaaatgctagagggatagactcctcctctgtctaaaatggctgatgtttagagagttgagwtacttattctaggcttcttgtttgtatccaagaattcttactggctttgtagaattgaagagtttgagtcacttggaaaccattatttcagattggttkatccaactgggcagagtatttgtgaagctgctggggaatttattgatgttaatattttaaatattccaataaataatttgtgctatcttctctctaaggagttgtggcaacaagcatatttttaggaagctaatgaagttttaaaattatgtggtcctttgcagaactctcagcgactcaggcttttcatctctgaagttggttcattgagaccacactcagaaatctcctctaccatgaaaccctaccaggcagacctatttctttcttcctttgtgcttctcacagctttttatattccattaggacaatgatttttccattgcaggataatactcttccattagaagttgtctcctcaggataaaatcacatcttgttcacccttccgttcccactgttagcacggtgcatggccatactcaggctcaggtaattcttgttggatgaaggagactgacatacctacagctgagaaactcaagtgagtctatacttgcaaactcctcacataaagcagggttaaatcggaaatcataacaaaagatttgtcattaacttctgccagtaggcagcacaatgcccaaggacactgaggagcaaagaaaaaagaaaacaaatattccaaaagaactgggttctcatctggtttgtggctttttaatgtaatgactcaggacaaatcaccttatctccccagagcttagttttttatgggtatgaaatagaactcataaagtttattcttccatctttgaattttgtgaaaatcagatgccaactggagaatcatcaaarcagtgcacaaatacatagtactgttaycatttcagcaaatttgcttatagagctcacttgctatgcagcactgaattccaacttgcttgcttaacttgggaagtgatacagaatgtgggaggcagtatatatatcgtggatgagagcaaggactttggagacaaatctggatttaaattttagatctaccatttattagcagtgatctgtgagcaaggtatataacatcactcatcctaattttttctatctgtaatagggtatcatagcacatgctttgtagggctatggtagggattaagtgagaaatgtctgtaatttacctagtacagatcctggccagaaataaaaactaagtaaatgacaatagtagttgtttctattattatcactattagcatgtgaagtagatacacttctggaagtgatgttgtcccatctgcagactgcattccatggagaaacagaataaaatgtgaggagtcatttatctcaaaggataagctgctggctagaagacacttctctgaaaaaaagatgtgtaaaaaatgggtgagattgcaaacaagaatccattgatatgtgctagttctagaaagggaggggaaaaactagtcaggaaagagcaacagaggtgaagaggcagaggaatgctctgtaaggacttgctgagatggagccataaacaacaccacctgggtgtgggaggttgggaaaccccaggagaggattaagtgttgctatgtgagagaaggagctaggctgaagtctatgaggcaaagagacaaagagcccgaataagataaatggccacagctctctgattatgagccaagaataggatattgacatgggccccacagcaaagggctgttgttaatatatagatctttacagccatacccgaacaggtgaaaacatcacagttgccaaccaatccagcactgtccattagaaagagaatgtgagctgcatatataattttaaatattctaatagccacatgtgttagtcagctccagctgctataacaaaataccacagtctaggtggtttcaataacaattatttatttctcacagttctgaaggttgggaaattctagattaaggtcctggtcaattctgttccctggcaaggactctcttcctaggttgctgatgaccaccttctccctgtgtcctcatgtagtggaaagacagagcactctggactctcctagttcttataaggataccaattccatcatgggggcctaccttgaagactcacctaaatttattcacctcccaaaggtcccacctccaaataccatctcctcaagggttagggcttcaacatatgaatttgtgatagcacaaacattcaatccataacaccacatttaaaaaaaaaaagtagtacaggtgaaattaattttaataatatattttatttaatccactttagtcacaatactattttaacacacaatcagaataaaacattattattgaaaatgttagatttttttccatcccaatcttcaaaatyggtgaaatcggtgtctattttcacttatgccacatgtccacttggactatccacatttcaaatgctcaatagctacacatggtacagaccccatcccaaaggaaaatgaattttattctcctgacctcctaggctcttaagatcttttaaaagcctagattcttagagccagaaaaggcttttggaattgttgtgttcagagatctctacatattctcaacaggtttccccttagcatgtttactttaagcaattttatacctgttgaaatttaccctccaattcaatattcactgaaggctgacttaatgcttggcctggacaggttaatcatggtttatgttccatccactctctcttctaagggaaactaacttacgcacaccctcctccttcaatccctaggcaccccatttcttcttctgctcctcaccacctctctagcccagctgatcaagagtggacacatgactccacctgtgtagtcacctcgtgtggaaaatctcgctyaatcagggcagacaattgacgggctaatcagatgccctgtcaggaatatagaggcagaatcagcagatagggagaagcaccaaaagacacacacaaaagaaaagagagarggaaagagagagctacaaatattgggtttccagccacttctcagatttcttcagggaggggttttaggtgagggaggtatgtggcttggaatagctccttctcaatcatgtttccacatcaggtttccaaaagccatttcattttaacaaagtgattctccagatgaaagacgtttgaaagactccggtgagagatctcaaaataactgtgattcctggagctccagtagaaccttccggtaccagccacagtctgggcttctgaggtgcagctgtttcgctgtttctggttttccatgcgattcctgtacctctcatggtcatgactagttttcaagaatcctttatatgctgagggagcctaagtgagtctacctttcaacacaattgccttccacagagagggatattttcatatatatttgagcaaagttcttttccacatctccccttggacttgtttgctctcaatctcatgccaggacttagcctgccacagaagtgatggattaccttggatcgcatccccaagtaattatattctgaaaatacctcagcacagtggccttctggggactcttttaagtctcacatcatctacagcagtggttctcagctgaggctgcacattcaaactgtctgggaaacttctaaaatatgctgatgtcccaggccctccctcagactctgaaatcagaatctctgggggcagatccttgggtgcccgtatttcttaaaaatctccgaagtaattctaatgtggagccacagttgagaaatactgtgtgatacaccggatgtgccctcacatagacttgggtttctatcacagaaaaccagattctgtttttaattgtaaaagaaaagcgtacttattttttttaaagaatacgtagtgaggaattatccaaagtgagaaggctcactcatcagtagtattcccaatggttccactccctagaggtaactattgcagttttttatgtgtcctccaaatattgcctatgtttcttccaatatttaaatctctctctctctcacacacacacacacacacacacattttcgctctggctttttgtcttactaatatatcttgattattagcctagaatttctttttgtataaatctatggggcacaagtctaattttgtaacatgcatacattgtatactatgtatatagattgtatgcattcagggcttttagggtagccatcactcatataatgtacattatacttatttagtaattttttatcatacaccccacaccctaccctagcctagacattttcgataaaggaaaacagtgtcggggtttgagtacttctttttccaaataataaaacaaaagtaaaactaaagtaattaaaacagtgtgatcttattactggaataaataaattattyggtagcacagaataggaagtccaaaaaataatcaatagaattgatgtagtatatgaaaaaaattggcatttcaaattagtggggaaataaaggatacactattcaataaatagtattgagataattattgggacaattgtctattcatttttttaagtggattcctattcacagcatataaaaattaattaaagatgaattaaagtcttcacaataaaactaagcatgttagaggacataattttacaattctggcatgggaaaatcttactaaataatayataaaatctagaagtcacaaaataactatagacagattaggctacatcaaatttaaattttctctaaaaagaaagagtaaagaaaagtaaaataaaaataagaaaatgaaaggtaaaatttataacgtatacaaaagattaatatccatattgaaaaatgtttctatatatcaataaactgacaatcaacagaaagccagacaaggctatcaactgataatcaatagataaacaaatattaattataaaagtataaaaagatattcaatgcaacactcaaagagtcaaaacaatcttgatatcttttttttcacttatcacattggcaaaatgttttaaaagattaatatcaagaaacggtgactatttgaagaaacagatattctctaactttggtagaaaaatatgctaaaaacagtttttaaatggcaatttggcacatccccacatcctctaatatacaaattcatatgtcatttgatttagcaatttcacttctaagtaatctattctacagaaagcaattacaaaataagtgcacacaaagttatatgtaatatgacattttttgtaataaaaaattttaatgactgtcaataaatagttaaagtaaggtatagttatattgtaaatctcacatagccattaaaacaaataaaatgactctataagaactgataagtcaggaaattgacaaatttcctgtaaattgtaaaaagccaggtgcaaaacaatttacaaagagggtccaatttttttccaagaaagatacacatgtacacttttaatcacatagagacaggccttcaaggaatagcagacttttaatagagatacttctagggaagggagtgagatttcaagcttgagagtatgaagcatagaaggaaactttattaacaccatatattttatatatttttataaggcatatttattaaatttgtaattttttaaataatgagaggaagaaagttttctcactgttttaatttgttctttataaattctgagtttatctttctttcatatgtttattggccatctttatttcttttcttctgaacagcctgttcatgtactttgcccatttttattcaatttctttctttgtastgaatgtactatttaaaatttttaaagtatattttgatcttttttctatttattgttgtattctgatttcatttatactactttcatcacatatgttttatttatattttagataattaaatgtatcagttttttctttgtatagcatctgagtttggagccatgcttaaaaagttattttctaattcaagattattaaataacttaccaatttaaaaattctttttattgcttaatatttaatatatgttgttattaatcaggaatttatttggagacaggaatacagctttaactttcttttccaaatgtcatttccctcaataccactgggttgaaacaccatattgccacttttgttggctctttctggactctttattttttcccactgatctctacagttttgtacccatactttaataattatattttctgacatgctttaattatctagtatgactagacttcctctctcatattgcttttcctgccagaaattgtttgtctcttcccatttttcaattgtaaaagtttattgtgagataagatgttacagaytcacttttacctctccctctcctctaaatataactaaatactctggaaataactcaacagatgattgtaaaaggactccgaaatatggaaaaaagaaaagttgactggctagggatttcaggatgtgagacaccatagtgatttccctggttttctttttatctcccatatatcccatgctgagcaccagggaggcttacaaccccaaaccaccaacaggcatagcattgaaaaacaaacaccaaaagcctgctggctctggccagaggcagggaaagggtaagcccagaagagtcctaccagagaaataatcctctggtcctcatgctgatctgtggcaggaccaagagactgatctgcctgcagcagcaatagtagcacagcagactgaaccattccccaccccacacatgctggcaagccgcactctcttcagtgtcaacatcagcaaaccccatccaataatagaatggtggtgggttccacctgcatcaacatcagtagggtacctatcccatatccaagacaacaggtaggccaatccatcctcaggcgaagcattagcaaacctgaacaggacccrtcccttcctccatacccatcaaacagcccacgaggcacctgcagtaataaagcaggagcccaaatagcagcagaagaacaaggtagactattagcattgcaagaactctgaaaacaaattgtcatggaactataactcacaaaagtagaccagaacttatacgctaagccccaaaagggtgactgcttactaaaaataaaagatctaagtagtatgaagcatgttctaaaataatacccaaaatgtccagggtacaagtggaagtcattcatcttaccaagaacaaggaaacatacaacttttatgagaaatgacaatcaactgatgccaactttgaagagactcagatgttggaattatctgaaaaggattttaaggcaatcattataaaaatgtttcaacaaacagttacagattttcttgaaacacatcaaaaacacacaattccaacaaagaaatagaagtcataaaaaagaaacaaatgcagaaaatagaatttaaagagacaataacaaataaaaagtcaccagatgagcttagtagtagagtgatgatgataagacagaatcagtgaacttaaggacaaatcaatagaatttacttgtacaaaaaaggaaaaataaacaaaaaatttaacagagcctcagaggctctgtaggatcaaaacaaagatataatattttatcattagcatctcagagagagaagaaatatactgtgttgctgaaaaagtattcaaaaaacatactggctgaaaactttcaaatttggtgaaatgcataaacacatagattcaagaagccaagtgaacctaaataagataaatccaaggaaatccacactaagacacattataattaaacttctgaaaactgaaacgaaataaaacaaaatcttaaaaacagccaaagagaaatgatgcattacctacagacaaacacaaatttgaatgacagaggatttctcgtttgaaactatgaaggccagaaggacctgacacaatatatttcaatccctgaaagaagaaaatccaaaaccatgaatcctgtatctagcaaaactatccttcaagaatgaagggggaaataaagacattatcaggcaaaggaaaactaagagaatttgtcaccaacagacctaccattaaacaatggctaaaggaagctctcaaacagaaagaaggtgagaacaaaggaaggctggggctgggtgcagtgagtcacacctataatcccagcactttgggaggccagggtgggaggatcacttgaggccaggaatttgagactagcctgggcaatatagcaagaccccagttctacaaaagaaaaataatagcattagctgggagtggtggcatccatggaatattcatcataatagactatatactgggtcataaaacagctattaacaaatgttaagaaattgaaatcaaatagagtatgttttctaaccttatggaataagactagaaatcagtagcaaaacaaaaacagaaaaacctttaggcacatggaagttaaatgacacacttttaaataagccataggtaaatgagaaagtctcaaagggcgtttttacagactaaatacaacttaacaaaaatgaagaaacaacatcagaatttgtaagatgcagctaaagtggcaaaagaaaaatttatagcaccaaaggcttacattagaaaagagaaataatcgcaagtcagtaatttaagtcgctagctcaagaaacaacaaaaggaagagcaaaatataccgaagtcaagcggaaggaaaaaaattaagataatgacagaaataaatgaatctgaaataggaaaagcaatagaaagaattcatgaaataaaaagctgattattagtggaaaaaattgatataattgataactctctagctagactggtaaagatcaaaagtaagaagacacaaattaccaatatcaaacaggagatattgccacagattttacagtcattaaaagaataatatgaaatatatgaacaactttacactcataaattcaacaatttcaaagaaatggactaattcccaaaaatcacaatgaaaactcagccaagatgaaatagaaaatctgaacagttctacaactatttaaaaaattgaatttataattacaaatctctccaaaaagaaatttccaggtccagattatttcactggagaattttgccaagcatttaaagaattaacaccaatttcacactatctctttttcaaaatagaaaagaagcaatcactttctaactcattttatgaggccagtactaccttgatatgaaaccagacacagtacaaaagaagaaaaaatacaaatcaataattcttatgaactgggatgcaaaaatccttaacaaaatttcattaaattgaatccagcaatgtataaaaaagaataataagccatgaccaaatgagwtttatttcagctatgtaaggctggttcaatatttgaaaatcattcaatgtaattcaccrtatcgacagactaatataaaaaatcacatgatcatactgatcattgcacgaaaagcatgtaacaagcaaacactcattcaagataaaaaccctcagcaaagtaggaataaagggaagcttcctcagcttgatcaagaacctctacaaaacatctgcaactaacatcatatttaatcgtgaaagactgaatgcttttcctttgagattggaaaggatttctgtcttatctctcttacttaacatagtactgagaggtctagccagtgcaataaggcaagaaaccagaaagatcatacagaatggaaagggaaaaataaaatgctctattttcagattacataatggtctgtgtagaaaatcccaaggaatttaccaaagaaaaaagaaaaagaagaagaaaaagaagaagaaacctagacctaatgagttcaacacagttgcaggatttaatattaacataaaaattaattgcatttctctatattaacaatgtatatgtggaaactgaagtataacaatgcaatatcattttcaattgctccaaagaaagttaagtacttcgtataaatttaacaaaatacctacagaatctgtatattgaaaattataaaatattcattaaaaaaaacaaagaagactcacataagtgcagaaattttccatgttaaaggattggaagactcaacatagtaaaaatgtcatttctccccaaattaaactacatgtctaacaggattcctatcaaaatcccagcaaggttctgtagatagagacaagttcattctaaagtttatatggaaagtaaaagtcccaaggatctctaaaacttttgacaaataaccctgaaatgggaggaagaactctacctagtgtattgcttattataaagctaccatgcaacttactatataatattagtcaaatactcaaaagagtgtggtattgtcagagatataggcacatcaatggaagagaatggagaacccagagataaagttatacaaatatgcccagttgatttcttgacaaagctgaaaaaccaatccaaagaaagaaggagagccttttaaaaaaatggtgcttgagaaattggacatacagaggcaaaaaacaaaacaaaacaaaaaacaaaaaaaaactaaatttgactaaacttgacatattatatacaaattaattcaaaatagattaaagacctaaatgtgaagtataaaactataaatcttttaggaaaaagtagaaaatatttgggaactggggctaggcaaaaagttcttatgctttgcactaaaagcacaatccattaaaggaaaaattgattaactggactttatgaaaattaaacacttttgctctgtgaaagaccttttcaagaggatagaataaaaaattacagagtgggagagaatatctgcaaaccatacatctaataaaggacttatatctagaatatataaagaactcacaacactcaacagtgaaaaacaacaacaacaacaaaacaatccaattagaatatagtggggttatttgtgttttggtttgtttaagttctttagagattctggatattagacctttgtcagatgcataatttgaaactattttctcccattctataggttgtctgtctactatgttgctagtttcttttgttgcacagaagctctttagtttaattaggtccaacttgtcaatttttctttttgttacaattgcttttggagrcttagctaaaaattctttaccaagactgattttctaggttttcttgtaggatttttatagtttgaggtcttacatttaaatctttaattcatcttgagtgaatgtttgtatatggtaaaaggcaggggtccagtttcattcttctgcatatagctagccagctatcccatttattggggcaaaaggcataaatagacattttactgaagaggaaatacagatgataacatgaaaagatggtcagcatcattgcccattacgcaaacacaaattaaaaccacaatgagatatcactatccatctatcagaatgactaaaataaaaaatagtaataacaccaaattctggtaaggatgcagaaactctattactcatatattgctggtggtaacataaaatattayggccgttctrtataaacattaatagtttgaagtttcttttaaactaaaaacttagcataaaacccagatatcacattttcaggcatttatcccaaataaatgaaaatttatgttcatgcaaaaaacttgtacatgaatgttcatagcatctttatttgtaacagccaaatattagaaactacccaaatgtcctccaatgaataaatgagtgaatgcttaagcaaactgtagtacatccatactattcaatacaacacagtaacaaaaaggaaccaactattgatacrcataacaacytggatagatctcaagattattatgctgaatggaagaggccaatatcataaggttacataatgcatgactatataacattcttgaaataaaattatataaatggacaacagattagtagtctcaaagggttagggatgggaccatggctttaaaagggaagtataaagaagccttgcagtgatgatatggttagtgatattttgattgtggcaatagttacatgaagctaatgtgacaaaaactgtatacaatcacacacacaaacacacacacacacaatgagtacatgcatagctgataaaatctgataaggtctgtggatmgtaccaatgtcaattacctggttttgatattgtactataggtatgtaaatgttaacagtggcgaaggctgggtgaaggggggcactcatagactcatgaatctataaatatttcataatgttttttaaaaatatacaagccagctattctttaacagccagagtgtttgcatgattctttgtttacaaaatccacaactagatcaaccataaatttaatgagatggatctgtcaaacatcaattcatatattaaaattacacagattaaaattttgtattcacaaggtctgaataactcaagaaaacttaatattcacatttggctctcaagagtgattttatccttcaccctgacctaccaaagtggtagcatctatctgtatactggtaaacctaaaatgtttggagtaccttgggctttggatccccgtagaagtcatctaacttcagtttctccttaaacacaactttaaaaatagtaataaatagttataatatattgagcactgaactattcaactacctgctacagagtggaaggtaagaacaggactcacaagaaatgagaaaacatggtcccaattcatattattttagatacagaggatgggatgcagaggttgtttttaagcctttggaaatgcatttaggagcaaaaagagggacaaaaaatggcagtagaagagatattcagaatgtaaatattcagtgtgatataagtatttattgaacacttatcttgagcacctgtagagtgatgaccaactgaagctctgggtttgccagggagcctgtggctttgggacttgcaacaaagtatcattagtactgctccaacgctgtcactactgccactgttagctgttattcatttacgtaacacagatgtattaggcactgtgctaagcactccacaaatatcatctacaaatataatcgccacacgaaccttgtgagatggcattactatccagattttaaagaagaagaaactgagaagacatgtctagatactttcccaaggtcagcaactagaaaatgtcagagtcctgataggaacccgggtcatctgacttcaaaattcatacttttaaccaatagtctatgtgtcttcaccaaagcctgtttaaaaccctcctctttgctactcttttctcatggcttcaggtgctttccaccaggcctcaggtggcacctctgggcagttccctgacttcatattgtctctgctctacctccttcccctaacaaattccatgtggaggattgggcacagccaatatagcaggcaaggcagatcttcagcagagccttgtatgaggagagttgggtgggtaggtatggaggcagatgatgagagaagagtgtatgtgtgagtgtgagaaatgttttttccctgattttattataacggtaaaacgagttagtaaatgagtctctttctcgagtctttttaactaaaacatttgagttagtggtataaggccaggaaatatgcaaggacaaagaactacctggttggattcttctatttctgacaccatctcaggggcttgatctcagccggcttcagagtaaacaaggttactaccttgttcccattatctaatgctacataaaaaccacccccaaacttagttaatatacattgttattatctctcaatgttctatgggctgagtgggctgagctgagtggttcttattcagggtctctcatatagttgcagtcagatagtggtgggggctggagttatttaaaagtttctttccttacatgtctgaaggctaagtttgaatggctggaaaatctgaggactggttgggattcaatccttgtagcctctccatgtggccaacttggactttctcacagtatgctggtctcagagtaattggcagtcatgggcttgggccagcttgtattggcttataagagctgattctgcatatctcctcccaaacctgtgttcagtgctatcattttggaagccatggtgggagtatttacaccatgaaaattggcaaacactgcaaattaaggaactttttttttttctccagaragccagtttactagcacatgactctacatggtagttggcttctgccaaagtgactgagacaagaaacccagaaggaagatgtaaaccttcatagaacctagcaatggttgtcccagaatgttgccttcttctctttctattggtcaaccaagtctctaaggctagcctatatttaagaggtggagaattagcattaaactcctgtgggaagagtagcaaagaatttgtacagtctaggagctggcacagagtaggcactcaataaatgcttgattaatgaatgagtgtgtagtcattttaaacactgatctgcacatccttaagccactctaaatgcacaagtccttttagaaacttttacttcaaccaacgatttttaaatctctgagtagcctaactctaaaactgcttgatatagatctatttacactctgtccgcaggtatttgcagacctgtttactcaggcctttcctggttaactgtactggtttcctgtactcarttggtagtactacacacattacaatcacagattgcttgctttatagacgtttatagatgtgctgtttaggttggctttatttccttaagtaaactgcaagtttcttaagagagttcgcatgtatttctttgccactcctccttcctaccatgccaactacagatagttttaaacacatacacatgaatacttacaacataggtggtggttagagattataacccttaaaagtgaaggaaagaaggagcggtactaaaattttttaattgctatgttttagagccttccataaatgttctcatttaactcttctatttacctaatgaagcaggtattgtttccatttcacagttgagggaaatgagcctcaagaaggtttagacatttggtccaagccataccgggaggtggagaagctgggattcaaatgaagacccacatggttccaaggtctgaggcttacgcattcttcaggctgccttcccactgctttctacattccctatcctctcgcattctggcctctctccttaaagcacctacaagagtcataaaaatgctaatgcttctaaactccaaatagagtaataagcatttcaagttcttctctggtaaaaatgtccttagaaagcttagtaaaacaagaagcttagagcgtcttatactaggagtggagtgagcctggtagcaggggggacgagctaaggggataatgcaataactcaggcaaagcgtgttgatgggttagaccaaggtagtagtggtggggtagagagatgtaaaccatttggagagatattaagaagactgactcaacagactagtgattgattggattgtgcaggtgctgatcaattattttagaaccatcattctggatgctgctgggaggtaagactggagagaggaggcccagatgtgaggtttctgtattcctagaaaaaattgataasggctttaaactagggtaatatctgtggaggtggggagaaatggatggatttgagaaataatatggagttcgaatctgctgaatgtgttcccaaatcagatgtgaaaatgtgaggaagtttggaggggtgtttagggtgaaatccagaaatctaccaccaggaacttttcacagacctaggggacacagaagggggagcagatttcaggtgagkatgaattctggatatggtctagtctgaggtgaatgtataaccaggcactggcagccagtatgcaattgcatttaaaacaaagcaaacatctcttatctaaatgagtctttgctccctgtataggttatagatgattgtgccaaatactatatgtggcagggttctgtgccaagaaataaagggctctgcaattctcaacattttcatttgacagtggttcaactttctttccaaaagccgtttatcatcctgtaggcacctctgtcataaacaagatgtctttattgagccttccaaagctgataagagttgtatgattcaatcagtgacagagactcatataactcataggaagtgttgcagggagatttcagtggtctctaggagcacagggtctgccttcacacacacacacacacacacacacacacacacagagagagagagagagagagagagagacctcatgtatattttcttggaagaactcatagggtcaggcactaagatatgtttgtacacttctgccctgcatgcggcagcacagccattgtttgaacaaggtacctgcatgtcagaacaggcatcctgggcccctttttttcctgctacactcctgagaaagaagggaagcattcacaccagcgaaacagcaaatcaaggctctccagagagctgcttttctgcacatattttataagaatcagctctctaagagtctacccaatcagtaggaaggcaaaggaggtatggatggccctagcccaaaggagtccacttacagttgcttcactaacatgctcattatacagctcttagaataggcacctaataccaagccccgattmgattcctacacccactgtgagagcccaccactgcagctcaaagctgacttcgcctagccatggtctgccaccccaccaggtggggaccggctgccatggaaacagccaccctccccacccaatggagtatttcttgatctaattccaactctgcccatagatgccttccaaaatccccccctcgtgttaaggttccctagagtgaaacccactaaataagaattttcttacctgtgagaagtcctggtgaccggcagtggaaaaaatactaagttctaacagaagtgacagggactcacagagcaaatgtgttcrttttaaaagaagaaaggtgacttcatccctggtgccgtggagtttaaaaagagcaacgagtgctgcctggctgagccaactctgcttcatcagtgatgactccatccaaattatgcagccattgcccagacatgctcagccttcagaaggtaaatcgctggaatctgactaaccctgttgttttcaaagagcttcagaaaatcctaaggcaccaattgccttaactggcaccagagaaagaaaaattatgcacttatttccttgagtcatgtcattatctcycccaaatccaactctgaaaaacagtactctagggaaggaaaatagatatttagactttctgagaggtgaaaattactggggaagtggaagcagggaggaagaagaagcgaaggtatttcagccaggaggaggggctgtaagaagctggaaatgaccaaattgctaagaaattttcagagctatgaatctgtaagcaaaggtgacaaacaggtgactggactttgcaaagggaaaaatattcagttaagaaaaggaggttagttgctacaggaaaaagtgtgacagcctttctcaaaaatgcaaccaatttttattttctttttgttgaacataatgccactcattcaatatggggtcatttgtaatattaacatatcagttcaaaacatgcctgcgttctaaacagaaggatttggagaaagagacaggattttttttcttctgtatgttaaaggtgaggctggaggaattagatttgtaacatgggattcaaggtcatttcaagctacccagtgggccaatcacctactcttgatgccaagtccttggtctaaactttggacaagagttctggctggggtgctagggaaaggaatggtaatgagtgtgatctctgttggaagtggggcagagggttgagctcagcagccagctgccctttctcccaggcttctatttcaggagagtataaggtgactctgggtcattaggcttctatctaatttcttgctcagctattttgaggctttgagattttcctgtgtcaagtttcactccaaagaggctaaaacaagaaaaaatgcmctttttatttagatagaggtattcagatccaacattagagattttcgaaatcacagatttaagacatgtcaaagtggcttacaaagggaacttgcaaatcttttgtttggggtgtgaataatgataggagtaaaagacgggcagcgtttcatcaatggtaagaacaatgaaggcaggagtcatttttatttggttcatcataatgtccttgaaacctagcaaagagagtaccatacagtaggtgctcagcagaaggagagtgaatggtgtcagtccttttccattccaggtctctagaatagatctgctgagaatgcttaaagtcaccatcttgttggtgaggcatttggagagagcatgagccagtgggtcttgtagaaygaaaaagaacttggttatttgctttgtctcagcctctaggttcattgccaaagttagaatggagcaaagaaggccaattgctggactcaggagcctcctttcctccccaggagcctcctttgcctatgagctagactctcatgtcttttcctaaggccaggactcaacccaatgggtaatctgccaattgtcttcaatttttttttgttctcaaaagcctattaaaattttcaaacttagagaaaagtcagaataattgtacagtgaacacctatatwcttaccaccgggtttcttcaattaacattttgccaygttagttttatcccatgttgattctctgctcatttctctatccatccagcaactcatttaattatttttgttattgtctttcaaaataagtttcagacattagtatattccccccaaatacttcaatattattagccagagttcaatatttatttacaatttctttgtttctattcagataaaatctgtatacagtgcaatgcacagatcttaagtgtatcatttccaagttcctctagacacatacacctgtgcaatccaaactcctaccaagatacagaacataaccatcactctggaaagtttctttatgtcccttcctagcaaacccctatctcacatcccaagagataaccaatcttctgatgattttcaccagattagttttgcctgttttagtattttatattaatggaaccatacaaattgtattcttttatgcaaatttgtgtgcactcagcatgttttgggggttcattcatccatgttgttgcttgtatcagaagttggtttcttttcattgctgaatagtattttactctatgaatatgccagtattctagtaatggatacctgggcttccagcttagggctattaggaatgaagctaatgtgaacatttttgcacatgtccctgtgaacatttgttttcagatcctttgagtaaatacgtaagagtgaaattgttggttcttagggtagctatatgcaattttatacaaaattgcaagatcttttccaacattcttatgtaattttcctctcccaccaccaatgtatgaaagctttaattgcttcatgtcctcaccaamatttcgtgttgtcagcctttaattttagccacactggtagatgtggaatggtatctcattgtggttctaatttgcatttccttgatgactaaagatatttcatgtttttcatgtgtttattgaccattcacttattaccttttgtgaagtgtccaaaatttttgaccatttaaaaaatttttaaattgttttattattgttttagatgttcttagcatatcatggacaccaatacttttttatttttttgagatagggtctcactctgttgcccaagtaggagtgaagtggcttgatcatggcttactgcagccttgacctcmcaggctcaagtgatcctctcacctcagcctcctgagtagctaggactactggtgcatgcaaccacacccagctagtttttgtatttttagtagaggcagggttttgctatattgcccaggttaatcttgagttcctgagctcaagcaatccagctaccttggcctcccaaagtgtggggattataagcatgagccaccatgcccagccagataccaatackttttaaggtaagttttgcaaatattttcttctgtcctgtggtttgtctatacattttcttaatgatgtttctgtgcttcttttcatttctttaaatttttattatctaacataatatttttgcttttttagtttttacctcactcaaagtcatacagatattttcctacattttcttctggaagttttttaaattttagcttttatatttaggtctatggtccatcacaaattaatttttgtggacggcataagttaaagcaaggttaatttgtttccatataaaatgtagttatttcaacaccatttgttgaaaagacttcctttcccaattaggtcactttggcacctttgttgaaaataaaataaatgtataagcatgtgtctatttttatttctgggttccttattctttccatcagtctgtttgttgatccttataccagttgcagactctcttgattactatagctttagggtaagtcttgacgtccaacaatgtgagtcatgtgatctcatatcaaattggaggagggtcctggtggaaggtgattggctcaagggggcagatttccctcttatcttccccttgctgttctcatgatagtgagttagttctcacaagatctgattgcttgaaagtgtgtggctcctccccttttctctctttcctgctccaccatggtaagatgtgcctgcttccccttcaccttctgccatgattgtaagtaagtttcctgaggcctcacagccatgcttctgtacagcctgtggaactgtgactcaattaaaccacttttctttataaattacccagtctcaggtagttatttatagtggcgtgagaacagattaatacatcatccaacttaaatttcttttttcaagacttctttgaatattctaggttcttagaattagaatcatcttgtcaattttgaccaaaaggaatagtagaattatgattatcattttattgaatctttagatcaatttggtaattatagccatcttaagaaaactgagtttttcaatccattaacatgwttatctccccattgatttatatcttcaattttattcagcaatattttgttgttttagtatagaggttttgcatgtctttcgctaaatttattcccagatattttgcttttgacactaatataaaattattttttaaatttaactgtccaattctttgctgctaatacataaaaatgcaattgacctttgtatattaatctgatatcctatgactttgctaaattcacttaataggtaagtagttgctatgtaaatacaataggaatttctgtaagaatactcatgtcatctaacatagagatagttttacatttactttttccattctgaattctgaattccattctgtatgcgttttggaatttttttttttgagacagagtctygctctgtcaccaggctggagtgcagtggcgcaatctcagctcaccgcaacttttgcctttcggtttcaagtggttctcctgcctcagcctcccgagtagctgggactacaggcacacgccaccatgtccagctaatttttgtactgttagtagagacagggtttcaccatgttggccagggtggtctcaatctcttgacttcatgacccgcccayrtsrgccccccaaagcactgggattacaggcgtgagccaccgcgcccagcaggttttaattttttaaatatgcttaagtcctcctgtccattgttaaacaaagtggtgagattgggcgttcttgacttgctcccaactttagggaaacagtgttcaatattttgcaattaagtatgatgttagctgaaggccttttgtaagtgctctttatcaaaataaggaggttaccttctatttcaaatatcctgtkttttaattataaataggcattgaatttattaaatgtttttctgcatttactgaagtgactatgtgattttccttcattattctttagcgttaatagcatacatttctgaatgttaaacccccctctcatttatgatgttggtaacttgtgttctctctgcttatttcttgatcaatctacctaaggatttgtcaactttgttaacttttccaagatataccatccagctgtgttaatttttttctgcttttcttcttgtactgactttgggtttattttgcttttctttttctagattcttaaggtaaagtcttgggtccttggctttagacgttcttcttttctaacatattatttgatttaaagctaaaatttcccccaagcactgctttagctgcattccacaattttgaaatgtattttattatctttcagttcaaaatatttcctagctttccttgtgatttatttttaatccatggattatttagaagtatgttgtttaacttaggatttttcttaatgtcttactcatctctaatttaattccatgtggccagaggacatactctgtatgacgtcagttcttttaagtttatggcccagatcatgatctatcttgatgaacatatcatgtgtacttaaaagaatatgtatcctgcacttgttgggtgccatattctataaatatcaattaaatcaaagtgatttatacttgtattagctatctagggctgccatataattgccacaaactgagtgacttaatcaacagaaatttattgtctcactattctacatgctagaagtctgaaattgttagggaagcaggagcctgggagagccaaagtaatgccattttaaaataaactccgtcttaaaactagcaagacacattccttgtcagtcatgacccatggtcccaagatgtttacagctaaggaagcagcttggtaatgcctgcaaggacaaactcctacaacaacaaaaggtccagatgtcccaatacccataaaaatatatgcttacagataattatagttatgctttggtgtacttaacacactaaaatttcaaggatagttttctttaaatcaacagaataataaattttgtcatgctgtcagcccacctacatgtaggcatcacttagtttagtctttacatagagaaaacccctatataactttttaaaaagttaaagaaaaacttaaaatgaagatggtaagatggtgcattcctctgcttgctttctgaggacaccctactcagtaactgagtagctttcaataaaccacctcttttcactgcactctgcaacttgccctgaattccttccttcctgagatccaagaaccctttcttggattctggaatcccttttctggcaacaaaatcaggtatcaacatagccatgcccctctgagattttgggtaaagtccttccttacccttcttagcttctggttatggctggcaatccttggcattctttagcttgcagcttcatcactccaatctctgacttcatcttcacatggctttctcccagtgtgtcttcacagtatcttcccttccacatcatcttccttcccacaggctgtgcctgtgtccaaatttcctctttttataagaattaattatggtcccactctaatacctcattttaactttgttacctctgtaaagccacttcaaataatgtcacaccctgaaggactggagggttaagacttcaatatatcttcttaggacgacgtaatttaacccacaataatagtgttgctcagatctgtgtcatcacagcacttttgttcgattgttctatcagttgctgagagtaggatgttaaattctccaactgtgattgtggcattttctatttttccttttaattctgtgaagttttgattcatttattttgaacctctgtttttggatacatacacatttatttttgttatttcttcctgatgtattgacctttttatcattatgaaatgtccctctatttttgttaatacactctattttaaagtctactttgtctgatattaatattgccaatcagtgtttttttttttttttttttttttgaggtggagtctcctctgttgcccaggctggagtgtgcagtggtgcaatcttagctcactgcaacctccacctcccaggttcaagcaattctcctgcctcagcctcctgagtagctgggatcacaggcgcccaccaccatgcttggctaagccaatcagctttcttatacttactatacatgcaatattattttttcatccatttgttttcaaacaattggtggttttatgttcaaaatggatttcttgcagacagcatataattgagttggtgtgttttttaaaaatttcattttaataatattttattttcatttggtatgtttaattaattatcacttaatgtgattaccgacatggttggattgaggtccaagatatggttggacttaaatccaactttactatttgttttctgcttgcttctttggctttttktctctctgtttttccctgtgggcttcttttggattaagtatattttaaaattccattttaattatctatgagattttaaggtatacttctttgcattacatctttagtggttgcttttaaggattaaatatatatatatgtatatatattttctatttttcatagtttactgggagttaatattgtatacttcacataaatatgtagaaatcttgcaaccaatttggttcattgactgccccctcctcatcctttatgttatccttatcatatgtacttctttacatgtgctataaactacacaatacaatgtcatatttgttcttgaactaatcatattttaagttaattaagcagaataataatactttacagttacacatatttaccatcgaatgtattttactctttcctgagtaatcgagtctctattgggttttgttttactttaccctgcattccatgacatgcaagtgaaaaatttttctaaagctgtcttatttaatctttattcatcaaggacattttcactggatataaaattttgattgataggctatttttctttcagcactttaaagatgttgatccactgccttctgggctccattgtttctgatgaggtatcagtggataagaaataattgttagtggattttgaaatgattcaggcaatgtcattttctctgactgttttcattattttctttttgtgatttatttgcagcactttgactatgatatgcctaggtgtttttatttttgttttgtttttgatactaatctttcttgatgtttcttgaggttttagaatctgcacatgtatgtcttttaccaaatgtgtgaacttttcaccccttatttacttaaattagtttctggatcattctctctcctctccttttggaacttcaattatatgcatattagaccttttggtattgctgcaaagatccctaagtttttgcacatttattaatattaaatctctgtttctcaatctgatcatttgtgctgatctatccagatcatttctaatgatctatcttctagtccattgactctttattctttcatctcccttgtgctgtcaagagcatccactgaattattattttagatattgtcttttttagttctcgtattctcattggttcttttttatagtttctatatctctgctaagattttccatattctatatttctatattcattgtgaacacattttcttttatgtacttgagcatggttacaatgactttttaaaaattcttgtctgctaattccagcatgtaggtcatcttagagttgatccctgtcaattattctttctccttaaacaagtcatgttttccgttttgttatatgtcggataattttggagcatatccttgttatgatgaatgatatgttgtagaaagcctgaattctatcatgctctcctaaggagtattgacttttctttaattaggactttaatgtggctgaacacaaatgaaatgtaagccttcttctctgccttatatattgcacacagggtcctgttcttagactaaaagctataaatcagaaaactcacctcataaaacttactcttctcccaactgttatttctcctctagtttctgcttgcttttgttctctctccagtgtcttcaaccagttggtctcatattttgtccagagtttatagttgttatctgtaagagatttggttcaaaagagctatatggacataccaaaatatccagttacattttgagtcacttagtttatcttctacaaaataatttatagctttttgctatgaattaccttgcatctcacccttttcctagtaatgctgaataagatatggagcttctgcagaaaagggtgacataatcaataagtattgcctgccttgggcacaggaccagatagttgcaatttttgtaatagttacttacaaaacaatgtataatactcagaagtttgtacctattagaacatatccttgaagtaagagtacaatatttgcttgtttgatggctaatattccccactaaatgaagggattgtgcttgtgaaattcactcttatatgcccagtgtctctcatgtggaacatagtagtcactcaataaatagtgaatgagtgagagtagtgtctaaccaggacccatcccaatttagtatagtttatcatcagtgatctatcccagaaaaagtagacagcttaggaatacctcattcagcctaatttttgttttagtttcccttttaaaaattaaataatcaacatagatacatggagaatacaaattagcaaaaataaatcaagccaacccattttttccctctgagacataccattgttatcttttccacatagtgccttgttattcttcaaattttcattctcaacctcaggtgtacattagaactacgtgaggagctttgaaaagtcctcatgctcatgctacaacccatactaattaaatcacattctcagggattgggacacagacatttgtgttttttaaagttcccaagatgacacyggtatgcattcaagaggacctaaagatgtaatagccaggatagcagagctttttcagatgtcagtttctatctcctgcatggcacagatcctgtcctccaagagagttcagacaggacagtacttgaagcaattaaacatgaaacaattagaaacaaaaggacagcaaatatacaaaattaggtgccaatgtgtggaagctgtgagctgagcctctgagggcagacacctttgagtgcaatcagaggtgggctcatcttggtggagccccacctgccacactgagggactcttttctttcttagaggtttctagcagcaggttggagaaaggggtacagtgacacattagaatgacaggtggcactgattctattcctgtcttctttgaacatttcttctttataaaatcccaagatcccaggttcctggcctctgatctttgtttgtgggaatgctgttttaattccttacctgatttcagaatttgagaccaccttcaaccagagaagcctctgtggaaatgtgccgtcactggccagttgttctgtctgtctgctgtggaacccaggtgagttaagtataaatatctggccgggcacggtggttcaygcctgtaatcccagcactttgggaggccgaggagggcggatcacgaggtcaggagatcgagaccatcctggctaacacggagaaaccccatctctactaaaaaatacaaaaaattagccaggagtggtggtgggcgcctgtagtcacagctacttgggaggctgaggcaggagaatggtgtgaacccaggaggcggagcttgcagtgagccgagattaygccactgcactctagcctgggccacagagcaagactctgtctcaaaaaataaataaataaataaaaattaaaaaaaaaaatctatggccaccctacttctccagcttgcccaagagagttggacaacaacaaagcatacagtgtgattcttgacctgagccacacaaaagaatctctgtgaatatcgtgaaatagctattccaaggacccaccccagaataattaactcagaacctctgggtgatgaggtccaaaaactggtatctttttccaggctcctcaggtgattaggatttgatccaaggtgagaaatattgatgatgtgaattggtgggccattctcctgggttgtgcatttgaaatccccttccctgctactcctggagacaacatagagaaaaatgtcaggctttatgttaaataggctaaggtttgaatccctgctttgccgttgactagctgtatgacattagctaagttgctgaccatctctgacactccatttagttaatggtacaagaggcaaaataatagtacctactaatgaggctcaatgtgatgccatatataagtcaactggcacgcagtgtgtaccaataaatatctgctcccttctgtctctgcactcctcacctcctccccctgacctcagcattgtaataagagctatggacaattccggcttgtttctgagctgtttctccttgactgaccatgaccacatcagcctggatttgcatccctggtccctggatctggcatcctgattccagcttctaaacttgatccagcttttctttccgggcccagtttccatcacctgtttctgttgctcagcactaagccacaaagaaatggtttctaaaagtagctgggccccgtgctgctgctgctccagctgagttttagcagcaggagggggtgtggctaattttagacttgtcctggactagcatctgagacaaggcaaggccaggcaagtccaacctgcctcctcagtacctttgggttggagtttggagagaaagtttggggagattttgttatagggcttgtgtgtctgtatcacaccaggctccttatatggaaatttaatatatgcaaccatttgcctcaacatctgttgggatttgagtctcaggtgctgtactgartgggagtaaccacaatgtaacctggagtttttgatatgctaatgcttgtactgagctaggatagattgttttctgcctaacccagggacaggaataggcaggtgtgagcaggatctgagattcagcaggaaaagggctgataagagaaaagatagaaaatgttattgacttatttatgtttagagaaattaaaaaggaaatcagatggagcagtgcagagacagaaagcctcactaggagaagcaaggacagcatcgtagctcctaggacagacctggcccagaggaggtttgatgattgttgcacaagtgtggaatgaagggcttctaaggtggggaagaagagatgctttggggctgcccagtgagcatcttggttgctttggaaggaagggcaatcatcttagagccagctgggctgcccatgggacctaaagcatcagaagagatttgtgtcctctaggtcaaagtaaactagctcttgcatggtcaggcccacagaatgaggatagctaacaacaaagaagggttgagcactcctaggattaagagataaacaagacaaagagaaagagtgagaagagtagagggtttgcagtgagtcaaattagtttcttcattccaccacttaaagttgtgtgatcttatgtcaattacccaactctctgagccacggtcccccatacatttatagtgttcaccaatatatatgaattcaacatttcaagattcatcaacaatttattgagagtctactatatgctacaggccatttggccaatggaatgaacaatgcatctaacaatctggtaggaaatgcagacaagagaaaagggcatgaataagtgacaacatatgggtgggtgctgcttagtgccatgaaggaagtaagcaggataaaacgagacaggtaatttggctggagaaagcctctgtgagtaggtgtcattgaactgagccccaaatgtgagaaggagccgactctgtggaagaacactgcaggcagagggacaagaaagtgcaaaagcccaaaacacaaaagaacttgacagttctgaagaatagaaagggagtcaatgtggatggaggggagtgagtcaagaagagatctctctgagacaaggtgagggtgatcatactgggcccaaagaaggagtctgggttttgcaaagggagaacagttcccgtttcttggagagagaggacaggatggacaggagctgctcctatggaggtgcttatgtggtgcttctatggaatagatgccactgggacatgggatccttagaatggagcccagatgtcagcagggggcaaaaaggtttgaacccctgtaagagaaaagacattctaaatctagtctaggacagaacctttttagttgatgtagttcaaactctacttctgagaagaagtgagctttcctgataaaacacttaatcaattttctaattaagtttaatgagattaagatttgttctgggaatctaatcatccacccacccacctgctctgtcagtcaattgtctcagtgtttaggcaattgtttacgggaaaaaaaaaatcatttctttttgcatcttagcttaataataatccatcattctcttgtcctataaaatgtccctgacaaaattgaatctttgaattgggcttctagtggccttttcacttgcagtaagactataatgaaactttgacatgtgctttgaaattgattttctgaaatgttttctataacaccatttggtcaatggctagtggacatgtgaggacttcctcaagttttcttagtccatgggcccattgtcctctgagctcctgcttgtgcacgtgctctctctagctgcaacatatggccctagccatgggagttccactaaaatccagcccccagatccttgctctttggcaaggagtgagagtagggctattatgtgttgacttgtgccccctacaaaaagaagtgttggaatcctaagtctcagcacctcagaatatgactttatgtagaaatagggtctttacagaggcagacaagttaaaaggaggtgactagggtgggccctaatccaataagactagtgtccttgtcaaaaggggaaatgtggaggcagacatgcacacagggagaataccatggaagatgcaggcagagatcagagggatgcttctacaacacagagagtgtgtgatttccagcaaaccaccagaagtgaggggaagagattctttctcacagtcctcagaaggaaccagccctgatgacaccttggtctgacaccttggtctttgacttctaacctccagaaccaagagataataaatttctttttttagttttatttttcattgatacataataattgtgtatatatatatatggggcaaaacgtgatgttttgatctatgtttggtatgaaataattaaagcaggctaattctattcctcacatatttatcatttttttgtggtgaaaatatttaaaatctactctttcagcagttttgaaatccacaatatattattatttattatagtcagcattccatgcaattgattactaaagcttattccttatgtctaactgaaactttctacgctttgatcaacatttccccttttcccaaccacccttctcccccagcctctggtaaccatcattctactctccccttcgatgaattcagtatttttagattccacatataagtgatatcatgtagtatttgtctttctgtgcctggcttatttcacttagcataatgttttccaggttcacccatgttgttgcaaataataggatttctcccttttttaaggctgaataatattccatattcattgtgtgtatgtacttacattttctttatccattcacctgatgatagacatctaggttgcttccatatcctagctattataaataatgctgcaatgtacatgagagttcagatatttcttcagcacactgatttcaatttctttggatatatacccagaagtgagattgctggatcatatggcaattctatgtttggttttctgaggaacttccatactgtttttccrtaatggttgtattagtttacattcccactaacaatgccaaggtttcctttggccaatgtggtatatataatatcctcaccaacacttgttatcttttgtctttttcattaatagccattctaacaggtgcaaggtgatatctcattgtggttttaatttgcatttctccgatgattaattataatgagaattttttcatgtatgtgttaaccattggtatatcttctttcaaaagagtctgtttagcttctttgcttatttttgattgaattatttgccttcttgatattgagttgcttgagttccttatatattttgaatattagcatcttatctgatgtatggtttacaaatattttctcctaatccgtgggttgtctcttcactccatcagttgtatcctttgttgtgccaaatctttttagtttgatgcaatctcatttgtctattttttcttttgctgcctgtagttttggggtcatattcaagaaatctttgcccagaccaatgtcgtggagcatttccccgatgttttcttttggtagttttatagtgtcaggtattatgtctaaatacttaatacatttcaagttgatttttaatacagtgtgaaaaaagtttcaattttattctgcggtggacgtcctgtttcccaacaccatttattgaagaaattgttatttctccattgtgtattcttggcaactttgatgaaaatcaattaaccataaatatgtgagtttatttctaggcttcctatcccattccattggtcagtgattctgtttttaatgccagtgccattcgattttcattacaatagctttggaatagattttgtgacatgaggtattgtgatgcctccagctttgttttgtttttttgttgtcgttgttgttgttgttcaagattgctttggctattcaaggtcttttgcaattccatacaaatttcagtattttttaaaatttttgtgaagaatgacattggaattttaatagggaatgccttgtatctgtagatcactttgggtagtgtagacatattaacaatactaactattccaaaccatgaacagacaaaacttatttgtgttgtcctcaaattctttcataaatattttatacttctcaacaaacagatctttcaactccttggataaatttattcctatgtattttttcaagctattgtgaatgaaattgatttcttaatttttttatagataattttattgttaaagtaaagaaacactactgattttttgtgttaattttgtgccctacaactttatgaaattagtttatcagttctaacaatgttttggtggagcctttagaattttctctatatatgatcatgtcatccacaaacaaacaatttcgcttttcttttttaaatttctttttcttgtccaatttttctggctagaacttccagtactatgttgaatggaagtggtgagagtgagcacccttgttttgttcctgatcttacagggaaagctttcaacttttttttttttttgagatggagttttgctcttgttgcccagcctggaatgcaatggtgtgatcttagctcaccgcaacctccacctcctggcttcaagcaatcatcctgcctcagcctcccaggtagctgggattatgggcatgcgccaccacgcctggctaatttttgtatttttagtagagacggggtttctccatgttggtcaggctggtctcaaactcctgacctcaggtgatccacccaccttggcttcccaaagtgctgggattacaggcatgagccaccgcacccagccaagctttcaactttttatgattgagtaccatgttaactgtaggtttttcatatatatcctttattgtactgagatatattccttctatacctaatttgctgagagtttttatcatcaaaagatgttgaattttgttatattcactttctgcatttctcaagatgatcatatgtttttgtccttcattctgttagtataatgtatcacatttattgatttgcatatgttgaactatttttgcatcccagggataaatcccacttgattatagtatactaaccttttaatgtgctgctgaatttggtttgctagtttgaagattcttgcatctatgttcatcgtagacattggcctgtaattttctttccttgtagtgtccttgtctggctttggtatcaggggaatactggcctcagataattagttgggaagtattttttcttctattttttggaaggattggtattatttctttaaatatttggtggtagaattctgctgtgaaaccatctggttctgggcttttgtttgatgggaggttttttttaaattattgactcaatcatctcacttgttaatctattccaattttctatttcttcttgatttagtattggtagattgtatgtttttaggaatgtatccatttcttctaggttatccaattggttggcatacaattaattgttcatggtagtttcttataatcatttgtatttttgtgatatcagttgtaatgtctcctttttcaagttctgatactgagttttctctcattttttcttagtctagttaaaggtttgttgattttgtttmacttttcaaagaatcatctcttagttccatcgatcttttctattgtcttctctcaatttcatttatttctgctctgatttttattatttcttttcttctactgattttaggtttaattttttctttttttctagttccttcaggtgtaaggaagtaagttgtttatttgagatcttccttctttttcaatgtaggcatttattgctgtaaactttcttcttagaactgcttttgctgcctcccatgagttttgatacattgtgcttctattttcatttgtctcaaaatgctttttatttctctttgaatttcttctttaacccattggttattcaggagcatattgcttaattcctgtgtatttgtgagttttctaaaagttcttttgtaactggtttctagtttcactcaattgtggctaggtaatatacttgatatgattttaatattcttaaatttgctaagacttgttttgctcactaacatatcatctattctggagaatgttctgtgcttgagaagaatgtgtattttgttgctctgggatagaatattttatatacatatatgttaggtctatttggtctaaggtgttgttcaggtactctgttttcttattgattttctgtgttgatgacctatacattgttgawagtggattatggaagtctgctactatcattgtgttgcagtctatctcacccttcagatctatgaatacttccttcatgtattyaggtgttttgatgttggatgcatatatttttaaaattgttatatcctcttgatgtattgacctctatcataatataaagaccttctttatctctttatacggtgttttacttaaagtcgactttttctaatataagcatagccacccctgctctattttagataccatttgcctggaatatctttttacaatccttactctcagtcttagtatgtttttcaggctacagtgggtctcttctaggtatcatattgttggatcttggtttttattttatccattcatctactccatttctttttattggagaatttaatccattacatttaaagtaattattgataggtaaggacttctggtattttgttaatattttactgactgttatgtagttcttttgttcttctcttccaattttgtcgtccttatttgtaatttcttgtattttcttgtagtggcatgctttgatttctttatctttagtgtgtccatcagaggttctttcttttctttctttcttactttctttctttctttgtttctttctttcttctttctttctctcttttttgtttttttgagacagagtctcactctgtcacccaggctagagtgcagtggtgtgaccttggctcactgcaacctccacctcccaggttcaagcaattctcatgcctcagccacccaagtagctgggattacaggcatgtaccactatgcccggctaatttgggagtgagggaggcttgttgttgttgttgtttgtgtttttttgagatggagtcttgctctgttgctcaggctgaagtgcagtggcacratctcggctcactrcaacctccgcctcccaggttcaagccattgtcctgcttcagcctcccgagtaactgggattacaggcgcccgcctccatgtctggctaatttttgtatttttagtagagattagggtttcaccatgttggccaggctagtatcgaacttctgacctcattatccgcctgccttggcctcccaaagtgctgggattataggcgtgagccactgcgcctggcctaatttttgtatttttagtggagacaggatttcgccatgttggccaggctggtcttgaactcctggcctctggtgatccacccgcctaggctttccaaagtgctgggattacaggcatgagccaagaggtttttttcttcattgttgtcatgaggattatacaaaatatcttataattataatatcctaatttaagctgatagtaccttagcttcaatcacatgcaaagactctaaacttttacttctctcccttacattttatactattgatgccatttatctctattttattgtgtatctattaatcagaagtttatcactgtttttcatgcatttgtctctttaactcttatcctagagttaagagggatttacacaataccttcacagtattggagtattctaaattttatatgtatttacctttactagtgagttttatgctttcatatattttcatattgctacctattcttttgctttaactcaaaaaactttctttagcatttcttgtaagggcggactcatggtgatgaactccttccacttttgtttgtcttggaatttctttgtctctccttcacttctgagggatagatttgctaggtatagcattcttggttggcattgtttttcttttagcactttgaatatgtcattccactccctctggcttgcaaggtttctgatgaaaaatctggatagctttatggtggatattttatacgtaatgaatttcttctcctttgctactttcaagattatctgtctttgacttttgacaatttgattataatgtatctcagagtgttattttcttaatttatcttgtttggggtcctttgagcttaccgartctgtatgtatatgtccctcccaagattttgaagcttttccaataggatttcttttattatcattattatttaaatattctttcattatttgtttgtaattttttgctatgtttcctgtgctggtcttgaactcctagcctcaagcaatcttcccacctgagcatcccaaattcctgggattacaggtgtgagccgtcacacctggcctctcaggcagtatttctttaaataagttttccgtcccttttcctcactcttcttctttgagtaatctcataatttgtatactcaaatgtttgatggtgttgggtagatcccttatgctttcttcactctttttcaatgttttccttttctttttattcctctaatgggttaattccaagtgacctgtacttgagttcactaattcttcttttttttgagacagagtcttgctctgtcacccaggctggagtgcagtggctcgatcttggcttactgcaagctctgcctcctgggttcaygccattctcctgcctcagcatctcgagtagctgtggctacaggcgcccgccaccacacccaactaattttttgtattttttagtagagacggggtttcaccatgttagccaggatggtctcgatctcctgaccttatgatccacctgcctcggcctcccaaagtgctgggattacaggcatgagccaccgtgcctggccgagttcactaattctttcttctgcataagcaagtctgttgttgaaactctgaattgaatttttcagttcttaattaaattattttgctccaggatttctatttggttcttcttatattttctatttctttattaaacctttcaacctttccctttgttcatgaattatttttctaattttatttaattgtctatagtttcttgcatctctctttttttttttttttttttttcttgagatagggtctcagtctgtcacccaggttggagtgcagtggctcaatcgaggatcactgcagccttgaactttcaggttcaaatgatcctcccacctcagcctcccaggtagttaggattacaggcaccactataccaggctaatttttgtagtttttgtagagatggggtctccctatgttgctcaggctggtttcaatctcctgggctcaagttatcctcccatctcagcctcccaaagtgctgggattacaggcattagccactgcatccagcctcattgagcttctttaagatgattgttttgaattatttttcaaacaatgtgtgtatatccatttctttggggtctgttattgaagctttatgaagttcctttggtggtgttgtatatgtctgattctttgatatccatgtatctttgcactggtgtctgtgcaatcaaagtgaactcttctttcagtttttacagactagttttggcaagttaaatttgttttctgttatgtctctgggctgatgagattgcctctgggatagtggttgagttgggttgggcctgagtcacatgactgatgctagttttatagtggagatcacagttggtaggtctgtcccctgggtggcctggactggctccaggagcttggtctttggggctggtgctaaggtgaggctccatttcaggattcacagccagtgggcctattaccaggtgtgctgatgggtgtagcttcctgcagacctctgggaagcstcccattggatgactggatggttctttactttactgccctagtctatggctgaggtaggctgtaactaaattgcaaggctcccacaaggagacttttgtccgtgaatgggtgcagaattctagctgttattagggaatatgagtgagtgaactcctattttgccgtcttactgatgtcacgtcctgacaayaaaataaagttctattgtttaaaccacccagtttgtggcactttgttatggcagatttagcaaactaatacaagagctttcaagggaatactaccaaacatgatcttcagcaaaccttcacatggagtagcagaggtccttccagttatgttgtcctatcctctctccaccttgctggctctttctcaccatctcccctacccatccctccatgattctgtmatttttctcctgcctccctctcaagagaaaagcaaaatttctcttataacaggcataaagttgttgctcccatttgaaacagcttatcaaattttatttttaagtacatatttataggattataatataaatgcacagatatcaaggtaccacctgatgaagcccaggcttactgctgaggtttccttcttttccttyctccttacaggccccagacactcagtttgctactgatgctcttcagaactgctactacycaaaccttgagtttctcctttcatccagagaggcctttaaaaattttaatcacccaatgaaagcaggcagaaaacatcaaaaagataaatgtgagagattaacaaaaattaaggtgtctttcagttgtttttctcagcctctggctccatgttgacatggaaacagaaaatgcctttggatttttgtcctctccttttattcctgagggtggctctcatatcatactcttcatagaagggcatgatgacccttctcccataaaagttctttgcttcagcagagggattgcaaggtaattagagcagaaaaatgggtgccccatgggtagagttacatggacacacatatagaccttgagagttagcgtgcaaggtgaaaattgcatagaattcaaaatagcatggaaactcttttataaaggtatcatgttggaaattgaaataccattttcattaagtccaagccaacagttacaaactgtacagaagtaaaacacaagatgaaacaactggcttgtaggggtcatgttgtgtaaacattgttctgtctttttttattctagaatcacattcagcatggcaagtagtttgcactgaaactgactgagggaacaaaagatttatgtctcctatctgataatcagaagcatatcttcattaaatagagtggttagaagattttcccataatatttaaatggttgttctccctctctaaccctaagtgtatatgactgaatttgcttcatactgaacctttactatgtgattcagckgcatttttatcatcttaagacctaactagaatttctctttaggtaaaaacctttatgtggaaattttttttttttttttgagatggagtcttgctctgtcacccaggctggagtgcagtggcgcgatcttggctcactgcaagctccgcctcctgggttcacgccattctcctgcttcagcctcccgagtcgctgggactacaggcaccggccaccacgcccagctaagtttttgtgtttttagtagagacagggtttcaccatgttagccaggatggtcttgatctcctgaccttgtgatccacctgcctcggcctcccaaagtgctgggattacaggcgtgagccaccgcgcctggccattatgtggattttttaagagaaacaactgactttactttcagctgtgtcagttgcatcagactaatttacaacagaccaaacctcctactaacaaacaaacaacagaaaagcttaattttaagaatggttgaaagcattagagtgttaccaatggaagccaggacttgaggggccaagtaaggtgtctgagagaaaaggaaactcactgaggtgagcctagcctgacattctatgctcctttccttctcaaggaatttgctggcttataatcagtttaggatgagacattaaaatgccaagcagaaagtggtggctaagcagaggtttgggcataattggagcttagggttaccaaaggagagagggattaagagagaaggcagcacaaagaagtgagtataataataggagatatttttcttctcaaaacatttatctatgcataagtagcacgtagtcaggctgctaaaccaagcagaaagcatttgataagaagctggcttaagcagagcttccacaatctcaccatgctgagcaggaggtaatctagaaaacacctaggctttcacttgccaaatcaagagctattcccaatcatagggacaaatcagaaatagacctagttttacaaatactgaactgcagccttgagtcagtccaatccctgatttggctgtaaactgacacttggttgctgttgcccactgaaccctggttataaaaatcagcaaaggtggccaggcgcagtggctcatgcctgtaattgcagcactttgggaagccgaggtgggtggatcatgaggtcaggagttcaagaccagcctggccaacatggtgaaaccccgtctctattaaagataaaaaaaattaaccaggcatggcagcgtgcacctgtaatcccagcaactccggaggctgaggcaggagaatcgcttcaacccrggaggcagaagttgcagtgagccaagatcgcaccactgcactccagcctgggtgacagggcgagactctatctcaaaaaaaaaaaaaaaaaaaaaaaaaaaaaaatcggcagaggctctaacacagttcacaaagacagccctttgcaggaactctagaagacctgatatgctccccacaaagttcagtcatttaatgagacatgttgacatcacttgttcatgtgtttggcatggctctgagtgcaggtacacaaagggttgttaagatgtctttgtcctcaaaacactcatcatctacagtgagagagactgacaagtagagagctgatggcactgagtgtgacaagtgctatgaaagaattaaaaggatgtcccaggagsttagtagaggcacacctaatctattcttgatgtgggggtaggtgaagccaaagtgggcttcccagaggaagggacacttcagctgagcccaaagggctattagtgttttcccagatgaaaagatgaaaggtatcaggcagaggaaatagcatatgcaaagagagaaagagagagcatggattgtctaaaaaacagcaaatacttctgtttgataaatgtgcaaatwaccacagagagtgacaggggccagatcatgaagkgtttcttgtatcacaagttaaggggatctccaagccatgcccggtakctttaaccatctatttgaaatgatacatttaccaagggcaatggtgctcagaacctcattgtttggttccttctggaaacactggttatctcacatgatgaactctaattgtcaggcatgcatgtcttcgttgaataaagaggctagtattgcaatatatattgcatattataatggcttgattagtgaagagaacttgaaaaggggacagatatgagagatatttgggcgttagacctgtcttactggccttgatgaatgtgagacagagaggagttaagtatgactcctgggcttctagcttgggcaattgaactaattttcttatgacaaataattatagtcttktgccttgtctatctaccttccaaggtgtaagcttcttaggtgaagcaattcagaaccgcaagaatttactgaatactttctacatgtcaggcatttattatctcattcattctttacaacacgacaaagacgtgaatactgttactttttaccacttggcttcttatctaaaactacactaaataccataacttgcaaatgggtgagttagaatttgagttcagtgtatcttaccttagatcctggaatcttattattaggcttttctaggagacagtgcttggatttgaacttaagtctcctttgaatcagttcttaaatctacccaattggtgtggctcataaagatggccccataagctgtggaactaatggatatttctaggtccgtttacactgacagccctagattctgtatggacagaatctgttctagcggttaagatcagcccagctctgtgaatgaaactccaggggcatggccattttcttagcctcctcttccttactggccccattctgggaggctgagaaacacgggctcttcccagctgtttagtgcttctgctgagcagccaaacttgcattgaagaaacaattggtgccttctgggatttcaggtgtttctggaaaagcaaactgcaccatccagggtgggagagttctgatttgaattttctgtttggctattgtcagaagtggtcagggaactaattacagtggagcttccattacatctttcttcctctaaagagaagacatggaaatgctaccttgcatagctctctgagagtaaagcagcacccytcactctctatccctaaaatgtcagtcagtgcgttttcatcagcacatccccrtgacccttgtgggttacttcctgcaaatggtctgcagactccacctggattcattccctggctctcaaggcccaaataaggcagtggacatactactatattaataattgtgagcataattatagttcagaatttgcaaaacactttcacctgaattatctcatttaatcttcacaacaggcccgtgagaagagcaggggaggtatagtcatttcccttgttttacggcagaggaaactgaagataaagctatgaagtgaagctggctagtggctgcctcagggttactactgatatcactggaccccttcagaaccaagcatgaatgaaggtaggacatgctgactcagtcaggctatggggctccaagcccagggggccagtgggtggggtgattctcagagaggagtggggagctgagtgtttgggagggagctgggctgagaggcccagactatgggggattcattggaaagggagaaattctgagccttttcctttcttttggtgcctagggctcatgttaagagctacctgggggctgcctgaatctgtctgcacatgcctaccccattcttttctgcatgacagagggccaaggatgttaaatcatagctattgggacaggtctagattcctccaagttagcctaaaagaggggtgttagtcatccttcagtaccatgctgaaaggccactcttcaatacagcctccaaggaggggactgaaaatgggtacctccctgtcgctgtcacccttaggagcttttcacatggagttagaatagagcctaatggaagtgggcaacttgaagcacattcttcccaggtaatgattgctctcctccttatgcacatttgtttgtatagagcttatatgtccttttgaaagatgcatgttcctatctcccagctccctaccctgggccccaaagctctttgtgggatctgaatctctattaaagctagctttcattaccttggattaagtcccatgcccctgagcctgtctctttttattcccagtattccactaaatggaaagaaggcaggaaggaaaggaaaaactgaaggagtgaggccccctcgtcaattatattactttggtctacaaggagcagcaatatagctttaggtttaagaaacctggcattgaatttagttctgtgattgtaaacaagtatttccacattttttagtttggtttccttggctatagaatggagatattaataccttccctgcctgactcataaaaatgttgccaagatcacataagataaaacaacgctaagtgccttgttgtaagcctaggacagccttgtggctgggactttctctatcagtagttcttaacaggagggctgcaacaccagccctggttttggcatagccgttggaaagacagaaatgaagcagtggattggtgktcctcaattcaggaagactggcaggcccagggcatcacgatagaggaaagccttgcttgcaaatccatctcccactgtttcagctttgctctcagccatgagctttttatacaaagagctgtcacatttatggtcttgctgagcttcacctcagttctaggaggagaaacctttcactgacaggagctacacaggaatacaggaactaagggacaggacctgggactacaccccatgcctcctgaggcccatgcctgcmctctttctctgtatcagccaccctgttggagagggaagttttrgtctggggatagagaaaggaagggtgatattactttggagaatgggtcacttcagagaggataggtatagagtgagggagcttcaggaggactgtctaagaaccacagcctaggatgaggatcctggggcctgagtaagaagtaggagagaaagtggagagagccatttattccttcattctgggagcccttccagacaagtgagagctaaaatgatcagacccagactgataactcgggctagagtcgctcagagagtgaggtaaggataaggtagggatgaggctgctgttggaccaacccacagagattgtcagaggcatcagggtgagtctgagataataatcaaagccaggcagatgagcaaccagtttattaacccaaagggackggtcagaggaaaatgtggtttcaaggccttgggactgacactggggactccagagcagggtgagagggttttaaaggctggagctggcaagggggaggcagtctggggaaaccccctaagttaggggttgaatgctgaaaagaaggctggagaagtgagaagtcagacaaaaagagaaagggcatgcctgggttttccttttagaaaggccactctagctgcactatggaggataatgatggggtaaaaggggcaggagaaggctgaaggaggctgctgaaggcctcattcagtgacagtggagacagagaaatgagagacatgaaagaggcagaatccactggatttagtaataattttgagacagagtagggactcctcttaaaggcctgctgtccccagctctaagcatggaaataaaggaaaatcttgggttcattcaggggaaattccaggtacccargtagtcctgagaagtaaatgagcaacttgataagctagaaggtaataatagcttaaaacacgagccaaggaagttagagtcacgagatgttccctctacaaactaaagatgactcaacttatgtccgtgagctgttttgcagaaccccaggcccccatcaaatagacccactgccacataggcctcagataagggagggctgagaactgaactctgacctctgttctttgctctaaatttcttcctgagggacctggaggtaaggctatgcccctgagcaagaaccaacgttcttttctgacctcacatttttagacaaagctttgtctcctaagccaattgcaaattagaaaatctttgaatctacctatgacctataagcccctgctttgagatgttccacctttttaggttaaaccaatggatagcctctgtgtattgatatatgactgcctgtaatctcttcctccccacctttaaaagcccttacttgcaagccatcagggaggatgagtcttaagcatgagctgcccagttctccttgcttggtgccctgaaaataaatgccttcctttctcctgctgcaaacttctgtatggatgtttagccttactgcactgggcaagtggaccctagctgggttctgcaacaatttgaatgggagatgatttgtgaaggagatgtcaagaatgacttccagatttgctgacttaagagactagaaaacttaattcaggccctcactttgccattattttcaaacttttagaccataagctgcttttaggcctcagtttctacttctcaggataggaaagatgatgtagagtagtagtgttccaatgatggtcatggggccatcctgcaggtgtggctgggcctcagggaaagagccccagagaggagtcagaagatccagctcacatcttgacccagcctgtaatgtcaggagggcacagtatttctgagcctaggtcttcatttgtataaatggagataattattcatttattcaagaaatacacatttggggccaaagataaaaggaaggaaatatggtctgtgccatctggagtgcacagctaaggaggagaagcaggcctacaaaccaatagttataaaggagctgagtaagtgccagaatgatgtaaactaaacaaatggaggcagtccaaaggaaggagggaccaaatgcaagagctgcatctagagataggacaaggggtaaccaggaagattgagggaaaggtactgtggcctgagaactaggctgagccctcccttgctggacccctgtcttttgattgcccttccttgatcctaacctctctctcctgtcatctaaatagcaatcctttttcccacctgcaagtgaggctctgagggattcttcagaaatcaagactttgacccactccatattatgaatgcctcagcctacaaagagcttgcctaacccaacatcaaggggtggacacgtgatgctggacttccaggtaccagaaacaggccttactccaccttctatgagcatatgcctacacaggtaggctgggtattgcattttctgaagagcagatactgtatttaattcatagttgtatccccagtgccttatggcaagcctgccatgtgtttgtgactaataattgtgtggtgaatgaatcaagttccataaagtctttaaatttcaaagggttattggctcctttctcagccttcaggcaggattgtatcttaatcaccacacctggcagctgttcaggctccctgaacaggtggcacccacctgagaaataggcagagcgaacacaacactttctataatttaactttcattcactagacaagtacgcattgagaagctcctctgtgccagtctctgaacacatagatgacatcaagaacattacagcctaattgggggacagatattrcrttcataattgccacacagtggaggcccaagggggagggaattggttctgctacagggatcttgcttgggagatgcttgagctgtatcttaaaaaatgagtaagagttcaacagttggataggatgacagggttaggggagagcaggggacctgggataagggaatttaaggcaagagatgtcyatgtgtattgtgtttacagcagtgctattcaaagtccagatccacaatgagatgaggaatttgccccagcattacatccttaaatgagaaagtcttactataaaaatactgtcacctgaactaaagtatgtttgtgactattgatttgcattctggcccaggcccttctgtgaattggaaacattgtttgtgaacaggcagcagatctggagactacatcactgctttatagttaaccaagtgcttttcacacaagttcaagctcttttgcccctcaaaaaaaatcctctgaagttgtcagggcaggtatcataatcctcactttacaggttggatattgaaactcagagaggttaaggttcacatcaccccactggtgagcagggaggctgagatttaaagccaggagtgctctcccagccctttattcttctccttcmtcaatggcttaggaagaaaatgagactgacttgagtaatgacttcatggccagcatggccctagcaacaaatgtcagagtgtggggcataagtgtgtcatgcatgtgacctcccatggtatttctcatgttcctccgtctcatattgctgtcatgtcttaaatagagacaggatgacttttcctttctagccacccactctggagtcgcctccacctgccctcccaggggagcttcctccagcacagcctgtgcttgatatttcactacctgaaaggacttggcattggtcccatgcaaggagactgtctcatgcattcacagagacagcaggcatctactcaaaataggcttaccgttccacgaatgccattctggggtatgctgctcttatcctggtaggtggggccatgatgctgttctgagctgtcctatctattcccttggagtacagcttcctgagcacagccttttttttttccatgcaaagaagccaaaagcaaatggagacaactacagggaaggtcacatgggccgagagagatgggagccttccaaccaaaagaatcataaatcttcagttatgatctggcygtttctctaagcagcaagctagtggggaaaactcaaggggcctgygcctgtgattcccatggccctctgacagtgggcacattctacaaaacttgagtgagctgcagatggtcaatggctctaacagctggcctcctggaatgaagccatgctgcccatcaatgtcctggaggggttcctacctggacaggggctcagccagggtttctcacacctgcagaccctcagctggraagtaatcagaatcttcagccttttaaaagctaagtcttagaaaaagcaatatagactcacactgccaaggaggattaaagaaaactactggagagattcttgctatatgtgtcttccttcaccttggcctggagtcacatattctgaagtagtgccataatgaggaaagagaaagagcactggctggcagtcagaaggctatcctggcctcagtgccaaatctcctttggcccagggaaaatccgttaacctttctgggcctctgttttctgccatataaaatggggtactgtcctagctaccccgggaatgggagatgatcccaaccaatgcccaaaggctttgatgagacatcagacttcagctggccatatctttggccacagtatctgccatattatttacctgtctattctgtatacctatatctattttcccaatatacttctcctctgattattactctctctctgttctttagaaaaaccctttaagatcttcccttgctatcttcattccactgtgagcagcttgaagtcaggaccctccycttatttttgttcatagaacctagcatagtacctacctgacccaataagtgtccattgaataagagattgatattttccacaaacagaacatgactccgaaataattttttatatttaacaagcaagtatatcaatttactatgcaccaggcattattcttagcattaaacacatattaacacatttartagtgtcacgggatccttggggtgtcgctttgccagctggaaacctctgtggctggtggcgccttctgcctgagtattgcttgcaccractgggttcgttccacccactcagcctggcaggctgtgcttggctcacgctctcagccctgatcccacacctgccaagggcaagccaggtgcagagtggcaaggggtgcgtgggcaagtgagtgtggggtctggccactgtgcacatccaggcgtgctgactgctgtggcagagcaggcagctccagatgctggcacaggtgctgkctccatgtgagactccarctggaccagatgtaccacatgcagcttccactgcgggcacccatttctgaatgaagggaacayagtggtgcctggaatcttggagacaccagggactgcagagccccaaagagggtgtcatagccctggctcagggagcccctagttctgagctccgtgaagggctgcaactcttctctccttttcattgcctgcaatgtggtcagccrgggggagtgtttcagccccgtttgtgttatagctccttcagtcctgccatttggcaggtcctgatttcttgtcccacatccaggaagaatgaggtatacatacaactggagagtgagcaaggcaaagagaagcttcactgagtaacagaacaggtctcaggagacatgcagtgggtagctcctttctgcaggtcgtcctgactagcgtccagctctcagccgaaaagagacctgcagtggttagctcctatctgcaggcaggtcatcccaacatctctgtgagtctggctgagtctggggtttttgtgggcttctgaagggagcaagtgcatgctaacatatccataggtagccataagtgggcctagataaagcatcataagttctcactcccagccacgaactccaccaggaactggcagcccagccctcatgtttcaggtcatcccttgcttgaaggtgggacatcacatgtggcatgcccctttctgcccaggagcctgtctgcctcctgttgccaacaayatgttgtccacagcrcacaggctgtttgtgctgaggggttcctgcaggcctgctccgagctaccctcagccctgcctttggcctcccttccatgatcattggtgcccaaagtctagagggggccaaggcagcaggggactggcatgtcagtgctgccctgagcatgtgcacacccagctgagtcataatagcaactggcctcagccacaactttgctctgaaatcggagcaggcactgggagcaggaagaggccaggcagcagragcaggcacttccaagcctgtgggggttgaggkgggttgccaggcccctgagagcacagagatgcccagtctgcagccatggctgggtggctgcagctgygcccagcagggtggggctcccacccagccaactccaaaggggaacrgggctcccacctgttcctagctcccgtgggctctatagagcatgtagcccctgctgtgcctcccctgctgcagccagcatcttcacagcagccactccagatgggccaccactgccatcagtagccatcattgttatacctgttttgtatattaacatttatgtctaataattccaataactggctcctctattggtctgtttctcttgtctatttttctcgttttcatcctttcttcttgatctctagtatatctgatgatctgaagttgaaygcsagtaattttgcatgaaaatggtggaggcctttcaaggctctggatgatatgtttttccagagaggatttrcttctgcttctgaaggcaatccagatcgagacaagtcagttaatcaactccrtaattgaaccgatttgaatctgtgctttagtctttgtgatgtccagcctgtttccaattcatcattgctcctggagtgttgaccttccatgtgtttaccagtgtccctccaccttggtgggctcttaatcccaatttttaacttccaaaaaatgaccactgaaagctttgcttagcttctcagctctttagccaccattttctgcccagtttttgggtctcttggctgcctcttagaagtcagaaaataccttgaggggtgtatcagtctgttcttgcactgctataaagaactacctgagactgggtaatttatttttaaaaaagatgtttaactggctcwcagttctgtgggctgtaccggcttctgcttctggggaggcctcaggaaacttacaatcatgttgaaaggtgaaggggaagcaagcacgtcttcaatggcagagcaggagagagagagtgaagtgggaagtgctacacactttaaaataaccagatctcatcagaactcactcataatcacaagaagagcaagggggaaatccacccccatgatccaatcatctcccaccaggcccctccccaagattgaggatgtcaattcaacaygagatttgggtggggacagagccaaaccatatcaagggggaaaactggttccaaatgttggggtaacattttytttctctytgggattttgacaattccggtcatcactgccttcctgccaatacacttaaaaataatatttatctatatattattttaaaggtatgtatatttaatttwaaaacatatatacatrcaaataataygtatatattattttaaaggcatgtatattatatgtgtgtgcatattatatatatatacacacacacmtagttttatagttctcagcaacatggttattttaattcaagctagtccacgagagttggaaaataaaatacttatttttattttatatacaaagaaactgaatcataggaatgttaaataacttccctagttactatgttttaagtgaaacatttacatatttattcaaaaatatttactaagcaccatccatgtattaaacactgctgtgggcattgtggatgcacaaattaataagccagcccttgtcttccaggatctcagggttgagtggaatcaactcataattcagtgcagtcagtgcaactactgaggaaggggcagttgctcaggagctcaggtgagggatctggcctgggtttatcatgctcacctagacttctttctctacataaatatctcccctaggacacagtgaatttcttgaggtcatagtgtgggtcattcatttctccattcccaatgcccaacatggcgcctggaacaaagcgagggctccataaatacctgttgagttgcattcattctcaaacagggaagaagaaaacaaggatagcatgaaggctgtaagataatggatagtaccttagttgccagtcaggaatacctagtccaccttcttcccagtaacttgtgtgaacagggcaagtcaccttccctgtctgggcccattttctcacctggagactggggaggttggactggataatacctaagatcccttccagctctgtgtccctgtagctaagtgtgacccaactgatgaagatgaatggccgtagcctaacccagtgtgtccccgtgtgccctctccaggctgcagttgtggtcagatggtcttttagacaaaactagggtggctgttcctaggtctatctctcttattttttactgtggaaaaatgtagagtgaaaagcttttctctgataaatgccaggaattctgcacaggagaggcctgcttaagggaggaggagtatgaggagacattttctacgtcctcttcccctgggctggctccagcctgcctactctgtctctcacttttcccagcacagaatttactttcctgtttgagaaaacagtgctgtgtcaatggcaagcgcgatgcttagggaggaagccaattccctctgctagtttggctaagtggcatttctctgtctgggaaatggggttgcccaggtctcacaaaggcatctccagaaacgagtggacacagatttacactcagctgattagtggggtgacctgcacccccattacccctgagaaagagtatttgcctccaaaaggctctgtgaaagcagagaagtattggcactagagcagcaggggaggcttagaggttcagccagctcaccccatctcatggatgaaaacctgggccctgagtgggttagtggctctcccaggtcacacagttgatttgcaaggtagagtatagagtttaatgttacaatgagacagctcagctggccccctgggtgggagctgggctttatttcattcttgaatcacatcatcagtttcagtctctgtctcatcacaggtgccatcagcctcccagcattgccaggcttgagttcccaccccagaccctgaagtctgctggggggaaatgactgggccagttatgtatttccaaacatacaactcccaaggtgggaggagggagaggaggcaaccagggttgcttttgtggattatgcagttactgacctaaatttcatgttgccagggggctgggggccggggggcgagaagaactgccacaggtaacactgacatgttggagaaagtgctgaggagatgaaatgctgactagggtctttgaaaatgttgtctgttttaattggatgtgtctcttcagaacccactggtggcaggcccatcacaggctccttttaatcagtggaatccacatttccccactacagctttgcacagaagagagagcaagggggcagaggccagggggaagatgtggttctaattggaaatatggtaatttgggaagaggattctatttcaaatagaattgccaggtttcttctgctttatgccttactgagtagatttttcgaaggagaaagaaactgttcatcttttggagcaagggcctggggtgatattctgacccattttattctcttcttctacaatgtacatatgtatatgctgtccttttccaaggtttccagtagcagagttcactgttcccccgtgcaaggggcagtacagagaggagacagacaggtacatccagcaagggcaggaaaggaagggccaagcasgagtgggagaagccaaaagactgggatctcataccaggggtcaggatagagaatctctgaccagrgtgaggctgggattgaccctcatgttcattcttcactcaacaaacattggtgggcagagctactcactgttaggacctggaactctcccattataagtcgtaagggcccccacgctacatgccaagctcatsttgggacaaatccaaacasttggggaggtcttaggactaacagaggtatctgaagcgtgtggagaccccaaccacagagtaccatcaaaaccctgtggcccacccaacaccataggcaggctctcagttaggtccactgacctagtctgcacaagctgctataacagaataccatagactgggtgctttgtaaacaacagaattttgtttttttcagttctggggtcaggaagtctaagatcaaggcactggctgatttagtgtctggagagggcctgcttcctggttcatagacggctgccttctggctgtgtcccaacactgtagaaggggaaggatgccctctggggcctcctggatatttatcctgttcatggggtatcacctcccaaaagctccaccccctaataccatcactcggaggggttagaatttcaacatatacattttggagggatataaacattcaatctatagcacccacatcctcaggacagcctcagaatcaatcaagattgagagataggtaggaagaagtaaaaagggagagcgctttgggttggtttgttacataacagtggatcaccaaaacagatggcaagccaatagaataagagtcagcaaatttttctgtaaagggcyaggtatattttgggttctgcaggtcaaatggtctctgtggcaatgactcaatttgccattatagtcaaaagcagccacagaccatacttaaacaaatgagcatggctgtgttgcaataaaactttatttatgaaaacacgtggcaggccagattcagtgcaccaattgtagttttcctgcctgcaatggagggtttgaagcagcagagtgatatgctctcgtttagacccagagagctctttctgacagccatgtggaggacggactaaaggaagtaagagctgaggtgaggctgttgtcaggtgagagatgatgatggctcagcctagagttttactagtagaagtggaatgatttaattgtaaatctatgttggaggtggcactgacaagattaccaagacagctaagcaaatagccaattgatgattgctttgagggaagtatgcaaaaggaagctatgggaacttagagaaggggtacccagattatggggattatgacaggctccctggaggaggcaactgctgaataggaaataaccaggggaaacacctggaaggataatctttcaggaaagcagagtagtagcagctcataatggctaaggttggaggagtccagagtgtcaaaaataagaggtaacagatggtaatgactctggagkgcgggcagatgtcagatcttgaaagttcaagaggccattccctgcaagattaaagatggarcagccagctaagagtcaccagtccttttccaggccttcttcccaaccattctttccaagactgccctaggacatcttcccactgtgagttttgaaactttcctcctacaaagggagctcagatgcgttatcaggagccctggctgccacacttgataggtatgggccatatcgcaggtcctgctgaccctgagtttcctcatcagtaaagtggcggtartaacaatctcacagagtcgttgggaagatcaaatgtgtatgaaaatgctttgcaaatgccacagaaatgcyagggtttgttaaggtgacaatgttgattattaaaacagcatcctgtgtctcctacaagtttattttgttgttttctcattttacgtcctcacaattctctcctgatgatttttctgagttatgagaagagctctttgttccttgctccaaagttctatggggatatggtcaccccgccccaccgctgggaagaaagctgttttggctttattcacttcccccaggatgcccaggaactagcgtggatgtttcccaagcagttttcaacttggccttgaagccattgctgcaggctggccggcccaaggagcaatcctccactactcctccccaccaccagcagagtcttcctcatcctgcactagcaattcctctcaaagaaagtgcttttccaagagacaggtaaatggccttgaagtgcttacccttcatctctctccctcttgttctgtttctctcctggcatttcagagagcttttcagaaggcctgtgtgcatgtggcatttcagttccgtggctcagtgcacagtgtggtttgacagcttacctgaggcaatttaaccctccatgttgctccataacctgcaggtgttccaggctcagcccagagacacagtcctcagctcagtgcagaccctcatccctgagtccatggcactacacagctcctgsgaagctgttcatgtagactttaatgtgagtgatgcctctcagggttgacaatgcacaacctgtgcagctgtccatgacagcactgctcactgtttcttaaccatgtgtttttatggttactatcagagctcagaatctgacctgttgaactgaccaagcctttagagcctggtaattcaacagccttaatagagcragcacaggctttgcatcagcctgacctacgtgctaatcccggaaccaggctaagaaacctaggcaatttctttttgcttgtgtggdaataatacttactatatggggttgttgtgaggacaaaatttcaaacatggagcttatgttacaaataaagagagtgaagccactgaggttgagggctggcttgaacatagtgttctgacaccaagyggcatgtgataggtactcaataaatgcttgatcaattgaggaagcacatcaataacaggccctcrggtggtgattctgtgggaattttattttacttgtgtaattgtgaatgttttccaaattccccaccatgagtgtgaattacttttataatcagaagttcaataagcattattaaataaatgcaagcaaaaaagcaagagacactagtaacaggcagagatgaatctgacagtatgaattacttatgaattaggaaactggaagtgatttggaatcctcctttgttgcactttggaacaagttcctattagtttccctccacatggctatttcttgccccaaaggagtccacagtctagaggaggaaagcctgaaaaatcaatctgtgtgataaagggagtcattgtgaaagctacagggacagaggaaaggctgccacctggcctggaaggctaggggctggtaggttagaaaaggccccacagaggcatggacaattaagccaagctgtgactcatgaccaggagttatcctrgtgaaggaggggcaggttactgtggggtcagcatggcacatgcagtggcagggagcttggctgtttgaactggacaagtcattaacctctcttggcctcaacattctcttctgtaaaatgaaagggttggaccagttctctggttctcaatcctgattacaagttacmatgatctggggcatttaaaaaaaaaaaacaccaaagcccaagccccaccttgtatcaatcaaatcagaagcactaggggtgggatctaggtgttggtatttttaaagggctccatgtggttataacgtacagccagaattgtggaccactggactagaagtttgctaagttgctttctgactgttcctctgacagcatgttttgaggttgagataaacatctttaactttttcactaatgcaaatttatcattataaaataatgctaaattatttaaattatttattataaaataaaccaaaagtaaattgatttctttaagccatttacaattaatgtgagagtggtagaakaaaacaacaatgacaaaaggattagaagagcaagacagaaatcttgtttctatatggaagttaactgctagtcagttattatatgaaaagaagatggaaacctgctcactcaggaacattcaccccaaactgctcacttcaaggttacataggtcttccaccaggaccagggactcggcagttcattgatcaaatgtagagacataagccatagtctccatcacagtaaccaggcctgcctcaaatgtgcacatggatagctaactggttatgttagtttactagggctgctgtaacaaagtcccacaaactgagtggttaaacacagaatttgttctctcttgcttctggaggcagaagtctagaatcaaggtctaaaagcaaatctaaaagcaaggctgtgctctctagaatggytctagcrgaggatcagttccgtgctttctcttagcttccagtgtagccagcgaggcttggcatcccttggcttgtggacacttcactcccatctctgcctctgtcaccacatggtgtttcccccatgtgtcttcacattgtcttccttctgtgtatatcggagtttgtgtctcttctcttcttataaggacgccagtcatatttgattaggacccaccctaatgacctcatcttaacttaattacatctgcaaagatcttatttccaatatggtcacgcttacaggtactgagggttaggtctcaacatatctttttggagggcatacctcaattcataactcyggcctacttaagcaatttggtgaaggccttgggcagttcagaaaatcatcaaaggaattgttgacctgaaatacctgatctttgaattgaccartgaagcaagatgatgaactgactaggcacattttcagttttcatagctgatagggtgattatttttatttatttactttttaaaagttctcttaaaaattatttcartagctttgggggtacaagtggttttttgcaagagtgattaaagaacaagaatgcaacaatgataacagaaatctgacccagcttggtatgtgaaaaatccagacttccaaggtggaaaaattataggaggattatttcccatatttacatatttactcccattattacagaggagtgctttgatttatgaaaatgtttttctgcttagtcatagaccaatatttagacatcactttatactttatacatcattttcatatatatccagataatcttctcaataaccctatgagttagataccatgaacccrttttacggaaggggtgaggaggctccttagaaatgggagaactggggctctgcacagcccagcacacagcaggagctctctttgccccccaaaccccctctcagggtcctttgaagagtaagctctcctcatgcrttctacattcatgaatttagggaatgttgatctgcagctttttggggaagatatttactgtgtaaaacaaaacttacctctgcttgtggccaactctaaagcactataaagaaaaattgggttatttttaagaaaagagaaaagggcttagaaatttttactcagatcttgatgaatttagtcttccatcaatagtcttggtgacagacaatatctgttgtcaccaccacctaatgctgttccctcgggtccccaggcaattactgactcctcccactatttaaagcagcagactggtgattttctattgacattcgaaagtaaaattggcatgaggtcagtttgttttctctgactaatttggaaagatgtcacatttgaaaaaaaatttcattaagaatgagctttccatttgggaaaccagtatcacaaaagagcctgtgacaatgatgctgttcttaawttatttctcacattttcttgcaccttactcacttcagtgaaggtattcataacacatatgatagaagtccagaatcatatacatgctttaaggaccagacttcacgacatcctgctgtaatgttagacaaatactttttgagtatccaatgtctcctaggtgggagacacacagtaaataaaacagagcaaaatccttgctgtctttagaagagaagagagacgataagcctactaaataaataatatatgatatatcagtaggcaaggatgtggggtgcaaaaatcacataggaccttataagttgatgtaaggactttggcttctactctgagaaatatggcgatttttaacaatggaggtcttaagaggtttttgaacaaagaagtgacatgatctatgttttgaaagcaccactttgactgctgttttgagaatagacagtagggtttgtgggtttgtgggtttgtggcaagtgttgaaaaaaagaaaatgaattaggatgtgcttgtatagtccaggagagacatgaggtttatttgatctagggtagcaatggtgaaaagtggctatattctacagagatgttgaagwtagagctaacagaatttcctggaagattggatgtgaagcataagggaaagaaaggagttaaggaagactccagggtttttgtctaagcaactggaaggatagagttgtcatcaactaagctgtacaaagctgaaaatgagrtttgaaggagaagatagaamgttggagacatttcacatttgagacgtctattagatcatctacatggatattgctgtttggagttcacggacattgtcagcatatagggaaaaattaagcctggagactgggataagacatcatcaaagaagaatatagagacagagagtagaccaagggaggccctaagtactctggcatgtagaggctggagagataaggaagaaccarcaaaggggaccgagaaagagactccagtgaggcgggaggagaaccaggcaaccacggtggcccagaaacacaaaagaaagaaatgggatccactctgcccaaagacgtggagtctgtggattgcttttcaartttagtgatgggaggccatagwagaataggttttcaacatttagggctgtgcctaaagatctgtgtccagaaaatttgtcatgagaccatcaagaattcctgaatttgcaaattcttctctaacaattttccccactgtttaatttattcaaaaccatttaaaagctaagagtaatcacattttaaaaatgtcttcatagtctttatcccttttcaccaacttccgaaatcaccagtgctacttgagttctcttattctctatttcattctgtcaggttagaatctgtgtttgagtcctaacttcacttgctagctgtataaatgtgggaaaatttcatctcttaagtgtcaatttccttacctctaaaaatgggaattgtaataagcactcatagcaattttgtgggggttaaatgagaagatatttgtgcagcgttaattaggtaacattgtaggggtaaaccaagtgtttcatccctccatgagattgctgcccacatgaccacaagcacagaggacaaatcacactgagaggcagatgctggatggttgactaagttccctcaacaactattgacsacttcctagaaacctacctcccagcagatgtaatccaaactggagtcctacaaaattaccaaatttttatatgtaatggatgttccatttgcttgataatatttggaatttaaacctgcaaatgctaataagggccaactacattggttatagtgagtgcatgaaggagcaggtagggaaaggaggggtgtagtaattaattctgcttgagtaggtcttcccagaagacccttagatttagtcttgatgacttaagaaagaaaaataaaactaaaaaaaagtattccaggtcaagggaacagtrtgtrcaaatgtacagtctttaaagaacatgttctttataggtaaacagttcagtaggaccagagtcaagggtcacagggtcaggggagggagtcggggagtgggtaatgagcacagaattgaagctggagaaggcagggatcacatcagtgaggtcccatgggttgtgctaagygggtgaatattttcctgratggaagtgactacagtctctgaatggctttatgtaggaagtggcwtggccaggtttatattttagtgctattgcttggacagccaaatggaagacagtctagagaggagagaacagtgggacgaaaggctgctgacatcatatccagttccttctgtttgacacatttcatttctctccaatctccagagatattatgcaaatattcttctattatatactttaaaaaattatcagttcaaatgttatcactctattatctatcatattgtttatgttcttcacagacaaccctgaaattatcctaagggatttcctttgccttcttcattagtattccagtgatatctccaagagttctaaataatggttgcaacttctccaaactcagcaactccaatctggagtagtagatgccacgatggatacctcccccctaccagcccccatcttctgcctatcactggggatccctgggtgagcacaggccatatgagctgagtactagattaargatcttccaattaagccttgcccatactctgaaccccaagaagtgtccttttgggggaccttgattttccctctggtataactaagaccctcaaaaggactctccttgggattcagagtataataattttgagataattcctcctaaaatgagcttgtgtgatgtaaacagcagccattttggagtttgtgtgccggctcagaggtctgccctactttctggcaccttcttttggttcttgagaggcaaagctgcttctccccacctgctcctgctgcctcttcctcagcacacagctgctgagagcaaacattcactgtccttggcctaataaatgacttgagtctctcgaccttctattgaaagtcaactcacttcattcacaccccagcattcttcctatcaaatctcatgcrtgttctagttcacttgtaattagcaaaatgtacgaccttctccagagacccccacagcctgtttacagtctcctcccagaggcctctcagaagctggcaatgttgttagtagccacttctcacacacttaaacttgctgagatttcaagcttctcaagactcctttctcccaagaatttcaatatttggtttcctttgaatatcttatggaagtgctaccttgattacttttccagttcccagaaccttccacaattacgtggagtaatagaatcaccaaactgacttctagcagtccttgtgtcttttctgcctctgggcrggacaataaaggcacaaagtatttttccaagaacaataggacacaatacctggcaaggcacaaaacgtgtatgcgcatggctgagaatggcctgggaacccatacaacataagcaattaatagagacaggcacacagtcttctctggggatctggggctgagccaaggaggaactgctgcacaattagtgcatttccaggtacgtttttttttttttaggagggaataagacaaagtttttttctttgtctttctcagaatactgtatctgaaaatacagaaaaagattatagataaagaccaacttctggctaatactaagactagccaattcatcttgatatttgccttaagttcttactaatgatcctagaaaaataagatgtagttgacaacaaatacagcaaagttaacatcattaaaaacaggatatttgtaaattttcaagtatgtgattagtagctggccttattgagccaaggtttggcgctaaccagagcgagagaccgaggagctgaacataaccaggctttctcgctgggcactcagactgtcttgctctttaaatatctaaagctcttgataaagcacatagaatttatccccattcaagtataaacaaatagcaacaacctaaaatatgtatctgtttttgaacaaggatcaaaactagctaaaagtagactcactgaataatggcaagggggaatttgggacagtgtgtcccatgcactgcaaatcaaaaataaatcatgaaaagttgcccgtggctctctcctgctgtgagccaggtaaggtgaggactgtttagagttccaaccgcttatgattccctgaacactgtttcacacttccctcatccttctgttgaaccctactgttctcacctcagacccacctcagacatttccctccctgtctccctgcacagttaatcaggcacccctcctctgtgtgacctctgatcctagaatacatctctactgctgtactctgcacgctatttcataatttgcttgttcacatgcctgctccctccattagcccacaagctctttaacaggagtttggaccctgcaagactggtacagggtaaatgttcagaaaatacctgtgatctttaatggaatcaaaaattggtagtgtcactggtagaaggtgtccaggttcttggcgcctcaaacaaagaattggacaaaacactcaaacagaacgaggaaagcaaaagcgggaatttattgagaataaaagtacacgccacagtgtgggagcgacccgagtgtagacgctcaagagccccacttacggaattttctggagtttcaatactctagaggtttcccattggttacttggcgaatgttctatgtaaatgaggagaacgaagtgcagtcagagtcattgactcggaatgcgccctactgtaaatggagaggatgttacttggtgtgtgatctatgtaaatggagaggatgaaagtgaagttacaaagtggaaatagcattaatggagaggaagaagttacaaagccattcacattcctgtcattgctgaggagctttcatttaattcagttctaggaagtcagcgtggattggcctcaagtaccctgcctgcatgccctattctcttgcctcatctcccccgtgaaagctgtgatccccataaatctttatgggaagcagagggaccaatggtctttcttctgtaactgcttcctgctgacttggggtgtagtccctacctattggggatcacacaactttcaccctgctctgtttagtgaaggtagggaagatccttgatggcctggggtggtgtcttcacctggagtggctggcacccttgtcacacagctcgatgatctctaggtgagaggaaatactttaggttaaaagatttaatgggaaccttggggtggatacttatgccatcaggaatatttgtcatagaaatgtattttttaaattctgtttaattattacaaaggaagtgatttttatctatttggaagaaggcaattaaactgcaaagataaaaatggctactattttccagcccacagtaactatgcaacaaagacaccaaagaaagttggtaggcatttacttatcttttggctatcttttaaacaggtacttcaggtcctccactggttcacaggtgtactggctgatgggaacttcaggttcctggtctggagcttctggtattgatggtttgatccttgaaagatgtatccagctatctaatactagtactttgaccacagaagacgtggccagtattactgaaaaaagtcccttctattggggttgtaattgttgggcaggtgatccctcattccatgttttaacaagtaccctatctcctggcctgattttgggttgctggttagttccaagtgtgaggagcctttgaattccaaactcttgtaaacccgctggaattgttctgggttgactaggtatttaattacaccaactctttctgggtcaataattaaatcattagttaagaatggccttctgtataacattttatatgggcttctgttaatttttgagctaggggtattacaaattcttaaaagggctgtgagcaataagctaacccaagtttctgatgtttcctgacatagtttagctagtgcttattttagagtttggttaaccctttccacttttccagaggattggggcctccaggctgaatgtaaatagtattttattccaagagccttagcaaccccttgagttatttgggagataaaggattagccattatcactttggagacyctgaggtaacccaaactggggaattatttcttttaagaggaccttagaacctcattagccttttctggggtaacctttgacccaacctaaaagtatctattagtattaacaaaagcttgtatcctctgcaagctggcatatggatgacgtctaactgccagtcttcccctggataagttcccctcctttggactggttttattagagggggcattttgwtgcctggattgttaaatgcacacagtgagcaggcttgacagacctgcttagccattgaagctgagttaaacccagtaaagaacttgtttaccatggccagagccrcatccctccccacatggaaagagtcatgcagggcttttataactctccactgggctgcctgagggagatatatttttggcyccatatgccaccaggatccttgtttttgtctcccttgctttttttattagctgttcttcctgtggtgtgtatttgggttctactggggaattgtagaaaggaagcagtgctaggatctgttgggattgcacgctgagggcttttgctttggcttccgtcagcctttccattcccttgtgctataggggttaagtccctttgatgccccctacaatgaatgatagctatggcctttggcaggtgtattgccttcaatagctgcagaatttcaggtccatgctctataggggagtgcttgctagtaagtaatcccctttctttcctgatggcggtatgagcatgaaccacaaggaatgcatatttagaatctgtatagatgttaagttttttcccttgtcccaacattaatgcttgagtaagatcaatgattttagccttttgtgctgatgtgccagggggcactggctgggcttcaataattgtgtcatgatttactgctgcatatccagctctgtgctccccattcgacaaagaactactgccgtctgtgagccggtcagcttcagaatctgggagagcctcatcttttaaatcaggctggctaacatatgtatgtgcaatgacctgctcacaggaatgatcaattattgggcctgtgggcagcaatgaagctggatttaaagtgttgcaggttttaagagttatatctggattgtctaggagcatgggctggtatttagttaacatttcccctgtcatccagatgtgtccctttatttctaagactaactttacctgatggagcgttagaacttccagtggttgccctagggtgattttagtggcttcctccactaacagcagtggctgctattgcccgcaggcaacttggccatcctgaggccactccgtccaacttttttgagaagtaggcggttggtctgggttctgatcctaatttctgggctagcactcccacagctatgcccctcttctctgctacatacaaggagaaggccttaattaggtctgggataccaagagcaggagcctgggtgagaacctgttttaacttggcaaaggctttcctcatttccggggtccattccattagctcattttcaggcccccttgttgcttcatataggggctttgctatgagcccaaaatttggtactcatattctccaaagcccggccatccccaaaaaggaacaaagctgctgcttggaggtgggtcagggtgggggctgggggtggtgcacgcggccaaaccacatatagcttgcactccttctggggatatttgccgggttccgggtgttaagacatatcctaaatagtggacccattggagggtaatctgagccttctttttggacactttgtatcctctgtctgccaggaaattcaaagtttttatagtattttggtcagaaacctcctaggttgggctacacacaaggtcatccccatactgaagaatacctccattttctaacttgaaatccctcagatcccgctctaatgctcaggcaaagaagtgggggctatcccgaaagccctgaggaagcactgtccaagtgtattgtttttatctggtattaggattttcccattcgaaagcaaaaaggtactggggggctcggggccagaggaatggagaagaaaggtctaggactgagaaccattttgcatgccctggcacctgagccaggagggcatatggatctgccaccaatgggtggacggggataacagcctcattcattattctgaggttctgtactagctggtattccccccaggcttgagaacaggtaagatgggggtattgcagggagaattgcagggttttaagagtccatgggtaagtaatatctcaactatgggagctagacctttgcttgcttcctgytcaactgggtattgttttccattgggaaaatggctggggtctttaagctgtattttgactggcactgctgttttagccttccctgggtttccagtataccatgccagtgggttaacctgtttattgacatggtctgggacattgccttatttcttactattagcagtttcacctgctaatattgcttaaattgcagtagtgtcactattttcaccataatatctctttcccacaggggaattgggcagcttggtactactaaaaattcctgttggaagatttgtttctcaaattgacaaaccaaaggaggagtaagaatcttgtttgtggcttcccttccatccaatatcactcatggaccgggaggaaagttttcctgcataagcagttgtacagaataattcaccttggtatcacataaaaactgaatttgggtggccatgatgtccagagttacccagggttcctcagtagtaattacaatgttcctagacggggcagtgaggaaggccccaggccccttcagtcttcatctgattcctccttgtgcactgccagagttttgactgactgagccccttggtgggagcagggacagtcaattctccagggccaggagccacaactggtgcttttacattgacggcaggggactggcgggggcttagtggattcctgtgcccaatcgcacttttattgcayttgaagcaagagcctttgctggcattatccttatggccctttgagtttcccttggacaatctttgtgcatttagggcatcaccagtgatggctaacataattttggcttgccgtttttctttactctgtttcccttctccttcctccaggtcacgattgttatacaccatgaaggcagtaccaagaagctgattttggttagtttgtggccccatgtgtagcttttggagcttacgtctaatgtctggtgtggattggctaatgaaacgttgtgccattaataacttgccttcaggagaggamgggaccaaattagtatatattttttaaaggcttcccgcagcctgccgtaaaacacagctgggttttcctccctgccttgtgtaatctgccttactttatcataatttactgccttagttattccctttctcattcctccaagagcctcaagaaatttagcccagttgttccttcctgcgggggtgtcttggtctcaattaggatgcgtagtgggaacwgtggctgggcctgggtgactgcctttacggttttgggtgaataattcgtccacttctcggagggcagcctcaaagattcgttccttttccgaggaggtgcaacaggttgctagagtgaattgaacgtctctccatgagagatcaaaggctaaggtcaaagtttggaacccatctgcaaacttcccggaatcctcagaatagcttcctagcttttccttacattgttgtatatcaatcatagagaaggggacccacactaggattggcccctcagcccctgctatttctctgagagtagcagggctggatagagagttgaatacagtgttcccctccaagtgtgagggggacttagtagggttccccatgtttgcccctgggtttcagcctcaggagcacttggtgaggggttatatggggacagtcactgctcactctgagagacaggtatcccttgtaaaagggggttcatctataatatctagttctgccccagaactttccttcgggggatgggttctgggagtttcctagattcttaggtcttcgtatagggtcatgtaggcctgtatatgtgggacttctgaccatttgccctgcctcttgtaaaataggtctagatacaggatggtatcataattaaggctaccattgactgcccattgttccggattgggcagctcataattgtgtcaaacaatattgcagtaaaaaatcatatgccttttctttagattgttagggtcaaattcatcccaatggtggaggatgtagccaagcggtgaatcgggtggaatagataggaagttgtccacagtgacaccaggtagaatagacaggaagttgcccatagtggtctggaaaagagaagaggactttgaaaagtggagggtttattaggtgacccaaattttacccggggcattcccctggaaaaattctgggcccagcacggggtccctgagggcttcccccttaagggtctgacttagtctgttgcacrtctccaaccttagatgggtgccggcaccactttggaatggttccctcctccactgaggacctactgttaacttttccttgaggattttctatcccagttaaagcaaccctttaactctataaatttgggcagtaaacctacacgtcagttcctgcataaatcccctttgttaatttccctaattctcavaatttatgacatatctgaaccctctatcttgtccttagacagctgaatggaggaagggaagaatttggcatgaggaaagaaggtttaagttgtctgaaacatgtgtgagttcaccctggatgagctgccacagcaattgcgtcacatgttgggatgaggaactctaaccggagagatagaaaaaagtccttcccccttctgggcagggcagccatcccttttcgtttcttggccttcagaaggcacccgagagtggccccggccagctgtcctcaattaaccgggagctactaggagtagctgaaagacmgaaacaggaaaaagaaaaataactcagtaaaagggagaaaggaataggactcagaaaaacaaaaccaaggaaaaggactcaggttgcccacccagccgggtggtggtggtcagatgcgtcacatggaaacctgtaggtttcaccagagagtggccctggctggaaacttgcagttgtctctatgtttaggcgctgatcacggagggtcccaagttggaaaggaaaaagagagagaaaaaggtttccctgtatgtaaaaggggaaagaaaaataaatcccaaactttgggcctaccttgtctccaggctggctcgccaaaatatatgttaccagtagaaggtgttcaggttcttggcatctcaaatgaagaagttgacaaaatgcacaaatgaggcaaggaaagcaaaagcagggatttattgagaataaaagtacacgccacagtgtgggaacagcccaatcatagaggctcaagagcccggcttacagaattttctggggttttaatgctctagaggtttcccgttggtcacttggtgaatattctatgtaaatgaagtgaataaagtgaagtcacagagtcatttactcagaatgtgccctactgtaaatggagaggatgttagttggtgtgtgatctatgtaaatggagaggatgaaagtgaagttacaaagtggaaatggtatgaatggagaggatgaagggaatttacaaaaccattcacattcctgtcattgctaaggtgctttcatttgatttagtaaagtcagtgtggattggctttatgttccctgcctccaggccctagtctcctgcctcagtagagccctcaaatctctcagggtgggtctactcaggctaagtttgtctgaaaactatttctcaagctgattttttggttgtttttgaaaactcattgagttatttattttatttatttatatatttattttttgagacacagtcttgctctgtcacccaggctggagtgcagtggcacaatctcggctcattgcaacctccacctcctgggtttaagcaattctcctgcctcagcctcccgagtagctggaattacagatccccaccaccatgcctggctaatttttgtatttttagtagagacagggttttaccatgttggccaggctggtctcgaacttctgatctcaggtgatccacctgccttggcctccaaaagtgctgggattacaggcatgagccaccatgcctggccgagttatttattttagaataggataaatgactcctgctttgcagataaatatcagagcagtaatcgcacacagcctgaagctgccatattttattctgacctacttcataatgactcttaattgctctgaaaaaaatattcttccttatttattctgaactggcttttaggggttgcatttggacaggggaagagtagatcttatcattcaggccctgccagacagcaattcctgtttctgagagcacttaccttctccagtctggcttgcaactcagccaagctagatctaaggagcttcctttcctagatgagcttccttctcctaggtctttgcttttatgtctcacccactagtctctatgtttgtatcttaatgcctctttaagtatctcacatcaccttacaaaacgattagtgcattatagattcaacaaatacttaacttttctgaaaatccagttacttgttttatgagcctccaattgcaaactgaaattatctctcattattgctaatgacagtgaagaattttccattcagcatcaaagagtcaaaaaatacctaaaaacatttttccttgcatatagcatattgacaacattgtctctcacacctgttgaatgttyttcctctgtgcctagtactatgctacccttgaatgcgtgtcttactttttataataacctgtgagatagaggttttttaaattgtcatttgtgacacagaaaaagcaatttaagatactcatctacatgcagctagtaaatgagagaagcaggatctgaacccagctcagattccaaagcctaagtattttctactacaccactctccaacagacaggagctaaaggccacttaattcctttctttccagtctgtcactctcaatagtgccttggctctgcttacttggaagctctttctcccctagaattttgaggagaaaatgtaaggacaattgttttttaattctaaataattctcttgtcactgtcacagcagcagtcttggtgttcagaagctgtggtaagaccagtggacttaayatcaagacaggagtttgagcatcttatgtaacatgacattgacccttttgtatagtctaaaaagttatttattttttctttctggggaaaagtttgatgtcttcctcaaagagtctgaccatctaggtgagcatcaaggtgaaatattttacctgctttcctgatgtatgaatccataacaatgggatatttgaagaatttttatgagattatgttgaggcttggctgatcttcctttgtgttccagctactgtgtggaagggcccggttttgtctttgttctgcaagaaggaaagcaaacacaagaagcctagcctgggagatagaaacacccatggraggatggaaatctgtgacccctcctccctcaccaacaccacatccaatcagccacgaggcccccctgcttccccaaatccccattgccattacattcaccattatcctttgctgkgaatgttgcaacagctcctgatttattgcccactttccacccttatcttcgtcagcctccagcatcattcctaaacagcagccagtgtgatatttaaaaaataacaaatctaaatataagactcttctggttaaaaaccttcaaggcttcccattactcttcaaatcgtggcaaacatttttaagcagagctttaaggcagttcgtrgtctggtccctgcctgcctccctagcctcatcttgctccatttctccttttttccaccctaccctacaatcacgttaacagatttttctcttccacaaacgtgccaagctattccctgcatctggaatgctctccctgctgccactctcctggataacaacttttgtctttcagatcttagcttacatggatgtgactgcctcatagagactttctcaactctccaaacttggttagagatccctctactaaaccattgtagaaacctgtgtctcttcttcataatctcattttaactcacgttgttatttctgtggttgtctatttgatggttcagggccacgcctggcctgttcactcccatgtccccaggagccagcaccgcatctggcacctagaaggtgctcagcaagtctttggaagaggaatgaatgagccaggacttgcgtgaggaaggacctggcttccagctgtggttctgccacttactaagctgtgtaatcttaggaaggtcgtttaacttctctggacctcagtttcttcatctgtaaaacaggaatgatgattttcatgtgcgtccatgtaaagagaccaccaaacaggctttgtgtgagcaataaagcttttaatcacctgggtgcacgcgggcygagtccgaaaagagagtcagcaaaggcagataggggtggggccgttttataagatttgggtaggtaaaggaaaattacagtcaaagggggttgttctctggcgggcaggagtgggggtcacaaggtactcagtgggggagtttttgagccaggatgagccaggagaaggaatttcacaagacaatgtcatcagttaaggcaggaacaggccattttcacttcttttgtggtggaatgtcatcagttaaggcaggaactggccatctggatgtgtacatgcaagtcacaggggacatgatggctcagcttgggctcagaggcctgacattcctgtcttcttatattaataagaaaaataaagcgaaatagtggtaaagtgttgggatggcgaaaatttttggggatggtatggagagataatgggcgatgtttctcagggctgctttgagcgggattaggggcagcttgggaacctagagtggaagagattaagrtgaaggaagattctgtggtaaggggtgatattgtggggttgttagaagaaacatttgtcatttagaattattagtgatggcctggatacagttttgtataaattaaaaactaaacggaataagagaagaagaaaaacaggtattaaaggactaagaattgggaggacccaggacatctaattagagagtgcctaaggaggttcagcatagccttgccrgtaaagattatttattcactttaagagttaagagtggtggtttggggatagcaccaggagatatcagctgtgatggcttggagaaacagtgtaaactggcagtgtaaacaagagcagggcatgtatgagtagttgagaatggtgaataggagtatgactagacagaagatagtagggatgacaagttttttgggggcacagtctaagttggtctggtgtctggaatgagactggggcctaataaaaaggagcatctatacaggagctcaaatgggctgtaccctgtagcattctgaggacaggtctgacctctgagaagggaaagtggtacaagtattgtccagtcctttttaagttggtggctgagcttggtgaggtgtgtttttaagagacctttagtctgttctacttttcctgaagacggaggactgtaagggatataaaggtttcactgaatactaagagcctgaaaaactgcttggctgatttgagtaataaaggctggtctgttatcagactgtataggggtgggaaggctaaactgaggaattatgtctgatagaagggaagaaatgactgtgctggccttctcagaccctgtaggaaaggcctctacctatccagtgaaactgtctacctagactaagaggtattttagttatctgactcagggcatgttgagtaaagctaatttgccagtcgtgggtgggggcaaatcctcgagcttgatgtgtagggaagggagggggcctgaataatccctgaggagtagtagaacagcagatggaacactgagaagttatttccttgaggacagatttccaygatggaaaggaaatgagaggttctaagaggcgggctagtggcttgtactatagcatagcctgcctttgctggtgtgtggtgattatgcctggtggaaccgccatcaataaatcaagcgtgatcaggatgaggaacaggaaagaaggaaatatgaggaaatggggtgaatgttaggtggatcaaagagatacagtcatgtgggtcaggtgtggtatcaggaataatgtgggaggccggattgaagtctgggccaggaacaatggtaattttgggacttaacaaagagtgagtacagctgaaggatccagggagcagaaagtatatgcgtcaggtatgaggaagaaaatagattttggaagttataagaaatgtagagaataagttgagcatagtttgtgattttgagggcctctaaaagtattagggcagcagcagccgctgcacggagacatgagggctaggctaaaacagtaaggtcaagttgtttgcacagaaaggctacagggtgcggtcctggctcttgtgtaagaattctgaccacactaaccatgcctaggaaggaaaggagttgttgttttgtaagggattgaggtttgggagattaatcggacacgatcagcagggaragcacgtgtgtttttatgagaattatgccgagataggtaacagatgaggatgaaatttgggcttgactgaagtaatgggggctgtctgtgaagccttgcggcagtacagcccacgtaatttgctgagcctaatgggtgtcagggtcagtccaagtgaaagsgaagagaggatgggatgacgggtgcaaaggaatagtaaakaaagcatgtttgagatccagaacagaataatggattgtggagggaggtattgaggataggagagtatatgggtttggcaccatggggtggataggcaaaacaatttggttgataaggcacagatcctgaactaacttgtcaggtttgtctggttttaggacaggtaaaatgggggaattgtaaggagagtttataggctttaaaaggccatgctrtagcaggcgagtgatagcaggctttaatcctttcatagcatgctatgggatgggatattggcattgagcggggtaagggtgattaggttttactgagatggtaaggggtgcatgatcggtcgccaaggagggagtagaggtatcttatacttgtgggttaaggtgggggaatacaagaagaggacgcaaaggaggctttggattgggaagaagggtggcaatgagatgtagctgtartccaggaatagtcagggaagcagataatttagttaaagtgtctcrgcctaataagggaactgggcaggtggggataactaaaaaggagtgcttaaaagagtattgtctaagttrgcaccagagttggggagttttaagaggtttagaagcttggcygtcaatayccacaacagttatggaggcaacggaaacaggcccttgaaaagaaggtaatgtggagtgggtagcctccgtattgattaagaaggggacggacttaccctccactgtgagagttacctaaagctcggcgtccgtgatggtctacggggcttccgaggcgatcgggcagtgtcagtctttagccgctaagccgagaaggagtcagagagccttgggccagagttccacgggctctgtgagtggctgccaggtgagttgaacagtccgatttccagtggggtccygcacagatgggacacggcttaggaggaatcctgggctgcaggcattccttggcttggtggtcagatttctggcacttgtagcgagctcctggggaggagkttctggaggaacgcctrgccgctgcggttcaggcgtttggaagttcttgtgtgctggagatgtggctggggtttgtctcacagtggagacaaggaattgcaacttttttctattgttgtacaccttgaaggcgaggttaattaaatcctgktgtggggtttgagggccagaatttaatttttggagttttatttaatgtcgggagcagattgggtaataaaatgtatattgagaataggacggccttttgaccttttagggtgtagggctgtaaagcgtctcagggttgctgccgaacgagccatgaactgggctgggttttttatatttgatgaaaaagagcctaaatgttatctgatttgggataaagaaaaaggagcattaaaccttgactatgcctttagctctagtcacctttttaagagcaaattgctgggcaggtaggggagggctagtcacggaatgaaactaagccagaccaactaagccagagcgggtgtgaggaggggaggtgataaaaggattatagggtggaggagcggaggctgaggaagaattgggatctagctcggcctggcgaggagcagcctggggaggaggggagaggtcagatgggtctgtagaaaaggaagattagaaagactcagtgacgcttggggttgggactgaggggacaggtgggagggaaagaaggaagatttgggatgagttgcattgggaacagagactagagagggaccgacgtgtaaaagaatgcctggatgtcaggcacctcagaccatttgcccattttatgacaagaattatttagatcttgtaggatggaaaaattgaaagtgccattttctggctatttggaactactgtcgagtttgtattggggtcaagcggcattgcagaagaaaataagatgcttagattttaggtcaggtgagagttgaagaggttttaagttcttaagaacacaggctaagggagaagaaggaggaatggaaggtggaagcttgcccatagtaaaggaggcaagcccagagaaaacagtagagacacggagaaggggtggggagttcttgccctccagaaaagcagagaaggggttggggcacaaaggtgcagagatataagaggttggggcgcggaaataagggattggggtgcagagatataagaggttggggcrtggaaataagggatcggggcacagagatataaggggttggggtggggaaataagggatggggcgcagagatataaggggttggggtatttgcctctcccctagaaaagcgggacttgccgctaagggtgaaggagaaggggttgggrgtttcttgccccccagaaaggtgaagaaggggtagagacatggagagaaggggttggggtattgccccttccccagaaaagcgggacttkcygctaagggtgaaggaccaagacaggcgtccctgcatggtctgacacctctgaaacttgggtgaataatcaggcatccctgcaatgattaaacaccaagggaaggctgccttccctagtccgtgaccgacaccggagttttgggtccacagataaaacgtgtctccttygtctctaccagaaaatgaaaggaattgaaattaagagaagggaaagattgaagagtggaaaggagaaagtggttgagggacagtgagagagcttggagaagasagtaagaagaggccgcttacccgatttaaaattggtgagatgttccttgggctggtcggtctgaggacctgaggtcgtaggtggatctttcccatggagcaaagaacaggaggacaggggattgatctcccaagggaggtcccccaatccgagtcacagcaccaaatttcatgtgcgtctgtgtaaagagaccaccaaacaggctttgtgtgagcaataaagcttttaatcacctgggtgcacgcgggctgagtccgaaaagagagtcagcaaaggcagataggggtggggccgttttataagatttgggtaggtaaaggaaaattacagtcaaagggggttgttctctggcgggcaggagtgggggtcacaaggtactcagtgggggagcttttgagccaggatgagccaggagaaggaatttcacaagacaatgtcatcagttaaggcaggaacaggccattttcacttyttttgtggtggaatgtcatcagttaaggcaggaacccrccatctggatgtgtacgtgcaggtcacaggggacatgatggctcagcttgggctcagaggcctgacaaagacaactgcttttcttccagggctgatgagagacccaaaggataaatagagcttaaagcaagttggaagcygtagaccattatgcagatrccatatattattacttctttacagttgggttggttactagaggactcaccagccccagcacccagatctcatgcctcctagccttcatggtttccagagacattctgaatagccacgggccggctggtgctgacaacttggtgtattctggccaatgggggagggagctgaaygaagggatgtgggcagggagccatagttcttcctgccaaagcagaatctttgcctaatttccccatgacagtcctacgtccatgaagaactgaggagaatgacatcagtaagtcttacactcgagttttctgtcagagcaggtgcaacttcaaaactgcttccgccctcaggaccaggcatttcctaaacacccctcctccttcacttctcttctcactgctgcctgtggctgaggtattcttaatgacaagccatcgagtccatgataatcagctgaggagtgattctcattagatttcagggaaggaaaaggctcaggccatgactgaaggatggaaaataagaaggaatatagctaacctggcctcttcacctgactctacttagagtccatcttgacaagcagattggagtcatgacagttcagacctgaaatgctggtttttatttaaaggagacaggtgggaagagggggatgggaataacaacacagccatttgctgcataactaattaccaaaaattaacagcttaaaacttaaaacagctcccatagaccaggagtccaggttcagtgtctcgcagactataatcagggagggtctagcgtcccatctgaggctcagaggggcaggggcggggcggggggtggtggtggtggtgrtggtggtggtcttccaagcacacgtggttgttgtcagaaytgatttccttgcagctgtagaactgaagcatcttgcctcttcaaggctaacaggaaagagtgagtctctgactctaggcthcttacttgacattctccaggaactcacctgattaggtcaggcccacccaggattatctcccttttcattaacttcacctcaactgcaggatttcttcacctttactatattctacttttcagaagcaagttatacatccctcccacaactgaaggggagaggatgacacaaagatgtggataccaggcaaagaaatcatagaggccatttaaaaattctacctactacatcctccgtttgctgagctccatgtgtgtgttgcaggactttctccttagttcagctaaagacggggtccttgtcaaacatccatgaaatattaggcttgcagacactttgaagggtgagaaaaatggtatttattgggcgaaaagggaaaaaaaaaaaggaaaaacagagactctccggaaagccagagtcctgctastgcacttcctgcctggcgaactgaatcccaggttccacccaggaagagggcggcaggctcctccccactgcaaaccacgcgaacctcccaaggctccaccccagcgtgcattcctcccagtgtgcaggtcagggaggctctgccagggagcacttcctacctggctgtctcatgtggggtgtgtgtttgtgtgtgtaacagaaatcaacttgttccgactcaccttagcaaaatcagggggattggttttaaggaaacgatgtcttgtggacccaggatacaaatgcagcctgacctgtggaaggacaggagttagggtgaggaaagccatagggaaacttggatccctatggcttcatcattctctctctctctgtgaaccaactttatctgctstccaatttgtgctttacagttccagccatggttccaacaaccatgctatctcatcccattgtctctggtagaatcagtatctctctctttctctcctccattcccagytctaaattcttagagaaggaatcttgggtgggctgctcatctgtatkgtagttgtctgtggccagagaggacaggatgcatgttacaagcatggctgctgggaatccacccatggtgatcatgtagcgaagggaggatggggtcagttccaggagaaagaggctgaggtcccaagagatgtccactgcatggtgtcaggctttgtcattagtggccagtatgtgcatatgccacatcatctggtgcacaactgagcagcaaggccttttgctggtggagggggcggaatgagacatgtttaacagtgttccacagttagtactatgtgctgcataaaccrgggacttgtttccagccggaagtgatgcttcctgtcaaaatcagtttacagctatgttcccatcaccccagcacttagaagaaggctgatcccacagaaagaattcagcagctgcagagaatgaggatataggcacacagggcccaatttagagacacagccctgcagcatctcataaaccttttttagaaatggctgagaaagagctgctttgagcaagaagtgaaagtaaagaaggattgggtaatcaaaagcccggaagaaggaagggaatcttccagcacagagtgtaatgctcatgttttgctaagaagaaagtgagacacacaaaaggctccagacagggcgagttattaaacctcagacatgctgcttaagagctcttaccaattcttacttatgaggaactggcttccagatctctcgtgtgtcttatagttgttttatacaagtgtgcacagggaggtataaactggatgtgattctcaccccaggatgtgggtgcttaccaaccagtccttctgcagtcttcacatagttcaaagccaaaggatcatttccagcgctgacatatttgtggaatcttcaagggaaaggaaaaggctaacccaaggcaaagtgttatttgctcacatcacttaaggaattttttcaaaattctagagattaacgggtaagtctataaaattcaaaaggaactactatattaaagtagggttgtcatcacttctccttgcagttattgtctccctgtcccctggctccaagtgcattgcatcatgaaaggaaactgtcactcttttcagcattggctgttctgacttggtattttactgcatggtgatctgatgctgttggggagacaggcatgtggagcattttaagccacgaaggaaggtatgtgaactaaatccacaactcacctcttaggaacaactgcctgaggatagggttctttcagaaaacataagctctggtgacaaattcactcaactgattgctgcaccttgttttagaaaatgcttctagaggtagcaaaataattcacatgaggatttatgaagatgtacttcatccttgatttgggaagaggtgagagagacgatgtccacctaccacggtkcacccatgtgaactttcttgttactcctactgtgtcatccagtcactgagcaaagtcctgggcacacttcattaaacacagtacctgcttttgaagaattcacagtctcacaggagagaagtatgtgtaaactgatggttaaaatacatcacagtgttaggtgttgcasaggggaatgggcaaagcattattagatcatagaaggaatgactaggcatgcagctccttccagactcagcttgggaatcctcccagtccgacggctgtgctctaccactctctgctcactttccacatgacattggtactttgtgctcctgtgtctctctccccaacaaggcttcaagccagggtttctcagctttggcattattgacattttgggccaaatttttgatggtagggagggggagccgtcttgtgcgttgtagaatgcttagcatcatctctgccctctacccaggatcgctgccctctgtctgccagtaatacacacacacacatacacacatatgacacagacacacacaacacacacatgaacacagacacacacataccccccacactattaatggcaatacaaagtctctgccaaatgtcccctaggcagcaaaatcgccccagttgagagtccctgctttaagctgttccagggcagcaatgacattttcttcatctctgaatccctggtgcccaggacatttctgtcactgcgaaccaaacagaatatggcttggagggatgagggaagccttaaataagagaactatctgattcgaagtataaagaggaatcatctaggtcagcactctcctatagaactttctgtgatgatggaaatgttctatgtcttcactttccaatacagtggctgctacgtgtggcctttgagtacttgaaatgtatgactgaggaactggattgatttcarttactttaaatgtagccttcaaaggccacatgtgattagagcctccatcttagatagcacagctcaagcactgagtggcctggcccagggtaagcactactcatcaaatgcaagtttgggtttcaatagattcccagatgattcaaatatatattcatacttccagtttttctgaccattatccaagcstaaagcaatatattttggaataaattgaatattcccatgcttccttctaaagagataataaaagaggctgatcccacctattgtaaagcaaccagggatgccattattgaggggcttgaagatagatgctgatgaaattcttagaatcaccccatttatttaaaagcagcccatctgactatctaagcttccatgcatttatctaaataatggatattgagggcctaccagrtgctattgttcgatgagatcacaaagatatgcaaaacagccagagagaaaaatgtagaaaaaactatgctgcactgttagaagggcaggaatggagttgtgtgtgtggtacagggaggatacagggaagggagattctaagtgcctgagatggacagagaagttttgacagcagagctgacactgagctgagctttaagtgagaattagctgagtcagtttcctaaacttatctgaacagccaccagacacamacacacacaaaaatcacctagggacttgttaaaaaataaattctcaagtttcttccctggaaattcttagtatagaactcagttttagcaagcatcccgggcaaatataggaagtgagtgttaggagaatggggcccataattaccatgtgctgatagaaacggtgccaaggtcttgataatgtttctgatagctaaaactatcagtatatcacatttgacttatattagaaggcaggaatttgaaaaataaaagaatgaaagagaaaggaaagctacccatacttccaccatgtagacctaatcattgatatttttgataaatattctgcttgtctttttgtgtacactcacacacactcacacgaaactggaagaatactatacctattccgttttttacatacttttttatcttacaataattttagatttaaagaaaagttgccaagataggacaaagtgttcacatataccctacacccagttttccctattattgtcttayattagtacactgcctttgtaacagttaatgtactaatatttatatgttactgttatcaaaaatccatacctcattcagatttccttaattattattcattgctctttttctattccaagatcggatccaagatatattatatttaattaccatgtctccttaggcctatcttggctrtgacagtttctcagtcttttcttgtctttcttgacctcgacargtgttttgtagactttccttaaackgatatttttctgatatttttctcatggttagattggagttgtctgcttttgttttaattataattttaagtttggtaaacttttaaattacagaaaaaaaaaataagacaaagatgcaaatatcrtcaacccagaattgacagttgttatcatttttgtatttgtttcattttttaagaaaactaatagaattatagtcaaattccctttrttgagcatccttacctataattcacaaccctccctgcctcatagatgtaaccactgtcatgaatttagtgtgcaatcttccatttccactttttccttttatatgtatgtacacacacgcctataaaaccagggaaatatgtggtatttacatgtatgttaattcttgtctatgaatgacattgtaagcacatcagaccaactggttcaacttttatgtgacaaagttgtgagttgtttttcagttgccatggacccccaggttaaagggcacataatctgagcatgcccagatgaaccaaatgtgcaaccacaaggggaacctaagtgctgggatgaaggagcaggactgaattaagaagcagcagacacagcatggcaggatccagccagagcatgcgtcctggcctcacctcactgccagatccaatcagatcatgccttattacccattttaaaatctgacccacccccagctcagggagacatttgagcatttcctcctctcakgtggccagtggacttgcgatwaacctttctcacagcaaaaacccagtgcttcggtgttggctttccactgcacatgggcaaacagaccccatttggtttcagtgacagcatgatgtacccatcattctttaacttgattttttttcacttaaccttttttttttttttgataactattcatgtagatctacatagtctgagccagttaatttcttttcattgctatatggtattctgtagtatgcctacagtatagtttatccattttcttcttatagacaggtgcaagaaattctctgaagtataaacctcaaggtagaattgctggtttgtaggatatgggcttccagatatgattgaaccggttcatgctcctagcagcaatgtttaagagtttgtttctctgcattctcaacaacagttattactgacagatagtttaattttttccraatgtataagagtgaaattaaatctcattggtgttttatttttaattttccttattactactggtgaagttgagtatcatcttagatatttgttagtgaattgctcttgggcccttttttctactgggtgtttttgtctgtttttcttactaacttaaactttttttgtttttgcatatttgggttaatcatccttttcttgttgtgtatgttacacatatactgttttagcctacagtttgtcttttagcattactactgtctcatttgtcattcagaagtttacattttgacaaagtcatcagtcttttcctgtataatttatactttttctatattgcttaagaaattttcccctactttaatatcttaaagatattccctatattttcttctagttgttgcaattctttttcatgtttaagtctttaagctacatgaagtctctttttgtttttcatgtgagctaggagtctaattttctttctatatgaarcctagctatcccagtatcttttattaagtagttcatcctttcaactgtaatgccaattctactaaatgacagattcatatatgcagcaatttgtttctgggattttaatctgttcacctgagcttttatctatgactcagccgaaaccacagttttacttaattagcttcataataaactctgatacccggtagaataagcaaccctttcttgttattctttttcagagatttatcagatatttttggacttttgttctgccacataaattttaaaatgtttataaagttttatgggaaaccatgttaggatttatattggaatcgcattgaaattatagatgcatttgggggaggattgccatctttaccatattgaatcttcctattcatgagcagtttacctgtccacttattaagaccttcttatgtgttcttcaagttttgaaattttctcagcaaaaaaagttttacgaatgttttgtcttatttacgcttaggcttccaatcacttttattgctaaattagattttttttcaagttttgtgtaaatactgggttgttaggaatgctattgatttttgaaggtagttttatatgttttattagttctgaaggatctcttagattttatagacaccataccatgaagacataatgataattttctctctttttttattgctgtatctccattgctttattggctagaacctctagcatagtattgataatagctgtgataaacgatatctttgacttgtttctgactttctgggaaaatctttttttttttttttttttttgagacggagtctcgctctgtcgcccaggccgaactgcggactgcagtggcgcaatctcggctcactgcaagctccgcttcccgggttcacgccattctcctgcctcagcctccccagtagctgggactacaggcgcccgccaccgcgcccggctaattttttgtatttttagtagagacggggtttcaccttgttagccaggatggtctcgatctcctgacctcatgatccacccgcctcggcctcccaaagtgctgggattacaggcgtgagccaccgcgcctggctggaaaatcttttaaacacttagttgatgatatataataaaatttattatataatgtaggtttttgtgagatgtctttttttatgccaaagataatcaagtttcctattatttatactttgttagaaactgtctttttacatcacaaatgagcactaaacttttctgaattcttggtctgtacctgttacagtaattatacggattgcctcttaatctgctatgtggtaaattacattgatacattttctaaagttaaatctgtgcattcctggaataaaycatgcttagtcttatttaaaacctatttttctawgctgctaaatggaatttcctaatgttttacttagattttttttatgtcgatgtttacaagtgacttggcatgtcgttttcttttttatactgtctttactggttttgggattaaattatattgtctcataaaataagttgaatggctttgtctttgtctattatctggaacagcttgtataacatrggaattatcagttctttgactatagtaaaacagttgcaaatctctctggctctgttttcttttgagggaggtcattgttgactactgatgtaatctcttgttattttgttagtaccatatttgcaataggatacacctataccatgtcaggcttccttctaattaagcatttctacaattactactaatctaatcaatacaacagtcttataagctaggtaaaattattattactattttgcatctgaggaaactgaggcaaagaagcagagccaaaactgaacccaggcagtaagagttctggttgtagaatctatgctattaactaccacactatagtaagtttttctattttttcttgggcaaattttgttaatttacatattcctagaaaattataccttcatttaaaatttttaaaattattggcataagggtgtcgtagtattcacatgatattttgaagtctttactacaccttttttaaattcctaacattgttttatttgtgccttctctttttcaattcatgaatcttgctaaaaacccttctgagtttttaccctcagaaaactagattttagttataagatgcctaggatttgctataaaataataaggtaagaagagtgctgggagtatatatgaaggaagattgtccatagtatggtaattactgaaacagtgtaaattgggttcattgtactattctctacttttatccgtatttgaaaatttccacaataaaaactaaacaaaaaaaatcagattttgttctttttcccataatttctattgggttttaaaattcatgttatttttcactgatatattatattattgttatttcctttttttcccccttgggtttttccctattgctctgtagcatcttttagttagttgtttggttaaataaatttcagtcttcttttgttttctagtatgcacattgaacactgcaaatttccttgtaaatatcagtttaactttaccctacaagttttttattatttaatcttcttttctcatttcaaaaattttcagtrtgatttattttaagccataaactgtttccctcaatgtgtctatatactatcaattatttggaatttgtggagaattgctttgtgtctcttaaatcatgtttgctaacagctttttcaaatctatataatttctaataatcatgtctttttggccaatttttaagagatacatattaaagtctccctgtttacttgtggatttaaaaagttggtaagtttctctttgtaatccttgcagttttacttttgtgtttcaaagctatagttaaaacataygcaataattcatgattgctatatcttctggggctttgtttttgctacttttataaatatataatgtccttactttcacccttaaattcaatttcatttgatattgctatcccagctttattttaactatttattcaaagtacagtcatccctggaatatgtggggaattggctccaggacccccacatattctgaaatccaagcatactcaagtttcacagttggccctgcagaatctatgaatacaaaaagttggccctctgtatacataggtttcacatcctgagaatactgtatcttcagtctgcrtttgtttgaaaaaaaattgcatataagtggatccatacagctcaaaaaagttgtttcatgctcaactgtatatcttttcctatttttttacttataacctttctatgtttttcattttagatgagtctcttatatacaatatatagatttttagatccactctcacagtctccaataagtaaaattaatattttacatttattaacattgattatatttgtaagtgtatatatgtcatcttatttggtatttcatatttatcatattcttttttctttgctccccctcttctcttttcctctattgaattgatagtatcccagtaaatcaartaagcagtccattagcctgaggctggctgtgtacttcgagatcctgtgtaagaaaccacaacctaactacagttgactcttgagcagcaagggtttgaactgagtgggtccacttaaacatggattttcttccacttccgccacccctgaaaaaacaacaccaacccctcctcttccttccttctcagcctactcagcatgaagatgacaaggataaagaacttataatgacccacttccactttatgaacagtaaccgtatttttctcttccttatgattttcttaataacattttatcttctctagtttattgtaagaatacagtagatagtacgtatagcaaacaacatacgtgttaacagactttgttattcataaggcttctggtcaagagtaggctgttaacttttgggggagtcaaaatttatatgggaactttcagttgtgtgagaggctgaagctccaaaccccacatttttcaagggtcaacgatatatttttgtaataaatatagcagagtttcagccaatcagaagcagctgagcttcagccaatcacagctaatcatgaatcagttcatgccacataaggcaaaagcctagctgatcaggtgatttctcaactttgcttcatatttggcctataaaagctggccactcaactgctgggtggagctctgtgaatctcttctggttctgagtgctgccagatacattctttgttcaaacaaactttgttaaatttaatttgtctaaagttattctttcaacaatccttatcctctttattttccttccactgaattcaaagttatagatggtgccttcattcttttagaaaataatcacatacatatttaactttactatattctaatcaaatgtaaagttagaatctctaatatcctttctaacaacataaagacttgagctcactttagcttccctctaaatgctatcatcttgcttgtgttatgtgcttgtattgcccatgctgatttctaaattttattaacatgaaaaaaaaatttttttttttttttgagacggagtcccactctgtcacccaggctggagtgcaatggcacgatctcggctcactgcaacctccgcctcccgggttcatgccattctcctgcctcagcctcccgagtagctgggactacaggcatccaccaccatgcctggctaattttttgtacttttagtagagacagggtttcaccatsttagccaggatggtctcaatgtcctgacctcgtgatccgcccaccttggcctcccaaagtgctgggattacaggtgtgagccaccatgcctggcctgaaaaaatattttttaaacagccagtacaatttacatttgcatcatatttagtggtttctttgctcacccatcctttattcaatgggtttattttttgttctgctgaggtacattctttagtagttctttcagcaagggctgtgggcagtaaactcttattatatttgaatttttaaatatatcactcacttgaccaggtatgatggctcacacctgtaatcctagcactttgggaggccaaggcaagtggatcacgaggtcaggaaatcgagaccatcctggctaacacagtgaaaccccgtctctactaaaaatacaaaaaaaaaaattagccaggcgtgctggcaggcgcctgtagtcccagctacttgggaggctgaggcaggagaatggcatgaacccaggaggcagagcttgcagtgagccaagattgcactactgcactccagcctgggcaacagagagagactccgtctcaaaaaaaaaaaaaaaatttatcactcagtcttcaaacatcatttagtttcacataaagttctagcttcattattctttcccctcaggactttaaagatattatttcattttttcttatcttttcttgtaacattaagcctacacagtgtaatttcttctttgcaggcagtctgcaagtctgcatttcttccttgaaatcttaagcttttccrtttatagttgatgttatgcaatgttatgacaatgtattaggtatgaaaattcttatttattctacttgtgatttttttttcattctaagagtgtgtatttcaatgttggaacactttcaagcattgtctatttaagaattgattcctatctcattcttgatattttctgtatcaggaacacctaccaaatctgtggtgggtgtctacttttacactcaatgtctatctactgcattctaagtgagttcctaaagtctgcctcccaatttactaattttctgttcatctgtttttagtctactgcttaacaaatctcttgaaatttttacttcaaatatttttttcatttttagaatttctactttcttttttagtccaccaatttttttccaaaattacttggaaaaaatagtttagattctcactttacactaaaatgtaatatagatagatttacagagttaaatgaaaggaaattaaaaccataaatagttaatatttctcaaatccctacatcgagatagattttctaggtttcaaattcctagctgtgttggtgatatttttctttatctcttcatacttttctgtgcttttcaaatattccatactacagatctattatttttataattttaaagtcaatgattttttgaaaaaagctttcccaataaattggaaggatattgattcagtcataaattctttagtcctcctcatcctctgtcccttcaaaataagtcctttccttatcttccagtaggagctgttggattattcttggccagtgggccctgggtcagatgaaagtgcaacatacaggttaacagtgcaacatacagccttttgacaacagctctcaaaagttgtttacatttcatgtctgagatmttgaagtgtgttagaaagatttaagagtaaattttcccaaaggaaattgttaactcaaagccagtgatatggtttgcctttgtccccacccaaatcttatcttgaattcccacgtgttgtgagagggacctggtgggagtaattgaatcatgggtgcaagtctttctcatgctgttcttgtgacagtgaatgagtctcatgagatctgacagttataaaaggagacgttcccctgtacaagctctctctctttgcctgctgccatccatgtaagacrtgacttgcttctccttgccttccaccatgattgtgaggcttccccagccacatggaaactgtaagtccaattaaacctctttcttttgtaaattgcccagtctcaagtatgtctttatcagcagtgtgaaaatggactaatacagtaaattggtatcagaagtggggtgctgatgaaaagatacccaaaaatgtggaagcaactttggaactgcataacaggcagaggttggaacagtttggaagggtcagaagaagacaagaaaatgtgagaaggtgagaaggtttggaaccccctagagacttgttgaatggctctgcccaaaatgctcatagtgatatggacaataaggtccaggctgaggtggtctcagatggagatgaggaacttgttgggaactagaacaaaggtgactcttgttatgatttagcaaagagactggcggcattttatccctgccctagagatttgtggaactttgaacttgagagagatgatttagggcatctggtggaagaaatttctaagcagcaaagcattcaagargttagttgggtgctgctaaaggcattcagttttgaaagggaaacagagaataaacatttgaaaaatttgcagcttgacaatgcaatagaaaagaaaatcccattttctgaagaaaaattcaagccagctacagaaatttgtgtaaataatgagaagctgaakgttaatcaccaagacaacggggaaaatgtctccaggacatgccagagatctttgccacagcccctcctagcacagtcttggaggcctagaaggaaaaagtggttttgtgggtgaggcccagggtccctgtgctgtctgcagcctagggacttggtgccctgtgtcccagtcactccagctgtggctgaaaggagccaacgtagagctcaggccatggcttcagggagtgcaagcctcaagccttggcagctttcacgtgrtattgagcctgtgagtgcatagaagtcaaaaattgaggtttgggaacctctgcctagatttcagaagttgtattgaaatgcctggatgcccaggcagaagttgtatgcagggctaaggctctcagagaacctctgctagggcagtgcagaaggaaaatgtgggattggagccccgacacagagtccctactggggcactgcctagtggagctgtgagaagaggaccactatcctatcctccagaccctagaattgtagatccaccacagcttgcactgtgcacctggaaaagctgcatacaatgccagcctgtgcaagcaacaggaggggggctttaccctgcaaagccacaggggtggagctgctgaagactgtgggaacctacctcttgcatcaacatgacctggatgtgagacatggagtcaaaggagatcattttggagctttaagatctgactgccccactggatttctggactggcatggggcctgtagcccctttgttttggccaatttctcccatttggaaaggctgtatttatccaatgcctgtatccccattgtatctaggaagtaactaacttgcctttgattttactggctcataggcggaagggacttgccttgtcttgtatgacactttggactgaggacttttgagttaatgctgaattgagttgagactttggggaactgttggragggcacgattggttttgaaatgtgaagatatcaaatttgggaggggccaggggcggaatgatatggtttggctgtgttcccacccaaatcttatcttgaattcccacatgttgtgggaggtacccmatagaaggtaattgaatcatgggagcaagtctttcccatgctgttcttgtgacagtgaaaaagtctcatgagatctgatggttttaaaaagaggggttcccctgcacaagctctctctttgcctgctgccatccatgtaaggtgacatgcttctccttgccttccaccatgattgtgaggcttccccagccacgtggaactgtaagtccaattaaacctcttttctataaattgcccagtctcaggtatgtctttatcagcagtgtgaaaacggactaatacacctagtatttaaaaagttatgatatctctaggtaaaaggtttttaaaaatgttttatgttgtggttgataaagtgcttaagattaaaaatagacttatttttattaaaaggtaaagagtcatttaatagggaagaaagttgtgtcagtttgggtcccttaagaagcacacagcaagacagaattaagcattcagaagatttactgggagaaacacctgtgaagaatactggtgagaggaagtaggagtgactagggagggccttaagacctcagtgctaatctgaaatacatgaaacggagtgggaaggaaagaggatcagtagaaaaagctcaaaactttagtgcagttcttagaaaaccttggtcaagacaaagtgggttcccctactgtgttaagtctattctcacactgctgtaaagaactacctgagactgggtaatttatgaagaaaaagaaaagagatttaattgactcacagttccacaggctgtgcaggaggcatggctggggaggcctcaaaaaacttacaatcatggcagaaggccaaaaagggagcaaggacatcttcacatggcagcaggagagagagagagagagaagggggaagtgctacacattttcaaacaacgagatatggtaagaactcactcactatcatgaaaacagcaagggggcaatccamcctcatggtttaatcacctctcaccaggccactcctccaacacatggggattacaattcaacataagctttgggtggggacacagagctaaacacagcatattacctatcagagactaatagtggagtcccatgttgggcagaaacaacccagatctattacctctcctgtgctcagtaatgggctagaatcagtctggggagggtatggtctcaacatcacccctgtggtggatcctgaagctgtagcatttagaggctgtcagccaactatgctccttgcagaaggttcttttaaaggataatctgatgggccactccatggtggccacagaaatgtatttaaagtatactttcttccagagtctctccctcagttctcaaaataaaagaaaaactacaaaatcctttctataaaataggaactggtagattgtttatttctagagacaatattaagctttcccttaagtagaattgtagaattcagaatctagtacagtgcctggcacataatagaaacccataactatttgttaactaaattgtgccatttgattcatttcctctcctcaggtctaataagatgataccctttattaaggccagatacttcagatttgacatttctaatccttacaataactctacaatgcagacattgttagacatttttacaagtagatacactgaggctcagagaggttaagtaacttgcccaatgtcacacgactataagtggtggttctaggattcaaatccagtgctgctctgaagcctggcacaggctccctttcctctttgtccttggtagcctaaggaaaactaattaatgcatgtgagaggtggcaatcacataacrtgaagctgaaataggtctcatatattatctaaaccagtattcctcagccctggctgaacatcagaaccatttcgagaacttttaaaatattcggatgatcaggccccatctcagaccatttaaatcactattttgagaggtagacccaggcatctctatttttttgttctaaagcttttaaacatgggaacttctaatcttctcaagattaggcaccactggtcttgtccaagccctctcatattacagattgggtaactgagtcccagaaagtgaagttatcacatctgacaaccaaacgtgctggaaccagagctcatatgaagatttcttagtcccatgttgccctctaggagtttacctgaaattgtttgttgaagcctatgacactgccatgatgaaggactctattcacacagcagtccttgtgtgccctctggtgggttaaaggggtaagaagtcatttcctggggcagtacttaaaagggtgggtgggcgctctgcagaaggttgtattgcctaatcaaaatgtttcgtgtggatttatacaagctggctggttaggtagtggggatttatatcaccgttctactttgaaggaagaaaacaacaagataaacaaaaacaaaacccaccaccttgaattggatcagtgccttgtctccaaagacttgctatataatgccatctttttttttttttttttttttctgagacagagttttgctctgtcgtcccaggctagagtgcagtggtgcaatctcggctcactgcaagctctgcctcccgggttcacgccattctcctgcctcagcctcccgagtagctgggactacaggtgcccgccatataatgccatcttyaaatcccataaggcactacctcacattagtgctctgggagaaattttttaaatcttagagtatcttttatcaagggtgtagactcttttggttcatcttacaggttttgcaaacaaacctgaggacaaattctagctccacaatttattaatctcataaacttcagtgagtcacgtggtatctttaatccccagctttaccatctgaaatggtcattataacctaatttatacagttcttgtggagattaaatgtgtatatgtaggcatggcactggccctgaaacttattaagtcccctccaccctcatgcttcacaaaatggttatcctattattggtagacccctgttgggtgcatttctactatgtctggacaaaactctcaaataggaaaagaatattttcagtgcaaagtgatgtaacctgtgcattggcatccctcctgtggcctgcttcccttgtccccagagagcacttgccactctcctgccaccctttgttgcagacttccacagaccttccygtggtaagcagaatttgaactctgatctatccctcatcaaaatatcttttgcatgtagctgtattctcattcctggggcaytccaacatgaaaaggktgagaagatgaggaaaagccacaaaaggagacagcatgagtgatcaatatgcagtaggagagaaatcaggagagtgttattctacaggccaaataaagaatgtctcagagggagraaatgattgactgggtcaagcaagacaaggaccaagaggtgaccattggatttagcaaagtggaggttattggtggtgttgactaaggcaagtttgctgtagtggttgtggtgaaattgtgattggaatacagaattggatacatcaagcacagactcttcttttgcgatgtttttcctgtaaagaagtgccaggcaatggggtggaagctagaggaaatggctttttaagatgagagaaataacagcatatttataatgccagtgagaatgagccagtagtgagagagaaaactgatgatgcagaaaggagaagggagaactgctagagcagcatccttcacaggtcagagggawtgagatttagtacagaggtggagcgccttataggaacagacatgctgcactcataataaagggaagggcaggcagagtctatgggtacagatgccgttaggtraaggtagagataacgagaggtttgcaaaagttctcttctgatagcttcctttttatcagtaaataggaagcaaggtcatcactgggagaagctgctattaagtgaaataaagtcccatcaagagagcaagtgatcagctcagtttccgaaatagaactcaaagattaatggtgatgtgctctagtgggtaagaggttttgctgaaaatacttcaattatgaggttcacatgtaatatcaacgtaaaattcaaataacaataaacacatgatgttctgaactttattttcaactatttaaaccactctacaaaatgctctacaacattaagaaaacctcagcaaaatttggggtgggaattagactctgtttatctrtcatcaaaatatcacgcaaacacttattttaagtgtttaacttaagatatttaactctgtggaattctttgtagatgatggtatatttaaattccacatatgacaatgaaaatttaccccaagcatacaactctttaaaacaaaataacacacattttttaaaactgtttcagattaagttgttttgctttttttcctagacatgaaaactaagctcaatctttttccccagtcacagccttgagcttatggcagatttgcacaaagtataccaatttcttcttggattgtccatctagtgatgccagtagttcatgccatcacaggtagaagagatggttggctaattccagactgggttctttatgaatgctttgtgccaccagaaaggtcagcttgtgagcatactgacatggtgctgggacactgactatgccctgaggagaaaaaagtattgatrataattaagagattaccttgttcttcaaagagattttttctgattttactttgtctactggttacacagataatagaatgggcttctgggtaaacaacaggtaacctcaaccaacaaaaggtaacctaacttactgggaacttaagctcactggggaggatggagtgaaaagtcactctggcttcatggtgctgggagtagggagccatcacacttcagactagtctttgtcctgtgatctcaagtttggaactccttggaggagcttcgtgcaaaccttgggcttggcctttgggaacagctcttggcctaatgcacaggaacaaagggcagacccaggcctgttaacacttccccaccaggcacatctgagttggcttcaatttcttcatctgtaacatgtaaataacaataccctgatttcctcccaggtttgcataagataatgtatataacaaagtcgtctagaaactgtaactattaatgtattataatagttattgttattttgtttctatgatagactgctttcctcccactgtggactcaagaagtgattcattcattgattcattcattcattcmttccttctttaggaaatatcaggtattgtgctatatctagggatacaaagatgacgtgtatgataattcctaggtgggactcttgagtatcatatttacattaagtaaacagctttcactcaccggccagttgtagtacaggtggcacaatttgaatgtaagtctctgcatatggtcgggcttcaagccgttgtcatcatagatgacattatagtaggtaggactaacagttccccggcaggccacctggctgatcagataaaagtcatacctgagggggaaaatggaatgaatgtaggaaagaaggcaaacagaataaggtcaaacataaactggacgcaatgaatgttttgttaaaaattgattttccagcggcacttgccattcgttacgtgttgcttctgaatccacaacagtgccaagtggggggttctgtacagtgcggttcatttcggtaaagaatcgtggcatgcacttcttcctgaccacaatcaccgacagtcttgagctaaaaattagagaggcaaaatatgaaaagaactcaatccaatctatatagctttctatttttgtgtaatttaaaaaatgaaataaataaaaattccatttgaaaaacactgcaaaacagaaaataaaaattacctacaatccctccttccctagagatacatacaattttttaaattagggattgtccgtatttgttgcaaaaggatgctatcccaagtcatttgcctagtttataccactcaaagggggcaggaaggaatgctgaacttcaactggcacttttgcgaaagattttccagaattatccatggagacaagatgtgtgtgtgtgtgattagtgactcaacctattttccccttcgctcttcctctcaattttatttccaagtagcaaaggaagaaccacaagttcttcctattcctcttgtcatcccttctgtattacacaaaactcatgcctgggtggatggatggatggaccaaatatatgttctggccaaatgctgaatggtgaagtgttaatgtatttggtaaagccaaggcgaaatcctaatatctgtcattacaaaaggcatccttacatcctctgggatgtaaggatcactgcggagtttcattttaagcattataattatttttaaaatttatcacgaacgttttcaatattgaaactatcaaaagttgatgttatagtgcaagaaaagtaactccttagcactgtcagctgctaaatttactcctgcatccctcagttgcatacctgtgattcttaataaacacatgcacctgagatcagtggagagcaaagtattttggccctaacagttgggataaagctgcagatgatactgccaccaaactttcaggcttcccctccactctaacaataaccgactgaggtcaagactcagctcctttgtgacttgtggctgtgaccctttggttgatggtgatgatgatgakgtaaccctacagatagggctatgtgtcctgcttggaataagatgctttccaaatattttaagaagctgacttwagattattgtcctctcctattttccatttccaacattttcttgaacttgccatttcacataatcactgcagaaaattttgtactgaaacacagacaacagtggagcaagaagcctggtgttcaggatggtctgatttccatctgcagctcagctttcatggcactcaaaccctttgagaaccttccatagaccttaagtgcacatcagtgcctgcaactcagaggctttggttctgtgtgtattagggccttgaatttgaaatcacggtttgttttcttccatgtgatattaatatgtatgaagtattttcactgccagcagccctgcaggcttcatgctgaatctgtgtcagctgctctgagggtacctttctttgtctaggtttcccctcccagggcccccaaagcttataccacccaagctatttatgttagaccatcccaactaccctccaatctgaaggaaatgatagagctctactggcatgatacagaaacacagcaaaacttaattgcataaaaaacaaaacttatgcttgaataccttgtgtgtaatagctacagctgaatatgctataattgggagtatggaggaaagaacaataattgaatacctggtatttgagctggattctgccacactgctcagcagctgtgggacttcatattcaataagtgttttcagctgaccatcccctacaccagcacggtacacaattatccgtgctggcaaatcatgattgtacttgtaccatttgttgagtgctcctgcagaatttggtgtcagtaagaaaagaattacttttctaatgccaacaaaaaataacattcccatatattgcagtgtttaaatggrtttgctatttcagaccactgtaaaatagggcaatacataatttgggttatatttgcaagaatataacaatggataactttagggagcattcctctgtctctgctattcaaggaatcacaatggtttctatggcatgatatattcttaaacttggcctatctctttaaataaaattttaatatttaagcaataaattaaaaattaatgcaatagacaaatgcctaaaatcaaatattagtgtcttcaagtctttaaatcctctaattagatataaactaattttatgtcattttccttcctaatgagaataaatatgaaaatctaaggaaatggctttgctgttcctctgaaaayatatcttcacactgactcacccarttgattccaattctcactgagggaatgaactctgaaaacatttctactcactgtaactatgaatttcctaaagaacagggaccatagagtaactgctacccaacgaaaacctttaataactgctaaaaaaaaaattacctgctaaaaaaatttaccaggtttcgatgtgaggggaatataatagaatgcaataattattttcatgtatatattgcatagttattttaagagtttattgtttaggaaattcattttagtttgatagaaggtaatcatatatataagtccattaccaacatgtataagcaaattcattttttaagaaaaaatatttacaatactcccaaatttacagatgggaaaatgcagatcaggagagggaagggtttgtacaagtcacactgctaggaaatagcaaagccagacctaggccaggagtggtgaagaaacagaaaccttagatttgtctttgcattgcatcctgctatggatagggcacctttcctcatctgctgtctttcccttcttctcttgctttgccactttatctgttagcacccctatcctagccctataggcttccytcctaggtctacacttaacattgctctgtcataactcgagttcctccagggttggtttcttttgaccttcaaactgcttgtcagggaaaccagcagccacaaattttccttccttctggcttcatgttatcacacacagacaaatgtaaatgtaaatgctacatagtctgattgttggcctaaatcggcatgcagcttcagagatcttcaactgggtgacagttgacaaagacaggtgtagagagtttgctctgacctatgtggtcttctataagcatgtggatttgaggtctgaaggaacagtccttggagcccacccacattgctatatttttagtaccagtcatgaaaactttcaagcaatctgcaacatcagtcattgttctctgaaggatacagcgggaaaaccacctaaagttaaaaaaaaaaataaaagtaaaattcaacttcaatttttctaccataaatattcattaatattaaattaagaaacagagattatgagtaaaaatcaatgttcgcaattttgtatgtgttatgtgttcacaattatatcaaagagaccctttacccaaaaagaatttattgagaacagaagctaaacatagtgttggcatcagccatatcgagcttcaaatcctagtcaatatactcaccagctgtgtaactttgctatgtgaacctaagtctcagtttcctcatctgtaccaaggagatttacaaggtaagtagattagttactacctcatagggttgtggtaaaaattaaatcacatgatatttgtaaaatatttagcatagtactttgcatatagtaaagagtaatagaggccactattattgttataaattaatgtactaatttagcaatagagcttctactgtcaaaatattcaaagatttctgaagcataaactttcatttctataggtgatccttttggattagaaatcttaacattattgtgtagatttcagaaacaagttctcttactaccaccattaattaacttaaagcacttggaaatgaagatcatgactttgtgttaggtatgttccagcattattatacctctctaaatatatgcaacaacagtaatacagctacatgtggtggcrcgtgcctatagtcacagctacttgggaggctgaggtaggaggactgcttgagcccatgagttcaaggctgtattgtgctatcactgtgcctgtgaatagccactgcactccagcctgggcaacaaagcaagaccccatctctaaacattttgtttttttgtaaaaaacaacaacaaaacaaaaaaaacagaacacaattaggaatgctgccaacaaactagaagtcctgagtgatattagcaaggtggaagaataggagctttctaccatcatttcccttccagaagcatcaattttgacaattacccatggatgagactaactccaatggtgacgttccagcacatcactggagtaaaacatcagagaatggatgcattaaagagggtaacacaaagagattcactttacctgcattgctcctcccctacggagggcacagctcagtgccatgacagatcacatcagcccatgatttctcttacagggtgaaaattagagtgtagtgagtgagtacccagctccctcacccattcaggatactgcctaggatgcccacttttttcttgcctcaaccagaacaacaagattatcagcacagctgggaggttaggagagtctgggggcaggaaagagtggctgcaaaccctactgactgctctatgagcttcatcaagaggccctcctgtgggtttcttaggataccttgcctatggagcacctcaactgactcacaggcaccccaaatgctacatgtatctcaccaccacccctgaccaggctggctccccaaccacatttgttcagatgttgagtgcaagcatttcacacaaacagatagcttgactcttcaggatttggagaaggtacacaaaatgagcatttcagggcaccaccctagggaaaacagatgagagcctcttgacagctggcctggctttgtgggattgagaaagtgcatgcaattttaaggatccccccaccaagtgagaaccagaagtgtggagtgggcacatgaatagaaaacgtgtaagagagcctcagaatccctagctgggctgactgttaaaggtttttctctcccaaagatagccaataaagactggaagaaatgactgattcttcaaatgcaaagacagcaatgcaaaacttcaagaaacatgaaaaatcaggaactgaccgggtgcagtggttcatgcctgtaaccccagcacttttagaggccgaggagggaggatcacctgaagtcaggagttcaagaccagcctgcccaacatggtgaaaccctgactctactaaaaatacacaaaattagctgggcatggtggcaggcacctgtaatgccagctactagggaggctgaggcaggagaatcagttgaacctgggaggcagaggtttcagtgagctgagatcgcaccaccacactccagcctgcgtgacaagagcgaaactctatctcaaaaaggaaaaaaaaaaaaaaaaaagaaaagaaaaatcaggaactatgacacaaccaagggaacacaataatattccagtaattgacctcaaagaaatggagatttgtgaattgcctgagaaaggattcaaaataattgtttaaggaagctcagcaagctacaagggaatgcagacagaccactcaatgacattaaaaaaaaaatacagaaacaaaacaataacttcaatatagagatagaaacaattaaaaaagaaccaagcaagctgggcctggtggttcacacctataatcccagcactttgggaggctgaggcaggtggatcaggaggttaggagtttgagactagcctgaccaacacagtgaaaccccctctctactaaaaataaaaaaaattagctggacattgtggcaggtgcctataatctcagctacttgggaggctgaggcaggagaatcacttgaacccaggaggcggaggttgcagagagccaagattgtgccactgcactccagccctgggtgagtgtgagactccatctcaaagaaccaagcagaaattctggagctgaagaatacaattaaataaaagcaatagaaaatatcaatagcagacttgatcaggtagaagaatctgtgaatttgaagataggtcatttgaaaatacacaaaggagaaaaaataaaaggatggaagaaagcctatggagtttttgggataccataaagagggctaacatttgcattacgaaagtttcaaaaggagaacagagataggtggaaagcttatttcaagaaataatggctaaaatgttcttgaatctggaaagagataggaacatccaggtacacgtagctcaaaagttctgaagcaggttcaacccaaagaagaattcaccaagacatattacaatcaaactgtcaaaaatcaaagacagagaatgwtgaaagcagcaagaagagaggcttattacatacaaaggaaccctcataggctatcagcagatttctcagcagaaaccttacaggccaggagaatgagatgatatattccaagttttgaaagaaaaaactactgatctatcaagaatacttttccttgaaaagctgtccttcagaaatgaaaaagagataaagaagttttcaaacaacaaactgaggaagttcatcaccattagacctgccatataagaaataacaaagggagttcttcaagctgaaatgaaaggatgtaataagtaacataaaaacatataaaagcataaaactcactaatataggtaagtatatcatcaaattcaaaatactctaatactgtaatagttgtttataaactacttataactctagttgtagggataaaagatcaaagtattttaaaatatagctacataagaaaataacaatacaattaataaaaacagctacacaatataattaatgcatatatacacaatataagaagatgcaaatcatgacatctaaaacataaaatgtaggggagaaagtaaaagtgaggagtttttgtatgtgataaagttatcagcttaaaatatactgttataaccataagatgttttatgtaagactcatggtaattatgaagcaaaaatccatagtagatactcaaaacaaaaaagagaaaggagtaaagcatactattgcagaaaatcatcaaatcacaaaggaagacagagagagaggaataaagaaacaatctacaaaaaagccagaaaacaatgaataaaatcacaatagtgagtcatcacttatcaatattttaaatgtaaatggattaaattctccaatcaaatgacacagtgtagctaaatggataaaaaagaaaacctaactaaatgccacctacaaagagattcacttcagctgtaaggacacayatagattgaaagtaaaaggatagaaaaaatattccatgcaaatggaaaccmatagagagcaggggtagctaaacttaggcaaaatagacttttgtaaaaaaaaaaaaaaamcctcacaaaawtcaaagtcgtkggataaggataaaagaatcaattcattaagagaatacatcaattttacgtatgtatgcacctaatagttgagcatctaaatatataaatcaaatattaacatctgaagagagaaacagcaatacaataatagtagggagcttcagtactccacttttaacaacagatagatcatcctgacagaaaattaataaggaaacattggacttgaattatactttagaccaaatgaatctgatatataaaatgtttcggccaacaactgcagaatacatattctgctcaagcacacatggaacattctccaagacaaatcatagccagtattaacaactttaagaagactgaaattatatcaatctgttagttttgtattgctataaagaaacactttagactgggcaatttatttaaaaaaaaggtttatttgacgcatggtcttacaagctgtacataaagcatagtgccagcatctgcttctggcgagggcctcaggaagcttataatcatcatgaaaggcaaaggggggccagggtgtcacayggtgaaagagggagcaaaagagagagatcaagagacatgccaggctcttttaaaccgccagctgttgcacaaactaacagaacaagaactcactcattaccatggggagggcaatctacccccatgaccaaaacacctcccaccaggccctaccttcaacattggggatcacattttttggaggggacaaactatatcaatatttgaacaaactatatcaatcaagcttactattgtctgaccatcatagtatgacactagaattaataatggaggaaaactgcaaaattgaaatatagaaacacaacatactaaaacttatgggatgcagcaaaagtagtttaagatggaagtttatggcaataaatgcctatgtgaaaaaaaaggaaagccctgataaacataaatgtaaaaatcctcaacaaaatactaaaaactaaattcaacagtatattaaaagtttcacaaatgatgagaaaatgggatttatacctgggatgtaagaatggatggttcaacatatgcaaatcaatagctagatgcatcacacttcctgatttcaaattatattacaaagccataataatcaaaacagcctgatactgccataaaaactgacacatacgcaaatggaatgggataagacgcccagaaataaatccacacgtatacagtcaactaatctttgacaaaaacaccaacaatacacaatgggataaagaaagtctcttcaataaatggtgttgaaataactagatattcacatgtaaaaaaacgaaattggacccttataccatatacaaatattaactctaaatggattaaagacttaaacaaaagatcttacactgcaaaacttctagaagaaaacataaagctccatgacattgatcttggcaatgattttctgaatatgrcaccaaaaatacaacaatataataaaagtttctgyatagcaaaggaaataattaacaaaatgaaaagcaacttacataatgggagaaaacatttgcaatcacatatctgatacggggatgatatccaaaatatatgaagaacccatacaattcaatagaaaaaaaatccaattaaatagacatttttccaaagatgacatataaatggccaacagatacatgaaaaggtgctcaacatcactaatcatcaaggaaatgcaaatcaaaaccacaatgagatatcaccttacacctgtaggatggctatgaccaaaaagtcagaagataaatattagggagaatgtggaaaaatgggaacctttatacattgttggtgggaatgtaaattagcatagccattatggaaaccagtaaagaagttcctcaaaaaatttcaagtagaactactatatgatccagaaatcccactctggctatatatccaaaggaaaagaaatcagtatgtcagatatctacattcccatgttcaatagccaagatagaatcaacctgtgacaactgatggatggttaggtaaagaaattgtgagatatacacacacacacacaatagaatattattcagccttaagaaaatcctgccatttgcaacaacatgaatgaacccacggacattatattaagtaaaataagccagacacaaaaagacatactgtacgatcacttatatgtggtatctaagaatgtcaaactcatagaaacagagagtagaagatagttatcaggggcagaggataggaatatttgatgttgtttgaagggtacaaactttcagttataagatgaatatgttttggacacaatgtacagcatgttgagtatagttaattatcatgtactattgtatagttgaaatttgctaagagagtagaycttaagtagtctcaccacacacacacacaaatggtaactatgtgaggtaatggatatgttagttaccttgactgtggtaattatttcacaatgtatacatatatcaaaacatcacactgtacattcaaaatatatataatgtatgcatcaattatcaaaactgataaaaattataataaattttctgataaatggtgaccatttcagaaaaaaactaaagtggatccctacctcactccctatatcaaaataaattttagatatacaaagaaaaaaatgaaagtcctttatcaacttgattaatgatgtggcatatataagaagcatctcatacaacctggaatgaagttgtaggcatgcaagtatggtgttattatggtgttcctttttctgtttcccacaatccaaaatacatacctgatcatgaatttaatggagtaaataaaatagcttaagccaggaagaaaacattttgcaaagggctgctataggctcaaaacayattgttcaattacaaaggtggaaacaattctaagacccatagtttaatgagtactattagccaatgtttaaggcattatccctgattttgcctgtttttaatagctgtctgaacaacagccaygtcaaatgtctgcaaatattaataatcataacaagaagtatgtattgagtatttactatgggtggagatgttcaatgcaccttattttagataattcccataaatgccttatgaaatagtcatcattattatttctattttacagattaccatagtgaggcacagcaaagttaaataactagacctcagtcacagagtaagtaagtggcagaccagggtataaatccaggcaatctgatttcaaagatcaactgctcgacatgatatatgtaaagtacctagttcagttcccaatatggtgcagacactcagaaaataaataaatgcacaagaatttgtacacatctatcatttggggaagatgagcaatagctcaccctaatgaatatataaaagattttttaatgaggctacatagtaccccaatattatcaatcacatttttatatgtaagtgtaatttatgaacctaaatgttggtgtttaaaatgagtgaataatacaaaatattccttgctgttacattctttagtgaaaccacaattaatagtctaactaaatgaagcatgtgttcaggtagttttagcagtacctggtgattctggggttaacactggccacgcatccaacaaccatcacgtccttgctgagtgcatctttacagacatcaataccgaccaccatcagggactttaactataaaattaaatttgtcatgatttaatgggatgaggtatcatttcccctaccaatggtttaataggaaagtttttaaaaacagactccagttactgaattcttaaagttaagctatgtgtaagggagattgagatccgtgagccagattattaaaccagaaatgagagagacttaaagaaggcaggaagaatatggtacacacttatcttaagagaaacactaccgtccaagataaccatcatcctttgtggggtggggaaggggcaccagtggctaaagagattctgggagtgtggtcagtgtatctatcgcttgcctctggtctggagcaatctgaagaggaattccattcttcattcttcagatctctaaggaatcctcacttggctatgcacctttgtggggagtgggagagagggaggctgagggtaaccatgttcattctggttatggacatgtaaggaaatgggcaacactccctcacttctcattctcctcacttactcccatggtggctacagttcagggaagagaagaggattttctcagtacctaccacagtttggaggttcaggtcataggctatgccagctccccaggctctggggaggccccatccagggtgcaaggctattctcagagttagcaccctgatgaaagcaagtaaatgtggaggcaatggaacacagattttaaaatagcagccaagaggattcaaatcaggtccctatgctgagttagcagcttaactgaagctccctgagaagtatggagcctcttttggagattcacaatggcttatggaatgccagaacccagggcaaaggctcaagaaacaagcaaaccaaataattctgggatcatgtgataacatctcctactttaatctttaaaataaatttattaawtactaatagaaaaaatgtgacagggtccttacaggtatttccacagcccacagctcgcctccgagcttgcaagtcatctgcatagcgatcttggtggcgatactcatcatcatgccctgtttattcaaggtccgagcaagcacacattggcttgggactgggcagtctgagctcaaatattttttaatggaatcataataggtcttctgattagaaggcagaatgcacattacctaaaagcaaaaacagcaaaagattttggaagttaatttacttctgctaagaagttgctttttaaagaaatgaattcatgaattattctccaaacatcttttacccttaagttcccaagaagcaacactaacatgcctacagttctcttaaatggccattaaaacactggtgaattaatcaatccatttgaaatgccttctcattagccattcactctgcaaagccccacccactcctacccatttcccttggcttttcctttctcctcatttctctcctgatttgattctgtcaattccctcaaattcccttctcacagagctgcttctccagctatctccactccctcacccccaactttgcagtgatcctttcctatggttttcgagttatcattcccattggtccctccctgaccccacccaaagataagccaaagttgagaattagcttaaactatggtgcttttcccattaggtacaagataaccaaaataaaggacacaaaaatacactttttwaaaaaaaagctgaagttgagagtatggatatgagtggggggtggatagagaagtttcaagtcccctggctttttttttttttttgagacagagtctcacactgtcacccaggctggagtgcagtggcacgatcttggctcactgcaacctccacttcctggggtcaagcgattcttgtgcctcagcctcccgagtagctgggattacaggcgcctgccaccaygcccggctaattttttctaattttagtagagacggggtttcactatgttggccaggctggactcaaatgcctgaccttgtgatccactcaccccggcctggcctcccaaagtgctgggattacaggcgtgagccaccgcccctggcctactcctacttcttatcagatgctttccgcactgaagggcctacctccgcctccttctcatcttttattctccactttcaaaagcccccaaattgtagaaaagacatgcaytgtcaatgattagcagaagaaaacaaagtaatttttccacctatagaattatttaaagtcacaatgtcaaaagctaaaattatttacatttaattatataaagtgaagaaaaatatttttaaattatcagcaaaaggctcttagaggccttccttccttccaattcatgagtttggctccaagcaagaaaagtggtagaacaaggcagtggcccaatgggctgagagaagatgggagccgagtgagactggttccacaccaggggctggacaagtaagcaggtatgcggggaataacaggagccatgcaacatacatttcctagctatgtccattgagaaagcctggggatagcaacaacccagtagcaatgaagcacaccaagtgccccaaatctttgtatctaaatactattctctgctaaaaggaatcaggactcctgggaaagatatctgattccagggcggggaagcaacactgtaagatgagcctggaatatcttattttgccagaaartaagaaagtgttccaagaaagatggagacacatgaaaaagacacagaagccagcttgaaggggaatcccactggcaaaatcaggtacaatattaagagcaacaaaataaataataagagtaatggactataacaaaataggaatctatgagtctatgcagatataaagaaacaaaygaataaatggggagaagagaaagttcttcctatgccacctaataactgtagaaggactgatggaatggaatactatcatttgttaaccatcataataatgatggattcaggcaagaattataatagatgctaagacaaatgggtaaaagtttgatgaggaacaggattatttatrtagtctcaaaatatctacatatgtacacatgcaactgataaagcttaactttacagtggagaaatcgggcagatgtcaccataatccaccatacagtggagtgacacctggtaggatgcacttagaatataggatcattgctgtgctactcttgccaaaagtgcataacatgaatttaatcatgaggagacatcagacaaacccaaatcgagggacgttatacaaaataactagtctgtactcttcaaaattggaaggtcatcagagtcaaggaaaattaaagagctgttccagattgaaggagagactatagagactggacaactaagtgcaggacagtagagccttttcctacagaggtgacaattgagacaaatgaagaaaactgtttcttaattttgatgattgtcatatgcttctgtaagatagagaccttgtttatagaaaatatgcactgaaatagtcaagggcactggggcatcatgcctgtaacttatgctcaaatagttcagcaaaaaagatagaaaataataaagcaaatatggtaaaaggtcaataatttgggattctgggtgaagggtatatgagagagttgtttgtactgttcttgtcacttttctataagtttgatttaagtaaaaaataaatgctcttagggtgagaattctctgtttcatataagatcctttagagtaaaagagaaactcactaaaagaaaagcaaagagatagcacttagctagttcagttagtttgcatgacataacaacaagaatgttggatgttgaactgagtgagcgagggaggtaagaagggtagatggaatggacaggaaaagccctacaatagcctgggggtgctgaggtctggtagaagagtaaacattcctgggaaataggaatcgttgaaagatttttaagaacagggatgtcaattctaatttttctggaatgttgggatgtgatgtaatcatgccttggccccaaacagtctgcaaagtcagctacacacacatgccctttgggaaatgaggcaactgtggatgtcccaccaggtgatgcagcaccggaggaagtggtcctctctgaaatgcacagaaggtggcaagaattcacaggaagcaggaatttggggccataggtcacttggaaaaacctaaccctccaagaatcccctgaaatatagggaacactggataccaacatttatgtgatgaggtgggagtcagtttatcttaaatcttaaggaaaagatgaccccaatgagttgcaaaatatgcagacaccaatggctgttataggggtaacaagaagtactgtattttaaaattaatattagaaatgtggaaaggaaataaaatattgattaaaatactaagattaatattttcttcggtgctttggagaaatgcatggcaatttgcaaatatatcatgggagggtatgttcagactgtagatataaagcagaactaaaattatagattaaaggagttcaaaaagtatcctgtacttaccarctgaacatcaggatcaacatattgctgtatagctctaacaaatgcagctggattttcttgtacttttatgctacataaaaagattaattttgaagctatgtaacttccttcttagtagcacatacttatatggcattagaaataatacaaataaattttcataacaaactagtagttttaggaaaaattattagagaaaataaccttttgagtctaaaattgtttcttaaactacaaaatatgacaaaaacatttcgcaataatttttacagtgtaaaaaatggtttggtagaaaatcagatcttctcaattgtccagaatccctataatcaataattctgttgttcaaaatggggttgaaagtgaacttttgaaatcccaagtctcacagtatcaaatgtctgaaagagtgttcaagctcaaccaggattaagatttctgtaagagtgaattgctataggaatctaaaaatgaatgtttcagaaaacatcaggttaatgagaccaagatattcagctaatttgcatgatttagacaaaaatatctttattttccttagtggttgcttgtctggagcctggaatgtctagccttaatcagcgcacaagtacttaacaattatctgttctgtgcttacattatgttaggggccagcagctccaaaagtaattctcacacacataggaatttgtaaaactagtttctttatgtagaatcagcytcttttatgtgtatataagtgaactgtcccaatgcccagcggctttttaaaactcgcccagcaggtgrcaggaccatcaaccccatgactgcagatactaacagacctatgtgactggctggccgaaccgtctcagcaactagatggtcctgactcatccaattcaaactctcgcactctgactctgctgcacttacagtccactcctaaaatcatcaggtgaatgttttagaagacagaagctatgcatataaatctaacaggtaaatggatacttcatggaaaaaagaaggttgaaataaaatacgagctttcaaataaaacaggccaaggacagaacatagcaatgggcttgttccagaattcacrtgagaaagagcctgtgatgtcagcccaggatctgcggactgtggcttctttcataatcatttcctgctttattagctcatgggtttagagaaagtagagcgggtgaaactcaatccaggctatttattaacagatttgataagaggagagttctaaacaatggtgttaaatgagactttgggattaatacttgtgctgctgatgcaattaattagtaactatgtgtttaaagaataactccattataacaaagaaaagtatctgttcctcttttctaagcatatcagtttcagtaaaatgaggcatgaccaactttatggcttttctaaagcaaaacagtatttattttcagtgtgattgtatatgtatctcttactcaatgaaaaactatttatttatctttctcattcccagcaactggcatagtatctacacatattagtactcaataaacattctaagaataaatggttgaccttagtcttatcagaaaactctctgaatgactaatagtatgctacagtaacagaatcagaaaagcttatttgagatctattttcatattaaattttaaagcataaaatcaagtaaaagtcaggacatgcaacttctgttttttaatatccatttcctattaagtaaataactgatatgaaaaactgatctgaaagaaggaaaaacagttgagaagacaatatatggacttattaaagatttatatcccaactggtactggaaagattttcaggtaatgacactactgcttaagaactgggtacaagttttacaaaggccaacataaaatatattctaactttataaaagtttagtcattacaaaatctatctacttatgactactttcttggcactttacattaggaaactactgggataaagaagcttttgttgatacatctgccattattccctaccttctaaccaaaccaaattaatatatgaacaaaattcaatgtattctcacattttggggtagtccacattaaatcccatggaacctgcaactcttctcaagcagttcagaaagctctcrgcaacatattcagttctgtcgctacataaaatcaaccagktattcaaagactgtgcatttaaaatcttgcaagttcgaatatccttggaccagtcagcagcagacacaggttgacactgagaaaaataatgatcatgaaaggattgaacaaatttattcagagagcagctaaataaagacagtgtgaagatggccaacttttgttataactgtttaacacagtttgctattcagtcttaaaacacagatgcaggcactgcacatccgaacagaatacatgtgctttctgggagtggaagcatctgggcgtcatcccaggtcttccaggcactggtggcccttggaggtccctttaacctcatgattctctgcggtgcacagagaatggtgtctgattcaaagatctctgaggttcccttccagctctgagtatctatgcctttattatgaatgactcaggcaaacagcctgtatcattttatcttttactttaagcatctaaatatctcagagaatgctgattatcaatactctaggtcatcataataaaactaacacaccctacagaacagttaagtgttgcaagaagtcagggaccccaaacggagggactggctgaagccatggcagaagaacatggattgtgaagatttcatggacatttattagttcctcaaattaatacttttataatttcttatgcctgtctttactgcagtgtttaaacataaattgtgaagatttcatggacacttatcacttcctcaatcaatacctttgtgatttcttatgcctgtctttactttaatctcttaatcctttcatctcgtaagccgaggaggatgcatgtcgcctcaggaccttgtgataattgcattaactgcacaaattgtagaggatgtgtgtttgaacaatatgaaatctgggcaccttgaaaaaagaacaggataacagcaatgtttaaggaamaagagagataatcttaaactctgaccaccggtgagccgggcggaacagagccatatttctcttctttcaaaagcaaataggagaaatattgctgaattctttttctcagcaaggaacatccctgagaaagagaatgcacgcctgggagtaggtctctgaactggcccccctgggcgtggctgtcttttatggtctgtagactatagaggtgaaatagacccagtctcctatagygctcctaggcttattaggaagaggaaattcctgcctaataaattttggtcagaccggttgctctcaaaaccttgtctcctgataagatgttatcagtgacaacggtgcccgaaactttattagcaattttaatttcgcccggtcctgtgatccygccctgcctccatttgccttgtgatattctattaccttgtaaagtacgtgatctttgtgaccgacaccctattcgtacactccctccccttttgaaaatccctaataaaaacttgctggttttacggcttgtggggcatcatggaacctaccgacatgtgatgtctcccctggacgcccagctttaaaatttctctattttgtactctgtccctttatttctcaaaccagccgatgcttaaggaaaatagaaaataacctatgtgactatcggggcaggttccctgatagttaagattatatattaagctaggagtaggtatgcttagaagcaaagatgaagccaggatggagactcctttctcactctcaaaaggtctctcatgtgaccaggaaaaacaggtttcctgcgctgaagagggggaatgttagcctgcttcccagacctctgcttatatcctcagactataattgaatgatgcctttggcacagcaagtggggaagatccactgttagaactaaaagggaccacattgtatgctaatctcctgctacttgaagtgctgtcaagtgttacttgaccagcagcttgagcactgcctagaagccagttagaaatgcagactcctgtgcaccacccgagacccactgaatcagaatctgcatgttaacatgtcccccaagtaattcacatgtacattaatatttaagaaacatcccaatcctcttgttttacaaactagaaagctgtgactgagaggttatgaaaccacttggcagcagcgacaggtttagaatgctggtctcctgacatggcagccagggcacttgtgaccaagcactctgacttatctgacttccaaccatcagccatcctcatgatgccttccactggctgggctggattcagccccaggagtccacctacctcggcctgagagcaaaggagaagggctagctttccatcaatggctccctctggagtcaamgttcattcctgtccattagggcatgaggagagctgtactccttctgcccacaacatttcttcctgctgttgtcttatggggctgggaggagacccaggacaatgtaccctgagtcctatgaacttttagttcattcagttcctaggacctaatttcagaaaagcagaatgggccaagaagttgatgatattgtcatcttagacacctgctacctccagtgcatgagttctcctgttttaatgccctttctcctatggacaccagtttctacaccaaaaaaatgcaaacaaatacataaaaatgaaaggctctgggaaatacgrctttacttatagaaattatgagatggatcattttaagtacataagtccttcttcacatgtggatctgaaactgagcttctctttactgaactctcgccaagatcctaatgggagtctacattttagtactttaccataaagttttgttttgttttgtgttgaaaaatagtacttccttatcttctccaatgagagtttttgtaacttggatagattattgtaaagatatgacaaggccaggcatggtggctcatgtctgtaatctcagcactttgagaggctgaggtgggaggatggcttgagcccaggagttcaaggccagcctgggcaacacagggagacctggtttctacaaaaaatacaaaaattagctgagcatggtggcgcacgcctatagtcccagcttcttgggaggctgaaatggcaggatcgcttgagcccaggaggttaaggctgcaatgagctgtgatcatgccactgtgttccagcctgggcaacagaatgagacctgtctcaaaaaaaaaaaaaaaaaaaaagatgaaaaaaattccccccattctaccaacatgatacattcattgttcaattatatcagttagacatactggtttattacacccaataaaggcaagaagagagcctttaaacatgacatgtgactggtgttttaaagtgggcaaaacggagggggaggggagaaagataatgtataatttttgcgtaaaatattaataggttcatttcttcagccgaagtctggaagtggcgatgatttgtctcttcaggtttcagaatgcctctctccccaagtactatgtctggggctgggttctgtgcatacttcttgattttaatgtccattgagcagtgttttatttcgaaagattaacatacataactgacatggcaactaaaagtcattgcaaaagctcattgcagccttaacctcctgggctcagttttggtatcagaaaacaatctattagaactaatgtccaccagctaatagaatttcctcagatgactatggctttcttttttaagagcaatgcaccacccaacagaagataggtatgttttaattgcaatgatttgaaatactgtcttctgactaacctaaatcatgtccactgggtgccgctaagtccgtgcaagtaaattcagattgaaaaggaaaccacaggggatctgaagtcttaggataaagagatggaagtacatggccaaaccaaatattataagcacacaagccactctggccaatgcacaaaacttacacatattcaagtaaatacttttaaatgaaaataaaatcacagcacttactatgtggtcttgcattaatattttttctgaaggcacaatccggccagtcagagatatctggcttccaaaatgcagtccccaggtctctagttcaaagcgagcattggtattcctgttgataaagttgttttaaatcattaaagagagatataattataacttactgaattcgtcaggggctgattttctgtgtcttcaggattcctggcttctaattctactcagcatattttttccctgcttaaaagaattacgggacaactgtgctcatttgggatgttcaggaatgggaaaaggattccagtgggagtacagtggttagaaaaataagctttcgagccagacagacctgggtttaactcctagctctaacatttaataatatatgaccttgagcaaactattcatctttaaggccttggtttccttactggcaaaatgtaaggataataaaagcacctacttcgtaggattgatataaagatgaaatatgataatgcacagaaagtgctcaccacagtccctggcacatggcatgtgctyaaaacctatgagatattatcattcctgataacacactcgttaataaggagatattttggagccagtggatgtggagatgtcttttgtgaatatgtgaatttcttgggttgagagtcgaagaaggatgataaaagaagggaacataagaatgtaagcttcagaagattcaggatcttcctattaccctctctatcctatgaggagaatattaatatcagcaataataacactgctttctattgtgtagtactttccatttataacttaataagctttaatcatagttgatgttttagctcatgggagtatatgataacttccactgagccataagctccttgagagtgacaaccatatataggactcagcacacagtaagccaggcatttgcgggacatggaggagatccccacgcttttgtttccctattaaagctctaccaatttttttagggaagctcaaacctcttcaccactgtctctctgcaatagctcactatttccacctattcggattatgtcttctctggtcacactaattcctttgagttaattattttgcttcagataccaactgcccaagatgagatgagtgaggccatcattggtcaggaaatggggtgaggtgtgtggtactactgaaaggtggcagatagatgcatcaggaagattaatccacagtcactataagggaaacgaaccaggaattccttctcaattcggcataagtctgagggacgtccagggtaaatgacgtaaagtatatccatgaaattaaaaaactatgaaaacactagcatgataatagagatcatgtttatcatatggaaatgtttgagraaaaccctgaagtgaaaagagcaagctacaaaacatgacgtacagtattataccatttctcttttaaaaaataggattatatgcgtttgcagagtctgraagaatattactaatattaattgaattaattattaattcmattgtgattcactcatttgttaaatatttactgagtaaacacacatacacactcttttctctctcctttctttgtgctacgtaagtttccaaatcctccatgagctagtactactttaaaaaagatttaagaaaaaaaaaaaaagactgttgatcaacaatatagcccaataggaatataaagcaagctacatacataattataaattttccagtaaaaatggaaaatttttacttccaccttaagaaagtaaaaaaatgacaagtgtgaaattacgttttaaatatatgttatttaacctatttaacccaatagattaaaaaactgtcatttctagatgtgtcactagccacatttcaagtgcgcagcagccaccctagatagtccagttttagagggtcagaaaggaaaaccaaggagaagctcaattttccaatcacatgttatagcaaactgtcataaataagaacggaaacatagtctgataatcagatgggcagaaccagatggcacaaaggtatatctcaaatttaaaaggcacatagtggggttttcctaaagttcagtctgctgaggmcattgtagtaagagctgagcattcctgacccttaatactgggggcctggtgtttttctggttgctttgtttgcttgaaggttgttgttattgtttagattataacctttttctttattcaacattttatccagacttcaatgtatgaaatagatgaaagcagggcatggaggtaaagcaagtgttattcctatcagcatggcctccaactcccttcaaccccttagtcctgagacatctcagatgaagggctgtggacagcacaattcaaaagctccttgctctgaatcaatatgaatgacacatttccttcaaggaatatatcagtgttacrtaggccatctaatactaaaaactcagccccaggaaggatgcatgcggtgatccagtacctctggatgttgtccacaagcctggccaggcgctgctgccggcctgaaggactgagacgtgtcttttcagccacagccttcatcagctggaaatcagatgttgcctggtcagtcagccctattaaatgcaaatgaagacaaagtgagaaaatgaacataagcaactcagcccatcaaaggcccagtttaaacctttccacttgaatgcattcaccatctgtatagcacatccaatagaaatgaaaaccacgtawgtcattttaagttttctggtagccacattaagaaaaggcaaaaaagaaacagacgaaattactttgaatagtgtatattatttagcccagtatatccaacatattatcattccaacatgcaatcaacataaaacatttattgttgaggtagtttccttcttttttttcatactaagcctttcaaatctgggctgtgttttacacctaaagcacacctcctctcagtcttttagtagagctagtcccaattcaagtgttcaaaaactcatgtgctactggctactgtattgggtcctgcagacctacaatatcagaacaccattaagaatgagcaccccttaggccgggygctgtggctcatgcctgtaatcccagcgctttgggaggccraggcgggtggatcacctgaggttgggagtttgagaccagcctgaccaacatggagaaaccccgtctctactaaaaatacaaaaytagccaggcgtggcagtgcttgcttgtaatcccagctactcgggaggcagaggcaggaaaatcgcttgaacccgggaggcagaggttgcagtgagccaagatcgcaccattgcactccagcctgggcaacaagagtgaaactccatctcaaaaaaaataaaaagaatgaacacccttcccttcaaggattatatcctcattaatttttctttctttcttttcctttttttttggagacagagtcttgctctgtcactcaggctggagtgcactggcgtgatcgcggctcactgcaacctccgcctcttgggttcaagtgattcttctgcctcagcctcctgagtagctggggttacagacgcgtgccaccgggcccagctagttttttatttttaatagagatggggtttcaccatgttggccaggctggtctcgaactcctgacttcaggtgatccgcccgccttggcctcccaaaatgctaggatgacaggtgtgagccaccacgccggcccttcttattaatttttctaatggcaaaatagatatatacacatcataactgactcaaggaacacacaaatgcaaaacgtagaaagtcttcacttcctaggcctacctgttagtcaaaagaacattgttaaaagtactcgaggcagttattcagattttactgtataatgaggattatattctgaaaattcacgcaaaaagaaagtatggatcattctggcaccactctactgatacacctgaagaaaatctgagtcacattccttcctatactagtaaattcaaataatggcaaagagaaacttggttttaggatgatatcagggggtctattttacatcaaagtaatacatggaatatatgagataaaggraatcgattcccccaacatgtctctattattgaataaattacttaaaaggaccatcctccatgggttaaatcgatgtcctggcattcatgtaacttaaagagggtctgcccactrccaagcatcaggggcctgtatccaggagcctgacagaggtataaaacacaaacattacctgttagaaagcagagctcaggtatcaggtgggcgagctgagcctcactgttgtcatttctcttcttctttaacagactaacaagcaygggctgattyaggtccgatacagtaatatcatactgctataaaatgcaagattaataagtaaaaagttaacatggaagcaccgccaggtgagcatccttacattcaacaaggtgatcctaacattaatatataaataaatctaaccaatcccatagttacctacttattgctactttcttcccaggacctatcttttatatctgagggccagttttattattttaattatcttttctaatgcaacaccattaaaaatatcgtttccctgctgtctctyggtttcagccagattcagaatagactccagctggttctacacatagttcaatgacatcactgggactgactcagagccagcatttctactactgatgactgaggtagactgccccatgcttaactatctggctctaaacatctatattcattttgaaawtatctatacacaagctggaggcgagttatattgagacaatctcagawttcccaaaacagcatgactgtccttaccttctaggatagtaggatgttacggggaagcagccctgaagtctgacaaatgtgaatctgatccccagctcttctatttgcttgggctgtgacactggggaagtgacttaactttcctcatctatgaaataaggataacagtagctcacaggtatcctgtgtaaaccactagcatggggtctggtttataatgaatccccggcaactgttagttcatattcctctccctttaccatcctaaacttaagtttcagcagtctcaccttggcaaaagctcatttaccctctaatgacaaaggttacaatgaacactcatttccattataatttaatccacattagtgacagaacaactggaattataatttayaaaatgcctgggtattgtgacactgagatcaataatcacaatwaaagaagtcaaatgtgagcatttctatatttcaagaaaaactttgtcattaaaataaaaaccaagtcaagaatctcatttgaaagtagcaggtrcaactgatgctatggctaaaaagtttggagaagcctttatcaagtgagtttgtatgcatgactccattaatttagaacacatggcgtgcttactgtgttccaggaacggcagtggataagaaaataaaagaggcacagtccctgcctttctgcatcaatacattatctacaaagcgaggtccacaagaagcacaaacaatgcttaacaaagcacgataaagcacaacaaacygatgaaagagatactattattgtcccctttgcagatgagaaaacactgtgaaacattaagcaatcttcccaaggctccataactggaaattagcacagctaggattgatctgttaagactctgcttattataccactcagtactggatccctgggctggagtgggaggggtggggaggaaaaggagatggtggtagtgacacaattatggctggcaaatcagggaagcctccatgcaggtggagaccaagagaggaccttgaagaaaacatgggagtacggatagtctcaggtaacagctccagcaaaacaaaggcatcttccaggaagaaggactctagctggagcatggtcaagaactctagcccctaacctgctctcacaaggtaaatgtgaccctctcccttgccccaattttcttagcatttgaaaatactttgtatgataagataaaatagagaaatataaaggtcaatatcaggatgtcttccactttgaaaactgactacataataatyagtctttctttcctgggacagggaggagggcatactagaagctgtcacagttttctttcttttcctccctaattacaatatatatgcagtgaagcacaactcatttcaaaaaaacagtgactgggatttttaccatgattcccgtttcagaatgtcacaggtcctaaaatacttctgtttaaatatgaacaaatttaatcatgcaagaaagaaacccaaatgtttaacaaactgttggtttaataaacacagaacacattttatgcacaagatgttttgctagatactatgcatcaaggattagccaaacaccatccttgctctccaaggaatacgtgttcaagaaacaatgtgatgaatgcacaggtacttagaaaggagaacagcttgctcttctacgtgtgtgacagaaagcaaagtcagagaggacttcacacttggccttgaagctaggatttgacctaggggtaaaggagaaaggtacagcrtggctttctgcagatgcctagtgaacacacacaaaggctgaggaaggtgtaggycagtgagtggatggggtgataaaggcatggggtgcataggagggatgctgagaaatataagaaagaaagagggggccaaactatgcagtgctagagaggaagaagcagaggatagaaaaggaggagcatggtctccactgttctcccagtgctcacaaagtgcaggcacacttcagtgctctgtgtgcataattatcttactcggttcttacactacaccatgaaggtagacagataaacttcctttacacatgacactctgggtttagtgatttacccagggttacacagctggagccaggaccatcttactccagagcttatgcttgtaatcagatttctgggcagcacttcagaaagatctctctgatggctgtgagggtgagggatcacagtgaggagagagctagggcataaagagtgacggtagtgggaggggatccacragatggcctgcattaatgcrgtgggaacagggctggcaaaaagaaaattcacggataaaggatacagaactcgtcttggtgacaagtgaatgaggaggttaaggtgaagaagaggaagaaagcaaaatcattcctatctgagctacagaatttccaaggagaaacaggaatgggaaagacaatgaattcagtctgaattatattagtttgagatgcctgcagggtattcatgcaaatatgttctggaaatggagatgaatatgtaatttgggaatgagggctaggcaaaagcactatatttgagccatctcaaaatacaatgaaaaggttctatatgagggaaccatggtgaataatggttcctttgtgaggaaggaaggaggaaaaygtcaaaggagactaagatagaacaacctgaaagtagcagagaaccgcagggatgtgtcccaggagtcaaggaaggaagagatcagttccagccggtgggagaggtcacaggtatcaaatgcactgaaagccctttaggataagaacagtaactgaacttgacctttctagaactacttctaaagcagcataactggataccagactgctgaggtttcaggaaggaagaacagaaaaggtgcttggagctagtgtaaatgactttctaaagttagctaaggagaaaaagagcttttcctgaaagtgtacaatgatcaagaaagggtttttgtttttgtttgtttgttttaacctgaatattactatacattaaagagaaggtgctttcaaaaagaattgaacatggaagatgaggggtaaggataactgttgcaaatgcgrctagagcttctagaggcagcaacagattccatcaatagtttcttgagtatctaatatgcgcaaagcactgagctagtcctgggaatccaaaaacaaggagccccctccccagagctcaatgtctaggatggggctcagaccattcgtgtggtgcctgtgatgacctgagacagggaggggattctgggaggaatgctttggggctcccttgagacttgatggctgagctgagtatgcaagggtgtctagtgttcgtctggctgtgaaggggtatccaggaaaaagaagcaacgtgtgaaaatgcacaggggagaaactgagtcatggaatcacaagaggcaattacatcagagccagggaagggagcaggggaatgggaagagatgaggctttaaaggcaggaattggccacatcataaggagatttggaaactctgctaaagggcttacrggtggtcctaaggcaataaggagacatggaaatgtattagcgttgcgagcagtgtgatcagatatgctttaaagggagattactcagactacaggaagaaggaaacaggagataggatgagggtcaacaggagactgggagggtggggatgaaggagagagacaagtcagagaatcaggtcggaggcagactcagcctccaatctgggggacctctgagacttggaataaggagacttctctgaggtaaaagaaaaggagatagagatgcatgaagaaaagtcctacctgcttgtagtaatccacataggtgatctcggtgccatcccgcttctgaaaggtgtgtgtgggcttcactgaccagtcaatgtcatcaatggagtaggttctgttattgtatctgccaaatataaaaagtctttaaattgttttttaatcatctaacataagcagctacttcaccacacttttaattcaacacataagatagactccagaatgtcagaaattatgaaaacaataaaacaagaatattcactttttaaaaaatactcagctcttatctgaaaagggcattccttaataatttcctatacaggaagacttctgtccacattccaacaaaacctgtgggraagtccttagaccacagtctagttttctcactgatagatactctaacttcaggtaaatcattcttraatgttcagaggctgaagcattgctcaaaactttcccattatcttctggtgtcactcaagagtttctgacctcccaggtagtttttctgattwaaaaaagcaccaaaagaaggccaatcaacccacaatgctggcrtcttgcttaacctacccgctagggctggcccttggcaaaactacaaaacaggttagctaagattactctaagctccttctccccttcagcactgtgtagcctggactgtcctctcaggatgacctagcctaggggcagaaactaccacagcaggtttctctagagcttttgattctttccaagatgactttgaaatgtgataagctaatccatcaagatcatgacaggaggataagagggtagccttctcataccgagtagtgtggaatccagccagtcccacccctctgctatatatcccagaaaaacaagtttaagtggaaattctaagccagaatagaaagctaacaagtcccctaaaagaagtatttttgcagccataaaaaggaacaggatcatgtcctttgcagggacatggatggagctggaagccattatcctcagcaaaccarggcaggaacagaaaaccaaacaccgcatgttctcacttataagtgggagctgaacaatgagaacacatggacacgaggaggggaaaaacacacgctggggcctctcaggtgatagggtcggggggagggagagcattctgaaaaatagctaatgcatgctggatttaatacctaggtgatggttgatagctgcagcaaaccaccatggcacacttttacctacttaacaaacctgcacatcctgcacatatatcccaaaacttaaaataaaaaatttttaaaaagtgttcttggactagcagcagtatatgtgagctttttagtactcaggaagtcatctaaattttccgtgtttaactcagctcaatgtgcaatgagggcaaattttatatacataaacctagaggttgcaaagaagtaaaatgtggtctcaacttaaaagactcctgaatctaataaagaaggtgagacatggaactaaccttctgtcctgtaaaatgaaataagatggccacaacaaggtagccataagcaaagtgctatgggcgccgcccaggggaagaaactgaataattccaactaagtaggcaaatggaggtgtcagaaaagccaggacattagaattgagctttgtgaaaactgaagtttaaaaggcagaatttggggaagggaatccaggcaactgaagtraactgaattgaactgaactgaagcatgcaaagtgcagaccgctgggggttagaatagagagtggcattaggggaaaggagggtaccgcaagcgagaatttggagcttgtggacagtccagaatgccacacaaggacatgtgaactccagacagcaaaacaaccaggtcttctaaacagatgagtaaatggattagatctgtgatattgggccaatactccaacactattcctattcccaaataccatcaatgattgatttctgaagaaaagtttatttagacgcaggcttgtaccttgtaaggacaatgagccctattagctgcttctcacacgtctgggtgaaacaggacaagccagttctttgacagagagcagtcatgaattccagaaccgtctcattccggaggactttgtaactcacatcagcactaaacaggagcttcctttcaaaatatgacacagaaatggcraacccaggccaaagggataatctttaaaaacaaaaaagaaaaaaaggaatattgtcaatgttataccggaaacacaataaagatttttaaatggtgattttctgttctaattctcgagatcttaacaagataatttttttctttagtctgatttcttccagttgttgactgaaaactttttttcagctgcagtgtctttaagcatacatttaggataaaataccttactgtaaagcagtttctcagctttggcaccactgacattttgaactggataattctttgttagggaccgtcctgtgtactgtaggatgtttagcagcatttccctggcctctacccactagaygccagtagcagcctcccagctgtgacaaccagaaacgtctccagacaatacaaaatgttccctgaagagkggggggawatgtccctgcctgaaaaccgtaactataggaataatacatttatggagtgatctgtccccgcaggaaaacatctaggttcagaaaagcaccccaattcaaaggtgagggcagtggatagatttaatgacgagattaaaaaatacaaaagtgataccacaaacagatatacaagagaaaccggaacacagcctacagtttcttcccacataaacttaaaaatcttgaataagaagttacagaaatggcatgaaataatagackactattttaaaaaataatkccagtttatattttgtggactattaagtagacactgtgatactaagccagcctccgggacaggcatatgtgctgagcacctagggcagtttagtacaatcagcacctatgagattttctaatccgggtggacagattagtgacaaggacgaattgggtgctttatagagagcacgctgacactctgaatgaacatatggaaactccgtcatttttcctccaccaagcagaaggccaaacacccyactcccattttctatcttttatgcacttctccctttatgaatctacgtttgggctaccagttgcctctctgtctatagtttgaccacagtatttttgagagctaagtaacaaccagttcaagacatagctgaccactttccctgaagcctcgaattcccagtttaggtagaaattctgcaggtgttcataaggattctatccttcaccagagttatttggttggcttctctttctgacccgcgctgccctgccaatttcatgtcaaccactctggctgtgctaacaacctttcaacaacaaaatacagctcatcctgctttcattattacttattacacacagaaaattcagtttctgaattccttctaggatttgtgataattatctatcacactaatrtaagaaaacaaagctgctagcttcacgttcacatgaaccattttattaaaaaaacttgaaaattataaaaaattcattacatttcatatcacagagtctctcacaggaggcataatggtataatattgcatcataaattatgttgctcacattataataatttcggagtaacagaaaatataaataaacctacttgtgctggggaatttccattggctctgaaggattatagaagttccgtccaatttggtacatggacaactttttgaggatcctgcaagtatatttttttgaatttttggtaaatatcagtcagtaacagtgtaattctaagttcaaacccttactgaacataatgttaaaaatatataggaaatacagacctctcattctcacaggwctgcaaggtttagatactaaatatacatatgaatgtctataaagaactatcacttcttcatatttgagaatactacaactgaaattatttttatctgtctgggtttagctgcagtgacaaatatgtggtcaattagccattatgggtagtaacattctggttagcttggatggggtgagataagccatgcctgcaggcctttttgacctcttccctacttggggatgaagaccttatttctttttctttttttgaaatggagtttcgctcttgttgcccaggctggagtgcaatggcgtgatctcagctcactgcaacctccgcctcccgggttaagcgattctcttgcctcagcctccgcagtagctgggattacaggcaagagcgccaccacgcccggctaattttgtatttttggtagagacgaggtttctccatgttggtcaggctggtctcgaactcctgacctcaggtgatctgcccgcctctgcctcccaaagtgctgggattacaggtgtgagccaccggcccagccgaggatcttatttctaatgaggctgctcaggctccccaggtactgccaaatgaccaagactgtgtcttcagcaagtaatcctggtcaccttaggaatttgacctacatgggggtttcaagtcaggaaacgcgttycaactgtgattttggctgccaaatgtcactgagcctaagcccctttctcttaaaaataaggattttaatagcacttgcctcgggttgctctagtgagggtaaagtaagataaaagacaagtgaaagaactttctcactgaaagcatcttccaaatgtcagcatgcaagactggcttctgaagagctgatatgcagtaagctgaggctcagatatgaccaaaaggtgctggacaagacatctgactggaattaggaattaggacatctgggtgggggaagttcctgatgtgctcatacgactcaggaaatccccaaacttccccatcttcatgccttccagaggtcactgttgaacaaagaacttgcctgtaaggtttctaacagatcatcttaatgatccacactagcagcatgtaaaacagtggttctcaagcttcagtgtatcctaaaaatgtgaattttcaggcctatctgtgaacttctgtttactaactagattcagtgaaggtccagggaatatgccttttatggagctccaytccacccctaagaagacgctggagtatgtgatccttagaccagtctgcagaacactgaagagctgagctacaaycatgtaggtgtgggggaaagaaatgggctgagggtggagccagggcagaaagcagacagtgatcttctttcctaaatcaatcggctaggagaaaaacaaattcttcagtttattaagccaaacttaactaagtttgctaaatgaacttttaagtctgggaaaagacacagaaaaagaagaaaaggaaaagggtaccctccctgctaccagtgagacagcaataatccccgtattatttgtctcaacttaggacaatactggatattaacagtctgtgccactgagtggctgtaatgggctgcattgcacattattgttcatgtaggagaaggtgcttgagaaattgccctaacggtggcatcactgctggcacactgcctacaaaatggtcgattattttaatacccaggctctatgctgaaaggtatcattagcccaaattaaattcacatttccagtgccttactttctgaagatgatattgaagacctggatgcacacgggagaacttgatggcagctccctcttcagggtgatagtcatctttatagtctcacctctttgagtttcacttgacaactctgtgacctgggaaaaagaggtacttaatatgcaccctacaaattatccccaagtgtgcagaatgcagattataaagccatcacaatgtaatatgcattaacaaaaacaaaactgcaggtgttagtatgagtaataatctaatcatcacattatgttcagagggctttttttctctgtatcttgccaatcctaaaaaaacaacacatctctctactctctaacttcttaagggagaattaaagccagactcatggttcaaagtttggtccaaagagagttccagagcagtggttcttgatttttctagggagcgggagggagatgggtcacaaattattttgagagtctgataaaagttagatatttctcaataaaatttcacacacacacacacacacacacacacacatatatatatatacacacaccacaacagtgtacataattgtacccattttcagggtattcactgatactcagaagcccactagtggactgtcctgcccatcccaagttcatggattccagaggacagcctcccaaagtctgtttataatgtagaagagcagagaacaagagagaaggaaagaaaggagagaggataaatgagagggaaagtaaacatggggagagagaggaataagtggtggaaattagaacagatcagaaatctgattttataaattgctgaaaggtctagagaaacctagagtccttataacttggaacaatgttctagcaatataatgaacacatgaatatgattctataacagctcccactaaatgtaaagcttcttgaaccagaaaggactcagaataggttcttgaaataaaggaatatacaaatcagtcaataaatatcaatcaatgatcatggatttttcaaagggataagcaattagataaagtcagctaattagcaagcatttatgtattctgcctctactttctacagctacagtatggttgtaaccacttttagattgcatcaagaatgtaaggcaggaaccagtcactgcatggaaacaaagagaaactgatcttttcacagggatgtaagatttcatcgagataatttcttgcttcagataaaattgtacagaaatcagaggtggacagctatagaaagagctcatcaacatggggaaaactctggcagacagaagggatgcccacctctcaaactgctgcaggggctttggaacaaaggattaagacaacaaaggatgtcttaatcctttgggatgagtggttgaggggaggtggcagcagatggtctcaggaactgcattttcaacaaccacctaagakcaaactcttcagccccgccttgtacctctcccaccaaacacccactcctgtttcacttcctacatctcctattggacctcagaccctccagtccccaggctgctaacctcacagtaaactttcatttctcctcctcaattcacaatctaatcagatggcaagtcttattgtatctacaccaggaatgtctctgatctatctcagctgttccaataccattatttaccacagtgcttaagagcacatgatgtggaattggatggaccctggtcttctgcctcttacagctggtgtgatgtggaacacctttctgatactgagtctaactaaagtcacagggttgtgacgattaaatgagataatgcattgattttacttccatccattgcacaggcactcaggaattcaaataaatagcagcactttgtatctcttttcaagccctttcgacaccctgcccacactatttcagtggcactttactactcttcccacctccttctgtaaaccattcaataggatgtgatcagagtaactgtaatttaacacagctgccatggaaatgctctccaacgtcttcagtgatccatggaagagtctctgttccttggcaggacatttaaagttctctttacctttgaaatcacaactyccacaccttcctagctaaacctgaatgagcaaaagtttctaaaatatggccctcacttcccatcattgcatgtttgcctcttctgcctaggaatcccatatctcccattgtccacctcactgatcaaaatcctaaacaaggaactatcactctcgctcaggtgtcctgctagaaatawtcttgcctttcatcaagctctctctgacaaccttgggcaatatatttagcctcactaggccccaagggtgatgacaggattaaatgagatcatgctataaagagcctggcaggccgggcgtggtggctcacacctgtaatcccagcactttgggaggctgaggcgggtggatcacctgaggtcasaagtttgagcccagcctgcccaatgtggtgaaaccgcgtctctactaaaaatacaaaaattagccgggtgtggtggcaggtgcctataatcccagctactcaggaggctgaggcaggagaattgcttgaaacccaggaggtggaggttgcagtgaatcaagatcatgccattgcactccagcctgggcgacaagagcaaaactccttctccaaaaaaaaaaaaaaaaaaaaaaaagcctggcagagtaagtgatcaacacatgtaatctgataggtgtaactggtagtagcagtggtggtagcagctacttgtgggacacaaagtatagatctgctcaagagagagatgttgaggataacctggagaacaaagaaggacagtacttaacacctagtaagtgctcaataaatgctagcataataaagatactaattattatgacacttatttcattctaccttacatagtatttatttgtaaagaacttttattcgaaattgaaattttggagaacaagtactctgttttatttayctttgtttgctccatggtcgcaacaccctgccaggttcagagtaggctctttataagtatatgagagtggcaaatagatgtggacatgaatagcaacaccagtctggctgcaggtgcacagataggacctggacagtggaaggctaggaggcagctgaacaggaatcctggaactcctaggagttcattgcgtcaactagtggctgagatgtttcaacttaaataagcatcctaggacatgtgtaggggatgatgaggatgcagaattaagcctcagtcaataccaagatcagaataaaaaggtgagagtatcttcattaggacactttcttttgcactgtaactgggtgacaggtcatatgtttataagaaataagacaacactattctgtttaaacctagtatcccctatatctgggaaataaaataaacaggcctgatttgtcacaccatgtttttatggtctattttctcacttgtccccttattaggctccattcccagcaacagaaaggtgtttgacacatactacatgctcattttgaatgagaaatgagtagcagtaacatattcttagcatttgtagcgtatacggtcttcattctgtttaggtacaatggaagtaagctggacacttcaagggtagtatttaataatttcaacgtatctaaatttctaaactagtgctagaaatgtatctacaagaacatttttaatggtaacaacagacttraaatatatcatttaagtatgagaagccatattagcgtgctatcaacatctggtcataggacaaagaattgaaggatcaataaaaaattatggtgaataaaaatgtttcttaatttacaaatctagattttctaagccattaaatttaatcatatggtataattttaatgttccatatccaatgcaacaatcactcaagcagctcctatagatcccagggtctcataaaaggcaaaaggcccaagagtgctaagaaacacatttcatgaggaaattcacaaacacttacctagagtctaaaaatttaaatctaagctattggtaccatactctgcaaacaaacagctgaaccaagggactaagatttctaagggatagaagcataaaattttaatccaatgctctgttttaatttttcacacagaaattggttctttttttcttgtagtaattgtaacattgttttagaacaaaacatatgttaaaaacatccataccatctttattttaggactgaatatgtcaaatgtgtaaaaaggtggataaaggaatatgaaatacacaatagctatttccaatggttgcattaaaaaaactttaaaaattgatataaataactcataatttcttatgatcgagcaagtagttaaataaacggcaattctagaatcaaaaattgatgtaaaattatttggacatacrggcacaagggtgcaggagcaaaaaaakgtagaattaatttaaagttctgaagccataggccaaatggtgtttcttagtcttgcctactttgggaattattttttaaggtgccaatttcaaggacacttacagctcttattttaaaaataccagaccaccagcttcataattaagaaatcaattactagtgaaatcttaattaggaagtctttttttagctctcaggcaagggaacaggaaaaaggaaaggagtgattcactcattccaactgtcatgaaaatcaactaatctcttaaatatataagtatatatgaggagacctcaaaaagttcatggaaaatatgtattatgaaaaaactatgcatggatttcaaaaattttgcacccaaataaactcatactaacaggatccagtgtgagacactaagaataagacctcaatttgaacagagaccctgtcagagcaatatgaattctgctatgattgaagccagaacagacatcaaattttggcgatacttgggtagaagaatggcaaaatcattgatgtataatgaaaagtttatgggaacaatgccccaaagaaatcagcagtttacgaatggataactcatcttaagaagggatgagacaatgttgaagatgaagcctgctgcagaccatctatacagatttgcaaggaaaaaaaattcatcttgttcatgccctaattgagaagaccaaagattaatagcagaaacaatagccaacaccacagacatctcaatttgtttagcttatacaattctgactaaaaaattaaagttgagcaaactttccattcaacgcttgccaaattcattgcattcagatcggctgcagataagagcagagccgtcaataaaaattttaaataaatggtattaagatcctgaagcatttcttcaaaaaattgtaagaggagatgaaacctggctttaccagtacgatcctgaagacaaagcacaatcagagcaatcactacygagaggtggaagtggtccagtcaaaggaaaagccaacccatcaagagcaaaggtcatggcaatagtttcttgagatgctccaggcattctgcttgttgactttctggagggccaaagaatggtaacatccgcttattatgaaagtgttttgagaaactttgccaaagcttgagcagaaaaatggccaggaaagcttccctggaaagcaccacaacaatgcttctactcattcttctcaacaaacaagggtaagtttgcaaaagtttcaatgggaaatcattaggcatacactttactgctgatttggctccttctgactttttttgttttataatcttaaaatataaaacaatgtaaagggcacccatttttctttcgttaataagctaaaaaagactgcactgatgtggttaaattcccaggacccttagttctctagggatggactaaatggctgatataattgcttataaaagtgtcttgaccttggtaaaactcttggtaagaaataaaggtagttttttaaattcttaccttttaattctatttttccacaaaccttttggaatctccttgcatatgcatatatatgtgtgtgtgtatacacatataataaacacacacccacatatacagtaaaaaaactaatcatactataccttttcttctagcttttgtgacagaaaaaggatggcaccgtcgaatgcttttgctttgttggaaagttcactatgactataaagtaaagcaattctcagccttctagatgctaaatctggaatatatgtcacatggtactggtatagctgccagtcttggggaaaatctaagttaaagaggtttgtaaccagtttcacaggtattccactggaacctgaagaagacaaacaaaaaacaattttttaatcaggaaatcacatcatgttaatattaatcacaccatttaaaaatgtatttgcctatgcatagtagttgctttaaagcaaggatttttgcacagtgacacaggataaatcctaaaacttgcagcctaataacacctttgggagctaaaatgggatcatgcatgaaacaggcctcttaagaacatacgagcagacactgacattcctgtccttgtgagacgagaagcatctgaactcaaccattccaggacacctttcaaagcttgccttcccgctctcattctctgcaattcaaatcggctcaagtaatattttcagatgctgctctgaaattatactgctctcataaagaaacagtctggttcttactatgaatatacaacccccaacctctgggaaatccagataatcaaaagttaatcatatttctgaaaattctgaaaaagttatatcagtggttagaccaaacaatctcagagaagaccctcagagattaaggggaaggctgcggagagaggaaggaactgtcatttttccgacgtgaaaacagacarggtttctgggcttctgttttctgcagacacatggaggccatgtgtgcttccgggacttccagccccttacagacatttttattcacatcttaaaagtctataggacaaaatcagagatggccacgatatagtcagttagtgatcaggatggtgtaagctccccccagggtagaatccaggagggtacaaaggaggttcttctcacttccccttacagagaatcatccagttttggtcttatagaaaagaatgatatagaggctgggcacggtggctcacacctgtaatctcagcagtttgggaggccaaggcgggtggattgcttgaggccaggagttcgagaccagcctggccaacctggcaagaccctgtctctataaaaaataaaaaattaactgggcatggtggcccatgcctgtaattccagctactcaggaggctaaggcacaagaatcgcttgaacctggaaggcagaggctgcagtgaaccaagatcgcaccattacactccagcctgggcaacagagtgagacgctgtctccaaaaaaagaaaagaaaagaatgatatagaatagatgctattttgcttttctcatggaggaaagcaacccagagactccaaggtggtgaggaatacaaggtatcagctgtgcttcagtatttcctcagcttcaacctggggtatatatctggtaggagcaagaaatctccgtgctattttagttaaataacagatctcttttgttctcccagatcctgaggaaatggcaaagcaacatattttagctgctcatataaataaagagtagtcaacctagactgtcagagccggaaagacccttcaagatcgtctacatatgatagttttcaaacggcagctgggtcccattagtgctgcagttatgaaatcaggtgaggtgaatcgcatgtttaatgaaaagtccagaataaaacagaaaggaagagacgcattgtttcatgaaacttttgcttcagttgtgtgtggacagtgtgtgtatgctggataataatatatttcttattttggtttaaaaagtttggaaaacactgatccgcatcagtgagttttaactttcgtgaggtggccacaaagacttttgagaatccaatgaaaacaatagacctacttcccagaagatatatatactgacaatttgcatgcaattttatgggtgagcctggaatctgggtaaagaatcccccaaataggttatgtctttctttttacagctgaagtccagaaagatttttacttcccatgttgggaaagagaagaaacatctttttaactcccaccccagtatatgaagaaaatcttttccaaaagtgagatgtcatttgggggaagatattatttctactaataaaagagaaaattaaggctagaaaattaaagcgtctaacagtgccttgaacatagaagacaatcagtaaatatctgttaagcaaacatatgaacttatttattttagacctagaatttggaagtccttaagcaagatttggtaacattaaaaaagtaagtgacataaaactgggtacctgttttacaatttctcacatgtgccaatttttctctggtacagatactcaaatccataaagtcctgtttgtttttcacacctctttccatgaaggtacttccagcatcaccagaagatatcccatatttatctaaaacatgaagagaatgtggtaacagctaatatttcattctagtgatactgtttgcaactactatgtcaaaaatgcattgcaatccaaacttgtggttttgaatacagtttgcccatattgctgaaaccattcatgactattacagaagtcttcagcctaaaaacggaaaattgtgaagaaaacacagaacgttttgttaaaaataacagatcttggccagatgtcgtgactcatgcctgtagtcccagcactttaggaggtcatggcgggcggatcgcttgagctcaggagttagagaccagcctgggcaacgtgttgaaaccctgtctctaccaaaaacacaaaaaatcagctgggcgtggtgacatgtgcctgggctgaggtgggaggatcacttaaacccagaaggtgggggtagcagtgagccatggtcacgcccgcactccagcctgggcgacagggcgagaccctgtctcacaaaaacaaaaacagatcttgagttagttcttgcccttgtaatattgtagactttcacttcttggctaaggagaaagccctccctccccattcccttctccatacctatttagggagggcagctctcctgccgttagctcttgtgtaacaccctgaaggattacagactaacttctgtcctcagcaacttctgcccagaaagaagatgaatctgacatttcccaaagaaaagaagagaaattgcccagaacattgccatcagtttttattctaggtcattccccctaagaataaaagccagtgtttcacctcagggcatatcacttactgacagcttctagaaaacatgaaattaaaatctgtttccaaatgagtattttctgtttaaattagtacgggrgatgctgactttctggcatgttgaaaataactttataaaaatacaaaatgttactgcaaagtaatatgaatttctagaattctattaccctcactaaattgtccatataagccattgctcgtggtttcaaaagatgttaggtggtttctgaaaattcaagctaccatagtatggcagttaccaggagctggagggaggggggaatgggagttattaattaatgagtacagagtttccattttgcacagtgaaaaaagatctaaagttggatggtggtgatgaytgcacaacaaaataaatgaagttcatctcccaagactgcacatttaaaagtaatttaaatggtaaattttatgttatatatattttaagataaataaataaaactccaattttccctccaaggatgaaggattttcatcattcactgttcataacaatgtgcgcatatcaaaaagcttatccaccacgatcaagttggcttcattcctgggatgcaaggctggttcaacacacgcaaatcaataaacgtaatccatcacataaacagaaccaaaggcaaaaaccacatgattatctcaatagatgcagaaaaggccttcaacagaattcaacagcccttcatgctaaaaactctcaataaattaggtattgatgggacatatctcaaaataataagagctatctatgacaaacccacagccaatatcatactgaaggggcaaaaactggaagcattccctttgaaaactggcataagacagggatgccctctctcaccactcctattcaacatagtgttggaagttctggccagggcaatcaggcaggagaaagaaataaagggtattcaattaggaaaagaggaagtcaaattgtctccgtttgcagatgacatgactgtatatctagaacaccccatcgtctcagcccaaaatgtccttaagctgataagcaacttcagcaaagtctcaggccacaaaatcaatgtgcaaaaatcacaagcattcctacacaccaataacagacaaacagagagccaaatcatgagtgaactcccattcacaattccttcaaagggaataaaatacctaggaatccaacttacagggatgtgaatgacctcttcaaggagaactacaaaccactgctcaacgaaataaaagaggatacaaacagatggaagaacattccacgctcatggataggaagaatcaatatcgtgaaaacggccatactgcccaaagtaatttatagattcaatgccatccccatcaagctaccaatgactttcttcacagaattggaaaaaactactttatagttcatatggaaccaaaaaagaacscacattgccaagacaatcctaagccaaaagaacaaagctggcagcatcacgctacctggcttcaaattatactacaaggctacagtaaccaaaacagcatggtactggtaccaaaacagagatatagatcaatggaatagaacagagtcctcagaaataacaccacacatctacaaccatctgatctttgacaaacctgacattaacaagaaatggggaaaggattccctatttaataagtggtgctgggaaaactggctagccatatgtagaaagctgaaactggatcccttccctacrcctcacacaaaaattaattcaagatggattaaagacttaaatcttagacytaaaaccataaaaaccctagaagaaaacccaggcaataccattcaggacataggcatgggcaaggacttcatgtctaaaacaccaaaagcaatggcaacaaaagccaaaattgacaaatgggatctaatgaaactaaagagcttctgcacagcaaaagaaactaccatcagagtgaacaggcaacctacagaatgggagaaaatttttgcaatctacccatctgacaaagggctactatccagaatctacaaagaacttaaacaaatttacaagaaaaaatcaaamaaccccatcaaaaagtgggccaaggatatgaacagagacttctcaaaagaagacatttatgcagccaacaggcacatgaaaaaatgctcatcatcactggccatcagagaaatgcaaatcaaaaccacaatgagatgccatctcacaccagttagaatggcgatcattaaaaagtcaggaaaccacaggtgctggagaggatgtggggaaatataggaacacttttacactgttggtgggactgtacactagttcaaccattttggaagacagtgtggcaattcctcaaggatctagaactagaaataccatttgacccagccatcccattactggatatatacccaaaagattataagtcatgctactataaagacacatgcacacgtatgtttattgtggcactattcacaatagcaaagacttggaaccaacccaaatgtccaacaatgatagactggattaagaaaatgtggcacatatacaccatagaatactatgctgccataaaaaaggatgagttcatgtcctttgtagagacatggatgaagctagaaaccgtcattctgagcaaactatcccaaggacagaaaaccaaacaccscatgttctctcttataggtgggaattaaacaatgagaacacttggaygcagggtggggaacatcacacaccagggcctgtcgtggggtgggtgaagggggsagggatagtattaggagatatacctaatgtaaatgacgagttaatgggtgcagcacaccaacatggcacatgtatacatatgtaacaaacctgcacgttgtgcacatgtacccttgaacttaaagtataataaaaaataaataagaataaaaaatttttaaataaaaaaacctaataacaaaaaaaaatgtgtggcagatgtgaaaaaacatttgcaaggatagaataatgtttgaaaataatggagggcactgggcctgtcagagtagggcttctgtgctcagaggctgcacattcatttgtgtgtttggatcacaggggtacatacacaggactggaaaactcccagtgaggaacagcagagtcagacatgagatgggtggggggaccagaccctcagagtctgggagaacctaatgcttagagcttccacatttattagaaatcaattgcttgtgaaaataaaaaacaccggggtcagaacaaaagagatgactaaattgttttttttgtttgtttgtttttgtttttgtttttgagatgaaatttccctcttgttgcccaagctggagtgcaagggcgcaatctcggtttactgcaaccgccacttcccgggttcaagcgattcttctgcctcagcctcccaagcagctgggattacaggtgtgcaccgccatgcctggctaattttttgtatttttagtaggaacggggtttcaccatgttagccaggctggtctygaactcctgacctcaggtgatccgcccaccttggcctctcaaagtgctgggattacaggcatgagccatcacgcccggcctggctaactggttttattcagggtcacaggctacactgtgttcccccaaaattcatatgctgatgtcttaacccccagtgcctcagaatgtgatcatatttggtgacagggtctttaaataggtgattaagttaaagtgaggtcattatggtggttcctaatccagtatgactgttgtcataagaagaggaatcaggacatagaaatgcaaaggaaagatcatgtgaacacaaggagaagacggccttggataaaccaaggagagggtcctcagaagaaaccagccctgtccccaccttatctcagactttaagcatccagatttgtgagaaaataaatttctgctgattaagcctcctacttagtactactttgtcagggcagccctagcagactaacacatggggcatgccaactcacagtgtgtgattgtggtgacttggagtagcatgttgacaagtatcctgagaccaaatctggctttgctgtgaggagagctaccmttgaatggtgatgtttaccacaggaggggaagaaagagagcagttggctacatgcactggtagataccaggtttctaccatccttccaagcmatggcattggcatttatatgccgttcagattttttttttctgcttttttaaaaatgcgtatacatttaaggcataagagcatagttttgttacatggatatattgcatagtgtgaagtctgggcttttagtgtaaccatcatctgaataatgtacattgcagccattaagcaatttctcactcccctcccaccctcccaaccttccgagtctccaatgtctattattccacactctatgtccatgtgtacacattatttagcttccacttataagtaagaacatgcaggatttgactttctgtttctgagttatttcagttaagataatggccgccgcccgggggcggtggctcatacctgtaatcccagcactttgggaagccaaggtgggcagatcacctgaggtcaggagttcaagactagcctgaccaacatggagaaaccctgtctctactaaaaatacaaaattagctgggcgtggtggcacatgcctgtaatcccagctacttgggaggttgaggcaggagaatcacttgaacctgggaggtggaggttgcggtgagctgagattgcgccattgcactccagcctggacaacaagagcaaaactccatctcaaaaacaaacaaacaaacaaaaaaaaaaaacaaaagataatggcctccaattccatccatgttgctacaagacatgctttcatyctttttatggctgagtagtattctcttatatatgttaccacattttctttatctaattatccatcgatggatgcttaagtkgattttatatctttgctattgtgaatagtgctgcaataaacgtacaagtgcagataaatttttgatataatgatttattttcctttgggtagatacccagcagtggggttgctggatcaaatggtattcgtatataacaccataaagatttttaaagcattttttcaaaatccttcagtgaatagaaagagacagaaactggcttcctaatatctatggagtcccgtctaccaaacactgtcaggaaattcagcacgtgcttctatgttaaagagtcccaaaggaacatgacaaaggggatccttcaaggaaaggaaatcaggatgtgcaagaggtgggcctactgctgtaaggcctggcagggctcctcttgctccattcaggttgaatggtactaaatgaacaggctgagctgcacttaccgttggttgagatcctgcttgttcccaagaagccattgctagaggatgcttcattgttactaagatcaacagatctaggctaaaatggcaaaaaaaagttttgttcagatttacaatggtaagtcacaaaccaaaagattatcctaagaacagtgtcaggtctttagattaccatgaactaggcaaagaaaatgttaacaggtaaaacccttgagagatgagaagagagtgcccattctagaaaagaggataaggacacgctatagttttcctcactcatcaaactttgattttagtaccaactgtcgccagatatagctggaggtgtaaagaagcagagatgagatccttgtgcccagggagctcaccagagggcatgcggcacagatgcacatggacctcatgcttccatagcccacggacataaaatgaacagaggccccgggtcagcagctcagatcatgactctgcatgaataaacagggccaaaacaggttcacaaaataggccaagggaaccattagcattttctcttttcatagtaactacttctctttgttcaagaagttactccatcttggcctgctaaaaaatgaacaaagtccagagaagaccacttcatgagaataaaggcataaggaccacaaactattcatttggatacttgctccaaatgctaagaatatgtagttgtattaataacatcaccccaaagttgcttattggcaggtcaatctagttgcctaaatccagcaaggagctttctctatagtggttgctcaagaaacagtagtttaatctaaaccacatgtgtgagagtacttatttttatatactaattagccagaaaaactgcattagattatatgccgtgtaatgttatgaaagcacatcactttttacaaggcaatttaaaacgaaatcatgaaattaaaactcagaaagtagaagagaatgacatatttgtccccaatcttcagtcctctttactggctaatatacctacgttaatatcttactcagacaagatccctagaaggagaaaactgttagaagaaaccttggaaagactcaaacttgagagaaaagataacgcactacttcgtaacagagaggaggagatacatgcagaggaaggcattgttcaggctagagacagaggtaggagaaaacgaaaccatgcgcaataagcattctacacaccaatggcgaggcttggatgcgccccacttctgtggcactggggctgcgggcgatgcctctggccttcactcgggctcttccactcatgttcccggtgagcccagagtggccacaagagctgcaaagtctcagttaggatatgttttgctttggctacagatggcgacggtgtgacggcgaaactgcctggaggcggtggatgtccagcatccacaaccaacgccggggctggaaatgcgtccgaggcccgtgcgtgggtggagaaggcgcgctggggcgtaggggttggcgcgagcacgtgggcctgtgcaggacttcctttttcttcccattacttccacccccacccccaaatttggcattatccagctttttcatttttaccaatcttatgtgtattgggtggcatcaaacaataatttttttttcagtttgtattttctgctcaccaatgagggtaagtacctcttcatacatgtgatagttttggagttttccattctgcaaattgcctgtcgtatccgttgcccatttttaaagttgagtgtctcatctttgtgatttggaagaaaacttttttttaaaaaattgcaaatatgcaaatatctacttcctatctatcacttgttaatttttactatgaaatgctttaaccaaaatcctaaatttcgatgttgtcaaattcagccattttaaaattcgtgctttttgggtctttttaaaagaaaattccacctgtcctcagtttacaaggacaaggacattatataatattttcttttcattaacttcgtaagtgtactrttcacagcaagtatcttcaatccctcaggtatttacactcacacatatgtaagtatacatgcaatgtgagtgagatagaagtccaactttatctccatatagtgagccattcttccttgacatcatctgttaaatagcatatactttctctaatactttgtgaagccacctccagcaaatgacagattcccacgtatcaatagatctagtctgtgccttccatttctgcaccaagacttcaacactttgtatcattatttctttgtgttattcatagaatctggtggtataagtctttgctttttgatattttttccaactgatttatttattcacagactttattcttccatataaattttaaaataagttcgtcaagtttctttaaatatcttgcttaaatttcagtagcattgtatccaatatataaatcaatttaggaagaacttacatctttacaatgttagatttctccatttattcaagtctttctttttatcttttaatagagtttaatttttttcataaaagtctcatatactgagttaacttttgaaaatttcatagtttttgttactattgtgaactatatcttcttgtcatgtttcatacttggtaattattagtgtagacacatgatactggtttttgtaaagttgatattgtttatcaagcttgctgaattcctcagttcttagagcttgtcttttgatttcattgaatttgtatgtagataatcatatcatctacaaataatgataattttgtctcatccattcttattctttttctttttatttgtttttcttgtcttatgttgctcagatttttcagtacaatgttgaaggttactatggtagttggaattcttgttttctttctgattttaaagactgaaatgtctccattttgtttgatatttgctataaaaatctattttatagaccttatcatcttaagaaagctttcttctattcctgcttttcaaagattattttaattataaatgtgtgtagaattttattaaatactaccctggatttgttgaaaagcttgtgctgaagttataagggcacatgtacaggctgttcatcagagtattatttggagtggcaggtagttgcaggcagcttatgtgcccatcagaagggcaacaggtaggtaaaatgtggtagacacatggagtggattactaggctaacattcaggaataatgacctaaaaatatatttagcaacatgrataaatcttaaacacattgtattgaataaaggaaaagcttaaaaaaagattgagatctatacaatggtaaaatattacattaatttttaaaacattaaggacacctgtatatgggatatgtactaattttttaagtaaatatatatatccaagaacagacacaatagattatgtacttatataagggaataaaacaggaatgtgaatggggcagagaaagagaaagcaaaagacagtataatataatatagaacttgcacagacccgtgagaatcatacaaaatgaatcaaagaatatgattaattcaattttctgtacttggggactgaaaatttaataaatataatagctaatgtttattgaatacctacagtatgctaggcattattgccccagttttatagattaggaaattaaagcttaggcaaactaagtgacttgcccaaggccctacattatgtggcatagctgggatcccaattcaagtctgtcagcctgtaaagctcacactgtatccactcatcttctactctcctccctccaagaaggtgatctgccttacttttgatgcagctcttactataggaaaaagcccaaagcctgtgtgttatgccctgctctgccattctatttattctccattagaataccctttcatcaggttctcttggaacatattaaccctgactgctggcaagtgcaagagacaatgatggccttgggcagagatggccagccttggacttggttcagtgaagctactctaatgaataataatagatttctttgaaaatgaaagagtctgaaagttgtgagtgatcataaactgctgtgctacaaaggaggggcagatggaaaacacagtgtggacaaggaatctgcttctgaaaatctgtgctttgtttctgaatgtaagaatagtctccagcccatgttttccaaatttaccacctcctgataccacattccttttcatgtgacctgcattgatgtggtaacatgacagagtgacaagaaaggctaagaatacatgagacctttgaacagtcagatcccttcgattttccaaatactaatgtgttataaaatcagaaatattgatgatttctaattattatctgcatttttcaactctcttctatgattgctatgataaccgacatacaaatcagtcacattgtgccttccacatagggttttttaaatgcacgtgtactttccctgtgggagtgatagatgcaggaggaagataagaggggggttcccggagaacctctgactggcctgcacactgggagaatggggttggagccacagcaagttggaaccaaccgctggcagtggggaggagcctgggctcttcagttcctatatgtggcctggaatgaatctctgaggtgggggcctgtcgctttgctgaaagtttttttccttctcgcccaataaattctgcttcctcacccttcaatgtgtgtgcatgcctaacttttcctggtcatgtgacaagaactcggttttagctgaactaaggagcaaagttctccatcagtagggaggcagtacggtaaggttacaggtatgcatggcataaggttaatgtcaggcagaccagagtttgtatcccaactccattgtttactagctttctcacccaaggaaatttatgtaatctcatttaggctcagtttatttgactataaagtggggatagtgacactaggatttctcagccttagcagtattcacattttggactggaaaattctctgttgtggaaggctgtcctatgccttgcaggatgtttagcagtatctctcgcctctactcactagatggtagtagcattccctctaattgtaacagccaaaaatatctctagacatgactcactgtatcctggagggcaagtcactcctggctgagaatcgctgagatatgtctaccccaaggattgttttgaggattaaatgaaataataatgatgtttgtatggtgtttgccacacaataaaaattgcataatttattattattattatcgtgtgtggtgaacaaattttataaaaatgaattcagtacattttttgcagtgtgtcatacttttgaacttgcatcaggatcactccatgtgcatgtattggctcaggatactgctagtcataggtgcctcttgtctcatgccacccttccttcacatttttctcagtccacctttcaactccagccattgctatggcaatcaactgcacacagtgtaacctgatagcatcgcacctcaactgaatcctgtatctctcagttctgtctagggcttctctgctacagcaggacacccactcagccatactgacacagaagcaaacctcaagttaacaccttcatggggcaacctttcgccaaaaggggtgggagaatgtggataaatcctccctcttccatccactgggcagacaattctacagtgcattctttagcctcacagagggtccgtagtggggtcaagtaccagatgccacagaagtcatgagcttgataatgcattcttgagttgaatttcatcctcccttatttcactcttcccaggccctctctcctgttccttgctgtcactaaaataaaccacccactttcaagcccttatctcaggtttatttgggaggaaacttaagctaacatagttcagtaggaaaatatagtattcattctaaaacagattccatgcttgctgtgaaatactgtaaatggtaatggttccaagcattagtatctaaatgtccaagcattagtgtctaaattttatcaatgagaagccacagtcygaagatttgcctaaactcatcctgcaagtcagctgtaaaaattagtttttcagttattcagtcttgtctgtggctgtaacttaattttttaaatgattttttattaggtagaccctgatcatgtacaagtgtaggcctgttcacatcagctaatttatttgacaatacccatggttcctgctaacacaaaattaattcctcaggcacaggtgtaggtggttcaacatctgtagaattagtgcatcaatatgttaccttcattgggccttcttttaataatactggattaattttgaactgtctcattcttttaactttttattttgcaatatatcacatttacagaaaagttgcaaggataacgcaaagaatgcccataaaccttttaccaagattcaccaattaacattttgctatatttgccttattattttttctttgtatgtgtgtgtgtgcatatatatatatctatatatatatatatwttttttttttttctggtccatgttgcaaagaagttgacatcatgacctttgactcttaaatagtttagtgtgcacagcagatctttgaataatgtcgcttcattcaacatcatttccttataatgttgatgagaaaaaaatctattttcagccacggcccctggagtgggcatattcttcccatgtctacctgagttttatctggatactccaattgcctcccacatcccaaagctgtgcgtgttaggttcattggcatgtctacaaggtccacgtctaagtgaatgttggtgtggatgtgagtgttccctgcaayggaatggagtcctgttcaggaagggttcctgagctgctgggataggctccagctacccatgaccctaaactggaaaatgtgggtaaataattatcttacttgtttttattaatctttcttaaatgtatgtatagcttacatttcaatgtttaatattagaagtgttttgagtctgtatttagaagtttggtgatatctttgtcaccagaagtaagccataggaacttaactcttgtttacatcaattagccgcctatggtaaaattggtttcataatacgttgtttggcttaaagtcgaagtttccaagaatctactgacaacgttgaggacttactatatttgttaggtgtaagaatatttttcattcccttatacaacaacagtacaattatctacatcaggagatttaaaatgggtaaatactactgattaaactatagtccatagttaactttgctaagtgtcctcaaaaaagcaattttttttctggcctggaatatggttaggtcagaataatgcattgcatttagttgtcatgcttttttactcttcttgaatctgtaacatgaacagtcttgctttcttttttaaaacaaattgtgaaaaatatattattgatatgttcagagaaagaaaaattcacattaagcattagatgttaaactgcttaaacattgtaatggaaatctttccaaaatgcatcatctgcttccttgtcccattgtgctccagaaaggatttaagattatttctatatgtacaagataaaagaggaggaaatggttacaagagagagcttttctattccctagttcttcccctagtttcctctccattaggtttgcacttcctcacataagcactctctttccctaagaaaatccatccacctccaacaggaagtcccccattccaatgacccagtgatgtcattttgactttcctcagctgtaagcactttcctttgtgagctctttcttccattacargaaaaaattctctctctctctgtctctctctctctttttttttttttaatagatggagtctcactcttgccgcccaggctggagtgcagtagcacgatctcggctcactgcaacctctgcctcctgagttcaagcgattctcctgcctcagcctcccaagtagctgggactacaggcatgtgccaccatgcccagctaatttttgtatctttagtagagacgaggtttcaccatgtttgccagaatggtctcaaactcctgacctcaggtgatcygcccgcctcggcatcccaaagtgctgggattacaggcatgagccagcgtgcccagccaaattttttctcttttgattttaaaagaaattaaaacattttcatgggcccccaaaagcactgtgggccctatgcactgtgcttatggtgcccaacagataacactggtcttgctctcacccccatatgcattctgcaaactgagtgattagatgtagaagcacactcagtgaatgcagcaatcaggtcagggatggccactggctcccaggccctacagaagcgtgcagaaggtggggtgagggaggatccctggccctctaatgtcaatggccagggtagacctgggtcctttgcagtagtcccttctgtgtgagctgcaggcatgtccacttactctgtttaattatggaatgtgttagagcagtgcatgcatctctcccaaggacaggtaacatatagaggagggtagggagcaggaccgcctccattcatactgggaaaggaaatattttctcaattagcaaagctcttccctgttttccccaagtcagtacttccgcccttattgtacggagttgtatttggtgtctttccagctccagcttggggcctaccaggataaacaaggaagttagattccctcaacattggctgcttattttgttaccctaagaagggtctcccaatttatgactatagtaaggactcagttaaaacttttgattttctcagtgctgggtgattggaatggagggatatctttcattagcaactctgtaaataaaggagcattaccaagagtaacaaacaggcctaagatctacaaagttcagagttgttgacctcagtctgaaaaattgggaacagtaagccttctgttaaccactgaactcagccccagtaattcccttactgaactcatgcctcaaataacaatgaccccaatccacactattgtcagacttcatggctagtcaagtcttcccacatggagtatgaaagctgagatttcttgaggtaatacgattcaaatttggtaacatcctaattggttcagaccctgttttggcytaatactatggtaatattcactaggcaaagagaaggttgttgggacattggggcttagtctttgagggggaatttcctgagggggtgggtgaggggagtcatgagtgactcagctccaacaggactgctctattctaatctgtttcatatattgggattctacataaacttttgtttgaaaattagattctgctcttttaaaaacgaagtttgaaagccaccaatatagtctttttttcttacttttattccagaaactacctaagcaatcctaaacagaagcttaaatatttagaatgttgatctttcatccacctaatctcaaggtggttcacagggaaaaccagtagccttggagtccaagacatgtagaatcagcctttgctgtgcagtgaggagctgtgtgatccgaagtgagtagctccgcttctcagttatctgtaacaagaggattataaaacttagctcaacagggggtgttgtgagtgtaaaatgggataatgtatgtagggaagtactcagcttagatagccatattgcagcttcaatagagttcaccttctctgagctgccgtcttcccacttaggtcaacctcatgtactctccctgttaaaggaacttcttcgctaccccatggtacaaaactcattttcttttatgtgggtctcagcaaagataaaagatgctgttaccagaaaggggtcccaatcsagaccycaagagagggttcttggatctcgcacaagaaagaatttgaggcaagtccatagagtaaagtgaaagcaagtttattaagaaagtaaaggaataaaaaaaatggccactccataggcagagcagcagcatgggctgctggttgcccatttttgtggctttttcttgattatttgctaaaaaggggtagattatttcatgcttcccctttttagaccataagggtaacttcctgacattgccacagcatttgtaaactgtcatactgctgatgggagtggagcagtgaggacaaccagaggtcactctcatcaccatcttggtcttggtgggttttagtctgcttctttactgcagcttgttttatcagcaaggtctttatgacctgtatcttgtgccaacctcccatcttatcctgtgacttagaatacctaacttattgggaaagcagcccagcaggtctcaggcttattttactcagcctctattcaagatgttgttgctctggttcaaaggcctctgaaaatgctggatatcattctgaacaatgagccctcatatgctatagaaaattacttctttagttacttgtttattttctctttcctccagaagattccaccacgagtacttgagccttgcctgagtgttcactgctttatccccagcaactagaacagtgccaagcaacttggcaaaatatttgttgaatgattaaagatgcttgaagaccatgagaaaattcccccatagctttttcttctctggtttatattgtctcatcacttcacatgcttccataaagaacctttattccaactccttaatcatgtttctcaaatcactcaacaactttggcaattaagaaagcagaatactagttaaagtaggatgaaactgtttactctcacacattatgatatacagaaataagtttaatctttcttccttaattcaacttgcttactgtctagggtctaggcaccagactgttatacttaataaataaagtgagatattatattcataatatcaagagaatgcaagtggaattttaagcagaatggcaggattgccaaagttgatgtctaaataattgtggttaatggtatatgctacatgcttatagaattactggttaataaaggacattaacaaatctttaaagaagacacctaggagagtacatctaattttccaaaatgctatataatactttagattattttagcatgaaacaatgaaaaataagtttaaaactttattagtcatgctagatgaatgctggcaaaataaagtgctttcaaacagagcaaggaagatgtaatgagtaagacattcatttcttttggcttcaaaaggaatttgttaagattcatgggaagcataaatataatgtagaaaagtataaaaagaagaaacatttaaaatggcatttgaattactaagaattttatgtttaattatgtatggggcatgataaatagatactcacttaaaacttcagaaaatactgccagccaagtgtttatagtgctctgaaaactcagatacatagcccagtgaaatacaggggaactttgtagtcaatctctctgatttgcgttacagactgagaatcagagagcaaagctgtctgtgctactatgagttaatcacctttacatcacaccagtccttttcaataaatgaataatattatttcatgccaagatttctgcctgtcatttgtgtggggtaatctattctaaccttcctaaccttcctaatgtgctggcttgacatctaggatagcgccacacaaagctattggcacattggccagttcagtctcctgattcagagtatcccaaacaggaatagcattgaatctattcctattaaaccagcaatgacattcttcacagaactggaaaaactactttaaaattcatatggaaccaaaaagagcccgaatagccaaggcaaccctaagcaaaaagaacaaagctggaggcatcacactacacaatttcaaactatactacagggctatagtaaccaaaaaaagcatggtactgctacaaaaacagacacacagaccaatggagcagaatagaaagcccagaaatagggacacactcctgcaactatctgatctttgacaaagccgacaaaaacaagcaatagagaaaggactccctattcaataaatggtgctggaataactgcaggccatatgcataaaattgaaactggaccccttgtttataccccatgcaaaaattaactcaggatggattgaagacttaactgtaaaatcccaaactataaaaaccctggaagacaacctaggcaataccattctagacataggaatgggcaaagatttcatgacgaagatgccaaaagcaattgcaacaaaaaaattggtaaatggaatctaattgaacaaaagagcttgcgcacagcaaaagaaacgatcaacagagtaaacagtttacagaatgggagaaagtatttgcmaactatgcatctgacaaaggtctaatatccacaatctgtaagaaacttaaccacatttacaagaaaaaaaaaaacccattaaaaagtgggcaaaggacatgagcagactttcatgaacagacttttcaaaagaagacatacatgtggccaacaggcatgtgaaaaaaaaactcaatatcaccaatcattagagaaatgcaaatcaaaaccacaargagataacatctcacaccagtcacaatggctattattaaaaagaacagggctgggcgcggtggctcacgcctgtaatctcagcactttgggaggccgaggcaggtggatcacctgaggtcaggagttcaagaccagcctggctgacatggtgaaacgctgtttctactaaaaatacaaaaaattagctgggcatggtggcacgtgcctgtaatcccagctttgtctctgtgatccttgtgcattaataaatctgattgactgactgattttggatttctagttatcccactaccactctgttttcagatatggaatttatacagattaagctaaattgtaatcgtggtagaagataatatatgccaggtcgtaggagacacacatatttggacattgattggccacagataacctttatggcagcatctttctggaaatactagtcttatcacttgcacaatatcaagatgatcaggcaaatcagacaagtcaaagctattacatactgttccaattacatcaagagtctataggtgcagatttaatctcaagtataagttcaaataactgaaatataactagaattctgcccagtccacattgaggaaaaaggagaattataggagtgggaagagagggaggaggaggagacacattgattattgtttggggacacagctacgcttagacaaatgaaaaaaaaaatgaataaattaagtagctacacatgaaggagcaacatgaaaattaaaagtactttgaacatgtacttttggcatcacagtggcttcttctaagtttaataaattggtatagtatataatccaagtaataaaaataactataaatatgtgcataatgagttatgaaaagaaaagcaacgaattagtctgggttttttttttttttttcattttttgagacagggtctctcttgcccagcctggagtgcagttgtgtgatctcagctcgctgcaacctctgccagctaggcaggctgttattattaaaataataccgaaaatcagagtaaaaaaatttgagctctgataattggaatgactagtgcccaaattttattacagcttctagttatttctgttkgcctgcagcttaaattttaagtaatataaacctattaataatagaaacataattctcaacaaagatgtcttacatatgatcatagttccagcataatgacatgataacaagacaggacatagctgatatttaagaggagataggtacattctagtgttccagttgtagaaaaatccacataaggaacaatccacaaatccacactacatcaacaatacttaggccaaaatgttgcggacagctaccaaattcctttgccaagtgttcttcaagtttttcaggttaaaaatttggggttcagaagtcccagtggacagctcagcagcatcaccctgctcacccccatgcccccatcccagtacacacacacctcccctcccgcttcactcacaggcaaaaagattttgttaagattggatcccatccactatagatggcctaaacctgcaatcaccaatctgtgaacagggaggctgtcctccaaaattacagtaccacatttccaaacccaaacttgggaaatatggaggaataggcacatattacaaaatattataaattaaaagtacctgaggaaatccaggacctgaaataagtcgggacctggaatcaatgggcttgactctgtatcactctagagccagtactrtttctttatattaccagtgttccctgtccatcactgggaatgcagaaaattagaaagctcgtagaatgatgaggaacccagtaccagagcraccctggaccctgattcctgtaatcctggccagtgatggtgattatactccaaatcacatggactggatacctgaaacagcaaggctgctacccatgtggccccatgtcatgtccacctggagagtattatacttatctcacaagatcacaactgctgttaacctgatactggccctcaccataaggtttgtaggctcttgtaaacaccataagaactgctggcaaccacccaaggcattgcctctagtgagtcagcccaccttgtccaagaagcccttcccagtcctgtctcctgcttcattccaaatatccagaaactgagactccacaagcctcctggtaaaccagtgctagagatgtgccccatatatagataagaaagatatatatatatataaaaacatatatattatatatataaacatatatattatatatataatataaacatatatatatatacacacaaaaaataagccgggcgcggtggcgggcgcctgtagtcccagctactccggaggctgaggcaggagaatggcgtgaacctgggaggcggagcttgcagtgagctgagatcgcgccaccgcactccgcctgaacgacagagtgagactccgtctcaaaacaaaaaacaacaacaaaaaaaacttagacttaatgaaagagtacgatagtgaaagaacacagactttggagtcaaatagacctgttagaatcctggctcagttactatctgcataattgtccatgattaacatgttgattctcagttttcttatctcaaaaattgagataatgtctgcgttatctattgctgcataacaaacaaaccctaaaacaaaaaacatcgagaatcctggtgtggcctagctgggggtctctagctcaaggtctctcgtaagattgcagttaggatgtcagcctcatctgaaggctcaccttggggagaatcatttccaaactcacttgtgtggttgtggttggcaggactcaggtttttttggtgttttattttatttatttatttatttttgagacagagtcttgctctatcactcaggctggactgctatggcgtgatcttggctcactgcaacctctgcctcccaggtgcaagcgattctcctgcctcagcctcccaagtagctgggactacaggcgcacgccaccatgcccagctaattttttttgtatttttttagtagagactgggtttcaccatgttagccaggatggtcttgatctcctgacctcgtggtctgtccgcctcggcctcccaaagtgctgggattacagacgtgagccactgtgcccagcctggactcagttcttagccagctgttggacygaggatctcagaggcctttctcagtttcctaccacagggcagttcacgccacatcagttggcttctttcagagcaacgaaggcagagggtgagaaagggctcccaagaaagcaagctggtctttgtataacctaatctcagaagcttcagccttgcatttctcccataycctattcattcgaagtgagtcactaaatccaaaccaaactcaagggaaagaatacaggagggcatggataccaggaggcaaggaccaatgtcagtcatcgtggctgtgtaccacaatgcctttaactaaagagttaaaaaacagaacaatacttaggtaaagcatcctgtgtatagtaggagcttaataataacaaatattagtgaattaaaacatctggcaaagaatcctaacttcaaagccacaaatttgtacctccccaagaaggcttgataaaccctaggttatctaaagttatctaaaggtgttactgtttgatcaccaagatggatgtgcttaattatatttcagaataagtttcagctaatggaacagagatttttaaaacatgtacttaacatatgagaaccagaaaaatcatagggtaagggcaggtgttcctagttgctaggagaacaaaatccctatagagattaatcattttgaaggtgatgcttaataataacacttatttttaactgcagtattagtgaaaaccatcaggtgcctaaagtgctgagactggagcctgcagcacttatatttcccagaaataacattaagatgacttagtttttgatgaaggacattcattcctgaaatgcaatcctctgacaactctgaggctmctactgacagttatttaaattatttggttctacatttgatctaacatatatatcatgtgttgggattatttctcaacacgactgtttccctgacaaggcatacgcttgtccaacagactattttgagtgcagggtccctgctttaattttatttacatcccgaagtcctagcacagtgcctgcacatagaagccactcgaaaaatgttggttaaaagttgctgattttagtcccatttcttccccttttaaaaataattcagattaagatgcttagcactcatggtctcatagggcattttttttttagtatattaggtgagattcagtaatttttttttgggataggatctctttgtctccaggctggagtgcagtggcgcgatcttggctcactgtagccttgaccttctaagttcaagcgatcctcctgcctcagccccttaagtcattgggactacaggtgcgcgctaccatgcccagctaacttttgcattttctgtagtaacagggtttctctgtgttgcccaggctggtcttgaactcttgagttcaagggacccgaccaccttggcctcccaaagtgctgtgattacaggcatgagccactgcactcagcttcagtaagtttttaaaacattcatttgaagatctgaaaataaatccatcataaaaatccaattctttaaaacttacttgaaatagctttttttttttttttttttttttgagatggagtcttgctctgtcgccaggctggagtactgtggcaygatctcagctcactgcaacctccaaatccctggttcaagcaattctcctgcctcagcctcccgagtagctgggactacaggaacccaccaccacgtccggctaattttttgtatttttagtacagacggggtttcactgtgttagccaggatggtctccatctcctgacctcatgatctgcccacctcagcctcccaaagtgctgggattacaggmgtgagctaccgcacctggccttctattctttaaaacagtaaattggtgattatgacaayataacaaaatatacttctttaaaagtgaatattgagtacagatgaaatatgctgtctagaaatgaaaaagtggccatgaatgcgaattttccaagatgaagaaaaggaccattcattcaagttcaagaatctgttgtcatgaatcaagggacagttctatatttctgctaaaatgttaggtgatttcttgttaagtttctgactttccctgtcagtgagttcagacttcttgatttgactccccatttgctgacagatgctgcgtttcaagctggagcaaaggtttcttttcagcattgtggcagagaatggtagattttaacctatttcctcattcttgccgcatatgttcctcctttgtcctgccactcttgccgtttaacacttatctttcctctacttttctcatgtttcctagcctctgcctttcttctatctgatcgtctcttcactttgtacttttatccccacccccatctttcttttcctcttcactccccatctatattcaccacctgctctattttacaatgcacttttctttttactcattcattattgaatccttttttcttgccaatcctgctcctatcttcagctggccatcataatttttcaaagtctgtgcttaaatgaacatgtcagagtgtgtgtgtgtgcatgcatgtgtgtgtgcgtgcgtgcgtgtgtgtggtgttggaggagggcaggtaggaaagaagagacaatagttagtgtttattaccacttcgtattttcctatttcaataatttaagcatcggctgttaagaagaaagcttgcctccccttctctctgcccatcatcatgttcccagttctgatcctactctttttaaaatggcatttaatttagtgaacaggagctagagacaatacatggagggcatcacatcagagcactcaggaaaataaactggactgagagaaaggagtatactacttatgcccttggagatgattcctcagaataaagtggaaaagacaggcaagaaagaacaagaggacaggctgaattggactttgtgcaacacagaagaggcaaagccatcacattccaattaccaatctagaactagtgaacttacagaaactgccccaagccaagaaatatcccatgggtgacgactgaacacattagtgcatggaggatatacattataaacagagtcattttccatctcattattttaatcattttgtcaaaaaatctgaacatgtgtacataaatacttgatttgttaaaagaatgtgtagcatagaaatccctgagacacattcaaaaatgacttgacatcttgacatgtattcaatgcaagtattcaccaaactaaataccaaggacttggctcctttccctgatatttgaggcatataaagctttaaaaatatatataatatactatatatataatttacatctttaaagttaaattatattttctttctctgattcctggttttctgccagtttactgctcctgcatattgtcagttccagactgtaaggaagccacattggaaagcagataagcactttcaaccttagggtgccagttagtagaatgatagcacgtggaactaggaggtcccaacagatgattttgtctaacccactcattttgcagttcaggtgacagaggctcaaagaggttgtgatttgcagaagcatggctggttctgccactgctattgtaatgttatgcaagtccttcagtgggcctggaccttggctccttcctcggtaaaatggactgatggtaatcacagygaatattttccaggtgcttcctacatgccaggcactatcctgagtacttcaagtgtctaatctatcctctcaacacctccataaattatatatgcaaagcgtaaaatatttactccctggaaaaacgtttgccaatccctggtttagatccttgaaaatttagaacatcttataattatatagcactttacaatatacaaagcaccttggcatacatcatcacatttaatctttgttttgtagggggataggcattcatgcattgtaaaggagaaagctaaaactcaagagtttaagtaacttgcttcatcaaggccacagagtcatacccaggttctgactccaaactgcatgctctttacatgaaactcctctgtctcccctaaattactgctaggaaaagacttggaaactggaaagaacttgtgaatactgaaagcaagtcagaccgtcttctgttacaaatgtcattccaggtgcattcatgtaattagagtcatcaagtactaaaaatactaaatttgtaataaatttgagggaaaagccttaaaggaggacatgacaatcataggaaaggcattttgaaatacatacagtgcaccgatatgcatttttcttaaggtatgttagagctgaacctactcaatttaatatatgcaaaataaaatgagcaattgccacattcatctcgctctctgatgagattagtgttaaattgttccacattaacaatgtgtatgtgaataaaaatgcaatggctgggcacggcggctcacacctgtaatcccagctctctgagaggccgaggcaggtggatcacaaggtcaggagttcaagaccagcctgcccaacatggtgaaacgcagtctctactaaaaatacaaaaaattggccaggcgtggtggcaggcgcctgtagtctcagctgctcgggaggctgaggcaggagaatcgcttgaacctgggaggcrgaggttgcagtgagccaagatcacgccactgcagtccagctggggctacagtgcaagactccgtctcaaaaaaaaaaaaaatgcaattataccttcctcatgctaattattccataaataatatggttagttctaaatggacttaatactaaaaaaaaattggtaaaataatagataccawttthtagagctttaccaaaacgaaccaaaaaaatattttcaaagaaagcctaggtgcttcttcctagtttgcaagtcaagcttaatctaaatggtgatttagattatccttttaatttattctacaacataccttaagatataattttagacctataaatagatatgaggacatcctgaaatcactgcaagcaaagaaggaagatataaaatcatcaattgggtgcctgctattttaggtactttcacttacttcctaaagtgctcaaaatgagcttgtgaagtattttcgccagtcattttmtagatgaggacgctgaggctcaggactactactaatttacccaatgtcacatagctggaattcaaatctaaactaggttaccttcaaaacctgaactctttcccactgccccatgtggaatcccggtaacaccaagatcactgactgttatctcataaaaactcattttaagaactgaacttttatctttattcggtggctggcactttgtaattgtaattctgcccacactttaatactttaatgaggacattttctccacagcttttcatttgtcctctcaagaaagtgaattgaagcacctagatttaagtgagcttttcaagtatgtctgcaaaaacatgtacagagaggtaaaacttgctttatgattcagagaactgcactaatcaaatgcaaaatgactatttacagcagaactctgtataaaactagttaatcttgaccctacccacaataattagtcactgagggtccttattctaataagtggaggagaaaactcccattatttcaggctttaagtcaactagctttctaatattgatttatggtatcattaagactgtcacagtaatcaaacaggttctgccaattgttttatcagtcaccatttactttttggaagtgatagattgtaagagccctaaagagaaggactttgccttgtataattctctatcttccctagggccccaagctcagtgtctggcagagtaggcatgtagtggcacctgctgaatatgctgcttactcagtaacttgtcaagtcaatgcatgtatgttcaagattggttccatagcacagtctcaagggcactagaaatgtgaggatatgctataccactgcattgactgtgaggggaacctgctggcaccagggagaagcgcagatttagcctttaacaagagacagagtaagttaatagtaggcactaatgtagttctgaggatctaaacatttaactaaaaactgtcagagataaacaaaaactgccaacaacagatatcatgaaactttttttccttttgcatgattccataatgtagtgcaatacctttcactgttctgcagagggtaatgccagcactcctgcaggactggcattgcagtttaaatttcaggtccagtaaagacatgaaataaataattgtgtggaagtgacactatggcttccttctcttctgtctgtaaacacagactggttttctgggaagagggaaaaaggttgcttctgctttattttcacatctgtaattttaatatgatttaaaaaatccaggttatagaaaaacataaagacagaagaaacaaattaggagatgactattcacattgtaaagggataaattctccatagggtttcattaaatactgaactcccctaagtcaatgaatttgggacttgatttaaatgcagcttttcaggaatacatttcttatgtaaagtgaggtacacgcatgtattcatcttaagtttcctccaaggacaatccagcactttgcttccattcacaggacaggggaacagatagtacttgtgaaagaagtcagcggcccctcttggactgccctcctcacctttctcaggagccaaggctgtgaggaatccaaacaacaaagtcccacctgcagccacagtccttccactctccaccaacaaggctccttctacaaccacaaatttgcttcaccttggtccagaaaaacgtgaatcgggaacagttgtgtatgagatttggaagctgcacgggccacaaatatggcctgtggcagatggggaaattcaggaaaccgcctcaacggcttcttgccgctaagctatttcatttctgcactggttacaaggtgaggaagaaccccctccttcacccctaaacaatgatgcccatcagcagcaaagggagcccaattgctagctgtgcaaaaaatatggaaaccgggcccccatctctgtgctgagtaatattaattggtaaatcgtttttttcccatagagcaaaaatgggtgtttgaagaacttactcccatgatgcggcagtcaaggagatgcacagtagaggatcaaaaagctgacaacttggcctcccctgggtcgcttccaggggagcgcggcttcaccgctcgaaccagctggccaagttccgtatgctcttgggccggtccccagccctctgtacagcctggcacacccggcaccaaggctcgtcccagaaggaggtgatgtggacagcgtagctccggcgccagtggaagtagcggcgatagaccgcggggttgcggtcgaggaaaagcargtacgaggccagggaggaggcacttgggaagtcgtccacgtggatgaaggcgccgcggggcacaaagcgctcgtagttggcacggtctgggcccagcaccaccggcaccgccccagcgagcaacgcgttgcgccagagcttctcggtgatataatccaggtgctgcgagttctcgaaagccaggtagaacttgtagcgggccactgtgtgcaggagcccaatttcgggcaccggctgccccggcccgccccggccgaacacgtccacggtcacatgttggctcagttggtggtagtagcggacccgggcctggcgctcgtcccagtggctcaccacccatgccaccagcccctgtttcctggacagtggcggggccaggcctgagggcgggtcgccggggtggcttctggggtagaggtagccataaggcacaaagacgtccgagtccgcccggtaggagagcgtccagttgaagaggttacttgccaggcttcgcagccccggggagtgcgagggcgactcgaagttcatccaaacccagcgctggcccgggggcctggggctggaggtcgccagggcttctgccgccgccgctgcctcctcgtagtccaacacgcgcagatccacctcctcggcagtgtgcgcctggatgccccagggcgggggccagtcggggggccccttcacgaggtcgcggtggtggaaaagcacggcctgagcctctccgtaggacgcgcggtcggtgagcaggcggcagccgctgatgttgaagcgcagccggcagtcagggggcggcctcggggcgctatcgcgccccccgaagggctcccaccacagcagcacgcccaccggtcgcgacggggttggcgacgcccagggcagcggcggcagctgcccccagcaagcgtaggtgatcagcgccgtacacgtcaagccggcggccgccagcacacagacggtccatggcagcccccggcctcggcgccacccgcgccgcccgcccgccgccgccgtcggcgagccccacggtgcccccatggcgcgaacaggcagcgctgcctccgctcgccacgcgtccgcaggcgtggaggagcggcaccggctctcatgctgtagctgcggctccagccgtcgctgccgctcgccgctggcccgggaatggaagggggcggtcccagaatgcaaaggccgcgggccctgccctgctcctcccaagtgccgggcggggcgagccgccagggcaaggtgagctggccaggacgcccaaccgggcaccgcccgtccctttcttccactgcgcccggggcccagccggcccgaccaggccccgggagcctcctgcggcgcctccgcccactccttctcccagcccgcgcccgagggcttccgggccgcgccccacaagcgcctcatccgctactcttgattctctctcaactgatccggtttccctctgcgcgcgcccaccgccctggccctcgctcactgtggcccgaaccctcgccttccagagggaaggcccggttcatccctgggaaggtacaggaggctcgagaccttctaaagcagctgccgcgcaggagcaggccctagaacagacggaaggcggacccggcgccgcggaacggaggatagcgtcggcttcctgccgttgggcctagccacccgccagcgacgcccgccggagggagggattgagggagggagggagtccagaggccgggggaacgtgcgagcagaggcgcggccaccgcatccgtggccaggatctcgtggcccgccgagacggtcgaattgtggaggcagcccgcagcggcgtggccttcagagtctctgcatttggtgaagaacttaagttttcaatgtgagtgctcataagaacatttcctttgcctgccagcccagtaaaggatagagaacaaaatgttttcttagcaatcaaaacatgttctttcctttggtcccctaccaaataagtctgacttgccggctcatagtagtattgcttgtaccaagacgcacaggactcataaaccaaagatgaagatgtgrcccccccaaggcccttgtcgtcaaggaatttattgcctgttcagtgagatgaatgaatgaatatcactattaattttaccaagcacttaaaaaacattttctgcacccatgaaagttatgcaaaatagtttggatgataaaatgatgacgaagataaatattctagcacccaagttaagggtgtaaagacagtatcgcactggcctcttctaccttattaggcgacactggagacatctacgtctacagtcacttgagaaattttttacctacgggttgaatttgaatttctgggtgttcgctttggtttatgatattcaacttttattcaggggatttccaaatagatcaggggcggggctgctgacctaaggagaggagaaagttttgagagaagttttagtagatcacagctgtgcatcagtggagtcccactgatactaggggagaaatagacagtgctgggaatggggcaatcctgccaggtgtttttgatgttatgcctacagaaaataaatttgcgttagccatatgaatttaagaatgttttcattaaaaatcaagtataggccaggcgcggtggctcacgcctatactcccagcactttgggaggccgaggcgggcggatcccgaggtcaggagatcgagaccatcctggctaacacggtgaaactctgtctccactaaaaataaaaaaaaattagccaggcttggtggcgggcgcctgtagtcccagctactcgggaagctgaggcaggagaatggcgtcaacccaggaggcggagcttgcagtgagcccagatcgcgccactgcactccagcctgggcgacaaagcgagactccgtctcggaaaaaaaaaaaaaaaaatcaagcattgtgtgtaaaagcttctataaaagtggcttccgggtggcgctctctgcagggccacagcctcagtttggagactagatggaggatgttaggtgttctggctaggcccatcaacctagtaacatttcctcctgcacagtaaaacctttcataatgcttctggggttttttgtttgtttgaaaaacagaaattagaaatcaaatattttatttgaaattagacatttcagtgacttttttccactcttacttttaattaaaagaaaaagctataaatgcacaaattacttgtttaaacgaaataaaggaaaaagtgtattggcttctctttttatgcaattcaagaatccagccatttattcacattcttctccctcttcagttaaataagacatcacagatagagcctaacattgtgtctggcacgtggccggtaggcatttgggaaatattaccctgcttgattgcttccttccaccactcccgattttctcttaagcctccgaatgttccaattaagccatctttttacctgaagaatgcccgaggtctcatgcatatcaattttctttgtgccctcttacctcggtagggttgagaccacaaactgcccctactatacccttatttgatgtgggaggaggggatactaggtagtaaggtgtgtctggatgaatggaaaccagtcgtgacttcgcaaattgctggttgaaggtcatacgtgatcattgtgcatctcatacatgcacaaacattcacaggggactggattgttcttattttaaaagagccattggtagggtagaggagaaggaaagggaggaaaggagttatgggaaattaataaatttactcacttgttcatttaacaaattgggaaacaaatgcaaaacacggtttctaccttcaaaaatctacgagagaaacagatagtggggagggaagggatcatggaaggctttgagaaggtggctcctggaataattaggaatcattacaatgcagaggaagagggctgaggtgttagttgccacagagggagcagcactgcagaggccagggagggaagactggggcagtaggcgaggaattactagggtatagtttggcgaaggagatggtgtttatcctgcaggctgtcgagaaagtccttggaaggctttaacaaaggaaggaagcgatattcatttttaaaatgaattcttatttttattacgtataaggagggtgagtatatggatggggacacgggggggctgcggaatgctgactgttaatgtaggctctggttaatgggtgtgtttggttatggaagttcatcaaactgtatgcttacatatgtacttttatgggtggacattatactttagaaaaaagtttctaagaaaaaatcattctgtcattagtaaagagtgagttgggtaaaaatagggtaagagtaggggtgtggtggtgtgcagttggaaagttattgctgtaattcagatgtgaaataaagagggcctgaactgagacagtagctgtgaggatgaggaagaaaattaaaggaggatagattcagagagatttaggaggctggtttctttctctgggaagcctttctggatacccacaaacatatatccagggtagtttacatggccctcctgtgcactctcacacatgctgcacctttcagaacatcatgggacatccagagatcatgactgtttcattcataattccatcctgaacacccaccacggaaccaggtttctagtagtgaatatttgttgaatgaatgtatgcccttaatgtatcaccgaaattatctgttggtatctctttccccactacaaaatgagaagacatccggagatcttggctatgtgaatgacttgctatgaccttgaaatgtcccttaagctttcagtggaaaatattgtacatgtattaagcatagtcctggcaacaggcatcagaaatgatatcaaattagactgctgtcattggccaaacctgggatgagtgctcattcttgaagcaatcactgtggtcagggaatgggtactctctttagaccctcctctggagctagaatcagtcccatctgaataacagatgtggaataatctgttattcttgaataacagtgcggggagagaagttacccaaaagaaaaaatgaggtggtgttacctgaaaaagagggaaaggatgctaggtgggcaaaaacatgtctgctacccatgtggaaggagatattactattcttacaatgaagaggctggactaaatgaactctgaatcatcttagatttcgaacatggaagaatagtccatgattcttttacatttggtaacaaatgattctttgtgcatttaaaggcctctcagtttccacaaaatattgcacagaaagaactagctttcagttgccagcatgaagatgagatgggcatggagaagggtctttggaccctgagggttgcaaaagtagtgtagaagagagctccataattcaagacttaatttatgacactgaatgagcaatgaactcacaacatgccaaaagtgacctattcggttccaaaattttatattggacagaattctttgggagcaagaaccaggccaactgtggttcctaaaattcgaactcattccttattctttctcaaggatatagttcatttgataataagaccatcctagttcattttaaaggctctcccagtgttactcaccagagacagatttgatatttcctatggaagccccagaataggttctgactgcctagctttctaggcggagccaagctctgtcagcataaactccctgagattcaggctaccctcaaatgggttgttacccttggttggctctgagatttctgtgtctgaacattggcctgctaagtatgttttaattttttttccttgaagagagaaaaaggcarttgagtcccttcctacattgtgtacttaccaggaaatgctgagggcgtcagtgagcaggtgtggttggaatggctaatctgtgtgcaaataggtggaggcagtttcctttgtcaggaacaattttttaaccttgcatagttggacagataagtatggaatggactgttggttaaaaaatcaaaaattgtgtacaatcaatgacacccacaatctattgttcattgccctgcaaaatcttttacagaaaaataaaactgct
